United States Patent Application Publication US 2023/0026259 A1 - sequence listing, part 81

SEQ ID NO: 185788 - DNA, 868 bp, Homo sapiens
  Payload ID: 16582
  Gene Symbol: SAT1
  Gene Name: spermidine/spermine N1-acetyltransferase 1
  ENST ID: ENST00000379254
  CDS Start-End: 180-611
gcgcagctcttagtcgcgggccgactggtgtttatccgtcactcgccgaggttccttgggtcatggtgccagcctgactgagaagaggacgctcccgggagacgaatgaggaaccacctcctcctactgttcaagtacaggggcctggtccgcaaagggaagaaaagcaaaagacgaaaatggctaaattcgtgatccgcccagccactgccgccgactgcagtgacatactgcggctgatcaaggagctggctaaatatgaatacatggaagaacaagtaatcttaactgaaaaaggacacagcattgttggttttgccatgtactattttacctatgacccgtggattggcaagttattgtatcttgaggacttcttcgtgatgagtgattatagaggctttggcataggatcagaaattctgaagaatctaagccaggttgcaatgaggtgtcgctgcagcagcatgcacttcttggtagcagaatggaatgaaccatccatcaacttctataaaagaagaggtgcttctgatctgtccagtgaagagggttggagactgttcaagatcgacaaggagtacttgctaaaaatggcaacagaggagtgaggagtgctgctgtagatgacaacctccattctattttagaataaattcccaacttctcttgctttctatgctgtttgtagtgaaataatagaatgagcacccattccaaagctttattaccagtggcgttgttgcatgtttgaaatgaggtctgtttaaagtggcaatctcagatgcagtttggagagtcagatctttctccttgaatatctttcgataaacaacaaggtggtgtgatcttaatatatttgaaaaaa

SEQ ID NO: 185789 - DNA, 1065 bp, Homo sapiens
  Payload ID: 16582
  Gene Symbol: SAT1
  Gene Name: spermidine/spermine N1-acetyltransferase 1
  Uniprot ID: P21673
  ENST ID: ENST00000379270
  CDS Start-End: 180-695
gcgcagctcttagtcgcgggccgactggtgtttatccgtcactcgccgaggttccttgggtcatggtgccagcctgactgagaagaggacgctcccgggagacgaatgaggaaccacctcctcctactgttcaagtacaggggcctggtccgcaaagggaagaaaagcaaaagacgaaaatggctaaattcgtgatccgcccagccactgccgccgactgcagtgacatactgcggctgatcaaggagctggctaaatatgaatacatggaagaacaagtaatcttaactgaaaaagatctgctagaagatggttttggagagcaccccttttaccactgcctggttgcagaagtgccgaaagagcactggactccggaaggacacagcattgttggttttgccatgtactattttacctatgacccgtggattggcaagttattgtatcttgaggacttcttcgtgatgagtgattatagaggctttggcataggatcagaaattctgaagaatctaagccaggttgcaatgaggtgtcgctgcagcagcatgcacttcttggtagcagaatggaatgaaccatccatcaacttctataaaagaagaggtgcttctgatctgtccagtgaagagggttggagactgttcaagatcgacaaggagtacttgctaaaaatggcaacagaggagtgaggagtgctgctgtagatgacaacctccattctattttagaataaattcccaacttctcttgctttctatgctgtttgtagtgaaataatagaatgagcacccattccaaagctttattaccagtggcgttgttgcatgtttgaaatgaggtctgtttaaagtggcaatctcagatgcagtttggagagtcagatctttctccttgaatatctttcgataaacaacaaggtggtgtgatcttaatatatttgaaaaaaacttcattctcgtgagtcatttaaatgtgtacaatgtacacactggtacttagagtttctgtttgattcttttttaataaactactctttgatttaattgtttggtgtaagca

SEQ ID NO: 185790 - DNA, 946 bp, Homo sapiens
  Payload ID: 16583
  Gene Symbol: SAT2
  Gene Name: spermidine/spermine N1-acetyltransferase family member 2
  Uniprot ID: Q96F10
  ENST ID: ENST00000269298
  CDS Start-End: 221-733
atgcccggacagaggatcgcctcgctggcctactctctcctcccgtacggcgccggaatcccagctccacttaccaggccgcggctaccccgccgtcccccccgactcccgccaccccgctctctcaggctcttcaggatccaagtccgtaggccctttaaggggtctagttgccgtttgcgaggccctgggactttggtcccagacagcggggatccggatggcttccgtgcggatccgagaggccaaggagggagactgtggagatatcctgaggctgattcgggagctagccgaattcgaaaaactctcggatcaggtgaagatcagtgaagaagccctgagagcagatggctttggagacaatcctttctatcactgtttggtagcagagattcttccagcgcccgggaagctactggggccctgcgtggtgggctatgggatatactatttcatctacagtacatggaagggacgcaccatttatctggaggatatctatgtgatgccggaatatcggggtcaagggattggttccaaaataatcaaaaaggtggctgaggtggccttggataagggctgctcccaattccgcctggccgtcctggactggaaccagagggccatggacttgtacaaggccctaggagcccaagatctgacggaagctgagggctggcacttcttctgctttcaaggagaggcaacgagaaagttggcaggaaagtgacgccatccctaggaggatctctgtcttgagtttctccttccccatcagctgaagcactcttcagagactacgtccacagacactgatgctgaggcctccctggaggaaggagggttaggggtgcctatcctcaagtattggaagagcagaattgagggagagacctttcttccttgttgagggtgaaaaataaataagaattacatgtcctga

SEQ ID NO: 185791 - DNA, 640 bp, Homo sapiens
  Payload ID: 16583
  Gene Symbol: SAT2
  Gene Name: spermidine/spermine N1-acetyltransferase family member 2
  ENST ID: ENST00000573566
  CDS Start-End: 171-581
cgccggaatcccagctccacttaccaggccgcggctaccccgccgtcccccccgactcccgccaccccgctctctcaggctcttcaggatccaagtccgtaggccctttaaggggtctagttgccgtttgcgaggccctgggactttggtcccagacagcggggatccggatggcttccgtgcggatccgagaggccaaggagggagactgtggagatatcctgaggctgattcgggagctagccgaattcgaaaaactctcggatcaggtgaagatcagtgaagaagccctgagagcagatggctttggagacaatcctttctatcactgtttggtagcagagattcttccagcgcccgggaagctactgggtcaagggattggttccaaaataatcaaaaaggtggctgaggtggccttggataagggctgctcccaattccgcctggccgtcctggactggaaccagagggccatggacttgtacaaggccctaggagcccaagatctgacggaagctgagggctggcacttcttctgctttcaaggagaggcaacgagaaagttggcaggaaagtgacgccatccctaggaggatctctgtcttgagtttctccttccccatcagctgaagcactc

SEQ ID NO: 185792 - DNA, 838 bp, Homo sapiens
  Payload ID: 16583
  Gene Symbol: SAT2
  Gene Name: spermidine/spermine N1-acetyltransferase family member 2
  ENST ID: ENST00000575826
  CDS Start-End: 162-287
cccagctccacttaccaggccgcggctaccccgccgtcccccccgactcccgccaccccgctctctcaggctcttcaggatccaagtccgtaggccctttaaggggtctagttgccgtttgcgaggccctgggactttggtcccagacagcggggatccggatggcttccgtgcggatccgagaggccaaggagggagactgtggagatatcctgaggctgattcgggtgaagactgcaggagctagccgaattcgaaaaactctcggatcaggtgaagatcagtgaagaagccctgagagcagatggctttggagacaatcctttctatcactgtttggtagcagagattcttccagcgcccgggaagctactggggccctgcgtggtgggctatgggatatactatttcatctacagtacatggaagggacgcaccatttatctggaggatatctatgtgatgccggaatatcggggtcaagggattggttccaaaataatcaaaaaggtggctgaggtgaggagatgggtggggcgacaagtgaggacctgaagaagcaagggtggccttggataagggctgctcccaattccgcctggccgtcctggactggaaccagagggccatggacttgtacaaggccctaggagcccaagatctgacggaagctgagggctggcacttcttctgctttcaaggagaggcaacgagaaagttggcaggaaagtgacgccatccctaggaggatctctgtcttgagtttctccttccccatcagctgaagcactcttcagagactacgtccacagacactgatgctgaggcctccctggag

SEQ ID NO: 185793 - DNA, 860 bp, Homo sapiens
  Payload ID: 16583
  Gene Symbol: SAT2
  Gene Name: spermidine/spermine N1-acetyltransferase family member 2
  ENST ID: ENST00000571074
  CDS Start-End: 225-350
ggctatgcccggacagaggatcgcctcgctggcctactctctcctcccgtacggcgccggaatcccagctccacttaccaggccgcggctaccccgccgtcccccccgactcccgccaccccgctctctcaggctcttcaggatccaagtccgtaggccctttaaggggtctagttgccgtttgcgaggccctgggactttggtcccagacagcggggatccggatggcttccgtgcggatccgagaggccaaggagggagactgtggagatatcctgaggctgattcgggtgaagactgcaggagctagccgaattcgaaaaactctcggatcaggtgaagatcagtgaagaagccctgagagcagatggctttggagacaatcctttctatcactgtttggtagcagagattcttccagcgcccgggaagctactggggccctgcgtggtgggctatgggatatactatttcatctacagtacatggaagggacgcaccatttatctggaggatatctatgtgatgccggaatatcggggtcaagggattggttccaaaataatcaaaaaggtggctgaggtggccttggataagggctgctcccaattccgcctggccgtcctggactggaaccagagggccatggacttgtacaaggccctaggagcccaagatctgacggaagctgagggctggcacttcttctgctttcaaggagaggcaacgagaaagttggcaggaaagtgacgccatccctaggaggatctctgtcttgagtttctccttccccatcagctgaagcactcttcagagactacgtccacagacactgatgctgaggcctccctggaggaagg

SEQ ID NO: 185794 - DNA, 2164 bp, Homo sapiens
  Payload ID: 16584
  Gene Symbol: SMOX
  Gene Name: spermine oxidase
  Uniprot ID: Q9NWM0
  ENST ID: ENST00000278795
  CDS Start-End: 226-1824
gccgggccggagcggggtgggtaggggacgcgaggcggagcggggccccacacaggccgcggcggctggctcgggcccctacggtcccggcggcggctggaggaggaagccaggcggctggcggaggaggagagacggaggaggccgagaccggagcgccgctcgccgcagacttacttccccggctcagcagggaaaggttcctagaaggtgagcgcggacggtatgcaaagttgtgaatccagtggtgacagtgcggatgaccctctcagtcgcggcctacggagaaggggacagcctcgtgtggtggtgatcggcgccggcttggctggcctggctgcagccaaagcacttcttgagcagggtttcacggatgtcactgtgcttgaggcttccagccacatcggaggccgtgtgcagagtgtgaaacttggacacgccacctttgagctgggagccacctggatccatggctcccatgggaaccctatctatcatctagcagaagccaacggcctcctggaagagacaaccgatggggaacgcagcgtgggccgcatcagcctctattccaagaatggcgtggcctgctaccttaccaaccacggccgcaggatccccaaggacgtggttgaggaattcagcgatttatacaacgaggtctataacttgacccaggagttcttccggcacgataaaccagtcaatgctgaaagtcaaaatagcgtgggggtgttcacccgagaggaggtgcgtaaccgcatcaggaatgaccctgacgacccagaggctaccaagcgcctgaagctcgccatgatccagcagtacctgaaggtggagagctgtgagagcagctcacacagcatggacgaggtgtccctgagcgccttcggggagtggaccgagatccccggcgctcaccacatcatcccctcgggcttcatgcgggttgtggagctgctggcggagggcatccctgcccacgtcatccagctagggaaacctgtccgctgcattcactgggaccaggcctcagcccgccccagaggccctgagattgagccccggggtgtgctaaagaggcagtacaccagtttcttccggccaggcctgcccacagagaaggtggctgccatccaccgcctgggcattggcaccaccgacaagatctttctggaattcgaggagcccttctggggccctgagtgcaacagcctacagtttgtgtgggaggacgaagcagagagccacaccctcacctacccacctgagctctggtaccgcaagatctgcggctttgatgtcctctacccgcctgagcgctacggccatgtgctgagcggctggatctgcggggaggaggccctcgtcatggagaagtgtgatgacgaggcagtggccgagatctgcacggagatgctgcgtcagttcacagggaaccccaacattccaaaacctcggcgaatcttgcgctcggcctggggcagcaacccttacttccgcggctcctattcatacacgcaggtgggctccagcggggcggatgtggagaagctggccaagcccctgccgtacacagagagctcaaagacagcgcatggaagctccacaaagcagcagcctggtcaccttttctcttccaagtgcccagaacagcccctggatgctaacaggggcgccgtaaagcccatgcaggtgctgttttccggtgaggccacccaccgcaagtactattccaccacccacggtgctctgctgtccggccagcgtgaggctgcccgcctcattgagatgtaccgagacctcttccagcaggggacctgagggctgtcctcgctgctgagaagagccactaactcgtgacctccagcctgccccttgctgccgtgtgctcctgccttcctgatcctctgtagaaaggatttttatcttctgtagagctagccgccctgactgccttcagacctggccctgtagcttttctttttctccaggctgggccgtgagcaggtgggccgttgagttacctctgtgctggatcccgtgcccccacttgcctaccctctgtcctgccttgttattgtaagtgccttcaatactttgcattttgggataataaaaaaggctccctcccctgcccctcagcttctctctggttttctca

SEQ ID NO: 185795 - DNA, 2233 bp, Homo sapiens
  Payload ID: 16584
  Gene Symbol: SMOX
  Gene Name: spermine oxidase
  Uniprot ID: Q9NWM0
  ENST ID: ENST00000305958
  CDS Start-End: 226-1893
gccgggccggagcggggtgggtaggggacgcgaggcggagcggggccccacacaggccgcggcggctggctcgggcccctacggtcccggcggcggctggaggaggaagccaggcggctggcggaggaggagagacggaggaggccgagaccggagcgccgctcgccgcagacttacttccccggctcagcagggaaaggttcctagaaggtgagcgcggacggtatgcaaagttgtgaatccagtggtgacagtgcggatgaccctctcagtcgcggcctacggagaaggggacagcctcgtgtggtggtgatcggcgccggcttggctggcctggctgcagccaaagcacttcttgagcagggtttcacggatgtcactgtgcttgaggcttccagccacatcggaggccgtgtgcagagtgtgaaacttggacacgccacctttgagctgggagccacctggatccatggctcccatgggaaccctatctatcatctagcagaagccaacggcctcctggaagagacaaccgatggggaacgcagcgtgggccgcatcagcctctattccaagaatggcgtggcctgctaccttaccaaccacggccgcaggatccccaaggacgtggttgaggaattcagcgatttatacaacgaggtctataacttgacccaggagttcttccggcacgataaaccagtcaatgctgaaagtcaaaatagcgtgggggtgttcacccgagaggaggtgcgtaaccgcatcaggaatgaccctgacgacccagaggctaccaagcgcctgaagctcgccatgatccagcagtacctgaaggtggagagctgtgagagcagctcacacagcatggacgaggtgtccctgagcgccttcggggagtggaccgagatccccggcgctcaccacatcatcccctcgggcttcatgcgggttgtggagctgctggcggagggcatccctgcccacgtcatccagctagggaaacctgtccgctgcattcactgggaccaggcctcagcccgccccagaggccctgagattgagccccggggtgagggcgaccacaatcacgacactggggagggtggccagggtggagaggagccccgggggggcaggtgggatgaggatgagcagtggtcggtggtggtggagtgcgaggactgtgagctgatcccggcggaccatgtgattgtgaccgtgtcgctaggtgtgctaaagaggcagtacaccagtttcttccggccaggcctgcccacagagaaggtggctgccatccaccgcctgggcattggcaccaccgacaagatctttctggaattcgaggagcccttctggggccctgagtgcaacagcctacagtttgtgtgggaggacgaagcagagagccacaccctcacctacccacctgagctctggtaccgcaagatctgcggctttgatgtcctctacccgcctgagcgctacggccatgtgctgagcggctggatctgcggggaggaggccctcgtcatggagaagtgtgatgacgaggcagtggccgagatctgcacggagatgctgcgtcagttcacagggaaccccaacattccaaaacctcggcgaatcttgcgctcggcctggggcagcaacccttacttccgcggctcctattcatacacgcaggtgggctccagcggggcggatgtggagaagctggccaagcccctgccgtacacagagagctcaaagacagcgcccatgcaggtgctgttttccggtgaggccacccaccgcaagtactattccaccacccacggtgctctgctgtccggccagcgtgaggctgcccgcctcattgagatgtaccgagacctcttccagcaggggacctgagggctgtcctcgctgctgagaagagccactaactcgtgacctccagcctgccccttgctgccgtgtgctcctgccttcctgatcctctgtagaaaggatttttatcttctgtagagctagccgccctgactgccttcagacctggccctgtagcttttctttttctccaggctgggccgtgagcaggtgggccgttgagttacctctgtgctggatcccgtgcccccacttgcctaccctctgtcctgccttgttattgtaagtgccttcaatactttgcattttgggataataaaaaaggctccctcccctgcccctcagcttctctctggttttctca

SEQ ID NO: 185796 - DNA, 982 bp, Homo sapiens
  Payload ID: 16584
  Gene Symbol: SMOX
  Gene Name: spermine oxidase
  Uniprot ID: Q9NWM0
  ENST ID: ENST00000346595
  CDS Start-End: 70-642
cgccgctcgccgcagacttacttccccggctcagcagggaaaggttcctagaaggtgagcgcggacggtatgcaaagttgtgaatccagtggtgacagtgcggatgaccctctcagtcgcggcctacggagaaggggacagcctcgtgtggtggtgatcggcgccggcttggctggcctggctgcagccaaagcacttcttgagcagggtttcacggatgtcactgtgcttgaggcttccagccacatcggaggccgtgtgcagagtgtgaaacttggacacgccacctttgagctgggagccacctggatccatggctcccatgggaaccctatctatcatctagcagaagccaacggcctcctggaagagacaaccgatggggaacgcagcgtgggccgcatcagcctctattccaagaatggcgtggcctgctaccttaccaaccacggccgcaggatccccaaggacgtggttgaggaattcagcgatttatacaacgagcccatgcaggtgctgttttccggtgaggccacccaccgcaagtactattccaccacccacggtgctctgctgtccggccagcgtgaggctgcccgcctcattgagatgtaccgagacctcttccagcaggggacctgagggctgtcctcgctgctgagaagagccactaactcgtgacctccagcctgccccttgctgccgtgtgctcctgccttcctgatcctctgtagaaaggatttttatcttctgtagagctagccgccctgactgccttcagacctggccctgtagcttttctttttctccaggctgggccgtgagcaggtgggccgttgagttacctctgtgctggatcccgtgcccccacttgcctaccctctgtcctgccttgttattgtaagtgccttcaatactttgcattttgggataataaaaaaggctccctcccctgcccctcagcttctctctggttttctca

SEQ ID NO: 185797 - DNA, 2074 bp, Homo sapiens
  Payload ID: 16584
  Gene Symbol: SMOX
  Gene Name: spermine oxidase
  Uniprot ID: Q9NWM0
  ENST ID: ENST00000339123
  CDS Start-End: 226-1734
gccgggccggagcggggtgggtaggggacgcgaggcggagcggggccccacacaggccgcggcggctggctcgggcccctacggtcccggcggcggctggaggaggaagccaggcggctggcggaggaggagagacggaggaggccgagaccggagcgccgctcgccgcagacttacttccccggctcagcagggaaaggttcctagaaggtgagcgcggacggtatgcaaagttgtgaatccagtggtgacagtgcggatgaccctctcagtcgcggcctacggagaaggggacagcctcgtgtggtggtgatcggcgccggcttggctggcctggctgcagccaaagcacttcttgagcagggtttcacggatgtcactgtgcttgaggcttccagccacatcggaggccgtgtgcagagtgtgaaacttggacacgccacctttgagctgggagccacctggatccatggctcccatgggaaccctatctatcatctagcagaagccaacggcctcctggaagagacaaccgatggggaacgcagcgtgggccgcatcagcctctattccaagaatggcgtggcctgctaccttaccaaccacggccgcaggatccccaaggacgtggttgaggaattcagcgatttatacaacgaggtctataacttgacccaggagttcttccggcacgataaaccagtcaatgctgaaagtcaaaatagcgtgggggtgttcacccgagaggaggtgcgtaaccgcatcaggaatgaccctgacgacccagaggctaccaagcgcctgaagctcgccatgatccagcagtacctgaaggtggagagctgtgagagcagctcacacagcatggacgaggtgtccctgagcgccttcggggagtggaccgagatccccggcgctcaccacatcatcccctcgggcttcatgcgggttgtggagctgctggcggagggcatccctgcccacgtcatccagctagggaaacctgtccgctgcattcactgggaccaggcctcagcccgccccagaggccctgagattgagccccggggtgtgctaaagaggcagtacaccagtttcttccggccaggcctgcccacagagaaggtggctgccatccaccgcctgggcattggcaccaccgacaagatctttctggaattcgaggagcccttctggggccctgagtgcaacagcctacagtttgtgtgggaggacgaagcagagagccacaccctcacctacccacctgagctctggtaccgcaagatctgcggctttgatgtcctctacccgcctgagcgctacggccatgtgctgagcggctggatctgcggggaggaggccctcgtcatggagaagtgtgatgacgaggcagtggccgagatctgcacggagatgctgcgtcagttcacagggaaccccaacattccaaaacctcggcgaatcttgcgctcggcctggggcagcaacccttacttccgcggctcctattcatacacgcaggtgggctccagcggggcggatgtggagaagctggccaagcccctgccgtacacagagagctcaaagacagcgcccatgcaggtgctgttttccggtgaggccacccaccgcaagtactattccaccacccacggtgctctgctgtccggccagcgtgaggctgcccgcctcattgagatgtaccgagacctcttccagcaggggacctgagggctgtcctcgctgctgagaagagccactaactcgtgacctccagcctgccccttgctgccgtgtgctcctgccttcctgatcctctgtagaaaggatttttatcttctgtagagctagccgccctgactgccttcagacctggccctgtagcttttctttttctccaggctgggccgtgagcaggtgggccgttgagttacctctgtgctggatcccgtgcccccacttgcctaccctctgtcctgccttgttattgtaagtgccttcaatactttgcattttgggataataaaaaaggctccctcccctgcccctcagcttctctctggttttctca

SEQ ID NO: 185798 - DNA, 2230 bp, Homo sapiens
  Payload ID: 16584
  Gene Symbol: SMOX
  Gene Name: spermine oxidase
  Uniprot ID: Q9NWM0
  ENST ID: ENST00000379460
  CDS Start-End: 223-1890
ctttctgtgctgatcttggaggcagagtggctgcctgcattcattccacggtccattccacagcttgttccaaagacagtctgctcatgatgtagcttctgcacttgacaaattattttcatgcacgaggcccttgaaaatgttgacagtcttgtgacatccatggagggccttatttgacggtcacaaaggagcggttcctagaaggtgagcgcggacggtatgcaaagttgtgaatccagtggtgacagtgcggatgaccctctcagtcgcggcctacggagaaggggacagcctcgtgtggtggtgatcggcgccggcttggctggcctggctgcagccaaagcacttcttgagcagggtttcacggatgtcactgtgcttgaggcttccagccacatcggaggccgtgtgcagagtgtgaaacttggacacgccacctttgagctgggagccacctggatccatggctcccatgggaaccctatctatcatctagcagaagccaacggcctcctggaagagacaaccgatggggaacgcagcgtgggccgcatcagcctctattccaagaatggcgtggcctgctaccttaccaaccacggccgcaggatccccaaggacgtggttgaggaattcagcgatttatacaacgaggtctataacttgacccaggagttcttccggcacgataaaccagtcaatgctgaaagtcaaaatagcgtgggggtgttcacccgagaggaggtgcgtaaccgcatcaggaatgaccctgacgacccagaggctaccaagcgcctgaagctcgccatgatccagcagtacctgaaggtggagagctgtgagagcagctcacacagcatggacgaggtgtccctgagcgccttcggggagtggaccgagatccccggcgctcaccacatcatcccctcgggcttcatgcgggttgtggagctgctggcggagggcatccctgcccacgtcatccagctagggaaacctgtccgctgcattcactgggaccaggcctcagcccgccccagaggccctgagattgagccccggggtgagggcgaccacaatcacgacactggggagggtggccagggtggagaggagccccgggggggcaggtgggatgaggatgagcagtggtcggtggtggtggagtgcgaggactgtgagctgatcccggcggaccatgtgattgtgaccgtgtcgctaggtgtgctaaagaggcagtacaccagtttcttccggccaggcctgcccacagagaaggtggctgccatccaccgcctgggcattggcaccaccgacaagatctttctggaattcgaggagcccttctggggccctgagtgcaacagcctacagtttgtgtgggaggacgaagcagagagccacaccctcacctacccacctgagctctggtaccgcaagatctgcggctttgatgtcctctacccgcctgagcgctacggccatgtgctgagcggctggatctgcggggaggaggccctcgtcatggagaagtgtgatgacgaggcagtggccgagatctgcacggagatgctgcgtcagttcacagggaaccccaacattccaaaacctcggcgaatcttgcgctcggcctggggcagcaacccttacttccgcggctcctattcatacacgcaggtgggctccagcggggcggatgtggagaagctggccaagcccctgccgtacacagagagctcaaagacagcgcccatgcaggtgctgttttccggtgaggccacccaccgcaagtactattccaccacccacggtgctctgctgtccggccagcgtgaggctgcccgcctcattgagatgtaccgagacctcttccagcaggggacctgagggctgtcctcgctgctgagaagagccactaactcgtgacctccagcctgccccttgctgccgtgtgctcctgccttcctgatcctctgtagaaaggatttttatcttctgtagagctagccgccctgactgccttcagacctggccctgtagcttttctttttctccaggctgggccgtgagcaggtgggccgttgagttacctctgtgctggatcccgtgcccccacttgcctaccctctgtcctgccttgttattgtaagtgccttcaatactttgcattttgggataataaaaaaggctccctcccctgcccctcagcttctctctggttttctca

SEQ ID NO: 185799 - DNA, 1669 bp, Homo sapiens
  Payload ID: 16584
  Gene Symbol: SMOX
  Gene Name: spermine oxidase
  ENST ID: ENST00000457205
  CDS Start-End: 1-1329
aacgaggtctataacttgacccaggagttcttccggcacgataaaccagtcaatgctgaaagtcaaaatagcgtgggggtgttcacccgagaggaggtgcgtaaccgcatcaggaatgaccctgacgacccagaggctaccaagcgcctgaagctcgccatgatccagcagtacctgaaggtggagagctgtgagagcagctcacacagcatggacgaggtgtccctgagcgccttcggggagtggaccgagatccccggcgctcaccacatcatcccctcgggcttcatgcgggttgtggagctgctggcggagggcatccctgcccacgtcatccagctagggaaacctgtccgctgcattcactgggaccaggcctcagcccgccccagaggccctgagattgagccccggggtgagggcgaccacaatcacgacactggggagggtggccagggtggagaggagccccgggggggcaggtgggatgaggatgagcagtggtcggtggtggtggagtgcgaggactgtgagctgatcccggcggaccatgtgattgtgaccgtgtcgctaggtgtgctaaagaggcagtacaccagtttcttccggccaggcctgcccacagagaaggtggctgccatccaccgcctgggcattggcaccaccgacaagatctttctggaattcgaggagcccttctggggccctgagtgcaacagcctacagtttgtgtgggaggacgaagcagagagccacaccctcacctacccacctgagctctggtaccgcaagatctgcggctttgatgtcctctacccgcctgagcgctacggccatgtgctgagcggctggatctgcggggaggaggccctcgtcatggagaagtgtgatgacgaggcagtggccgagatctgcacggagatgctgcgtcagttcacagggaaccccaacattccaaaacctcggcgaatcttgcgctcggcctggggcagcaacccttacttccgcggctcctattcatacacgcaggtgggctccagcggggcggatgtggagaagctggccaagcccctgccgtacacagagagctcaaagacagcgcatggaagctccacaaagcagcagcctggtcaccttttctcttccaagtgcccagaacagcccctggatgctaacaggggcgccgtaaagcccatgcaggtgctgttttccggtgaggccacccaccgcaagtactattccaccacccacggtgctctgctgtccggccagcgtgaggctgcccgcctcattgagatgtaccgagacctcttccagcaggggacctgagggctgtcctcgctgctgagaagagccactaactcgtgacctccagcctgccccttgctgccgtgtgctcctgccttcctgatcctctgtagaaaggatttttatcttctgtagagctagccgccctgactgccttcagacctggccctgtagcttttctttttctccaggctgggccgtgagcaggtgggccgttgagttacctctgtgctggatcccgtgcccccacttgcctaccctctgtcctgccttgttattgtaagtgccttcaatactttgcattttgggataataaaaaaggctccctcccctgcccctcagcttctctctggttttctca

SEQ ID NO: 185800 - DNA, 2322 bp, Homo sapiens
  Payload ID: 16584
  Gene Symbol: SMOX
  Gene Name: spermine oxidase
  Uniprot ID: Q9NWM0
  ENST ID: ENST00000621355
  CDS Start-End: 226-1983
gccgggccggagcggggtgggtaggggacgcgaggcggagcggggccccacacaggccgcggcggctggctcgggcccctacggtcccggcggcggctggaggaggaagccaggcggctggcggaggaggagagacggaggaggccgagaccggagcgccgctcgccgcagacttacttccccggctcagcagggaaaggttcctagaaggtgagcgcggacggtatgcaaagttgtgaatccagtggtgacagtgcggatgaccctctcagtcgcggcctacggagaaggggacagcctcgtgtggtggtgatcggcgccggcttggctggcctggctgcagccaaagcacttcttgagcagggtttcacggatgtcactgtgcttgaggcttccagccacatcggaggccgtgtgcagagtgtgaaacttggacacgccacctttgagctgggagccacctggatccatggctcccatgggaaccctatctatcatctagcagaagccaacggcctcctggaagagacaaccgatggggaacgcagcgtgggccgcatcagcctctattccaagaatggcgtggcctgctaccttaccaaccacggccgcaggatccccaaggacgtggttgaggaattcagcgatttatacaacgaggtctataacttgacccaggagttcttccggcacgataaaccagtcaatgctgaaagtcaaaatagcgtgggggtgttcacccgagaggaggtgcgtaaccgcatcaggaatgaccctgacgacccagaggctaccaagcgcctgaagctcgccatgatccagcagtacctgaaggtggagagctgtgagagcagctcacacagcatggacgaggtgtccctgagcgccttcggggagtggaccgagatccccggcgctcaccacatcatcccctcgggcttcatgcgggttgtggagctgctggcggagggcatccctgcccacgtcatccagctagggaaacctgtccgctgcattcactgggaccaggcctcagcccgccccagaggccctgagattgagccccggggtgagggcgaccacaatcacgacactggggagggtggccagggtggagaggagccccgggggggcaggtgggatgaggatgagcagtggtcggtggtggtggagtgcgaggactgtgagctgatcccggcggaccatgtgattgtgaccgtgtcgctaggtgtgctaaagaggcagtacaccagtttcttccggccaggcctgcccacagagaaggtggctgccatccaccgcctgggcattggcaccaccgacaagatctttctggaattcgaggagcccttctggggccctgagtgcaacagcctacagtttgtgtgggaggacgaagcagagagccacaccctcacctacccacctgagctctggtaccgcaagatctgcggctttgatgtcctctacccgcctgagcgctacggccatgtgctgagcggctggatctgcggggaggaggccctcgtcatggagaagtgtgatgacgaggcagtggccgagatctgcacggagatgctgcgtcagttcacagggaaccccaacattccaaaacctcggcgaatcttgcgctcggcctggggcagcaacccttacttccgcggctcctattcatacacgcaggtgggctccagcggggcggatgtggagaagctggccaagcccctgccgtacacagagagctcaaagacagcgcatggaagctccacaaagcagcagcctggtcaccttttctcttccaagtgcccagaacagcccctggatgctaacaggggcgccgtaaagcccatgcaggtgctgttttccggtgaggccacccaccgcaagtactattccaccacccacggtgctctgctgtccggccagcgtgaggctgcccgcctcattgagatgtaccgagacctcttccagcaggggacctgagggctgtcctcgctgctgagaagagccactaactcgtgacctccagcctgccccttgctgccgtgtgctcctgccttcctgatcctctgtagaaaggatttttatcttctgtagagctagccgccctgactgccttcagacctggccctgtagcttttctttttctccaggctgggccgtgagcaggtgggccgttgagttacctctgtgctggatcccgtgcccccacttgcctaccctctgtcctgccttgttattgtaagtgccttcaatactttgcattttgggataataaaaaaggctccctcccctgcccctcagcttctctctggttttctc

SEQ ID NO: 185801 - DNA, 1174 bp, Homo sapiens
  Payload ID: 16585
  Gene Symbol: SMS
  Gene Name: spermine synthase
  Uniprot ID: P52788
  ENST ID: ENST00000379404
  CDS Start-End: 111-1052
ggcctccccgggcgcagcacactcccagccggccgcagcctgacacgccgcgcggccccccagtctcccgcggctgctcccccaggcatggcacagggcctcgcctcactatggcagcagcacggcacagcacgctcgacttcatgctcggcgccaaagctgatggtgagaccattctaaaaggcctccagtccattttccaggagcaggggatggcggagtcggtgcacacctggcaggaccatggctatttagcaacctacacaaacaagaacggcagattaccacccatagtgcgaggaggagccatcgacagatactggcccaccgccgacgggcgcctggttgaatatgacatagatgaagtggtatatgacgaagattcaccttatcaaaatataaaaattctacactcgaagcagtttggaaatattctcatccttagtggggatgttaatttggcagagagtgatttggcatatacccgggccatcatgggcagtggcaaagaagattacactggcaaagatgtactcattctgggaggtggagacggaggcatattgtgtgaaatagtcaaactaaaaccaaagatggtcactatggtagagattgaccaaatggtgattgatgggtgtaagaaatacatgcgaaaaacgtgtggcgatgtcttagacaatcttaaaggagactgctatcaggttctaatagaagactgtatcccggtactgaagaggtacgccaaagaagggagagaatttgattatgtgattaatgatttgacagctgttccaatctccacgtctccagaagaagattccacatgggagtttctcagactgattcttgacctctcaatgaaagtgttgaaacaggatgggaaatattttacacaggggaactgtgtcaatctgacagaagcactgtcgctctatgaagaacagctggggcgcctgtattgtcctgtggaattttcaaaggagatcgtctgtgtcccttcatacttggaattgtgggtattttacactgtttggaagaaagctaaaccctgaagatcagtagcccctaatcacatgtgctgcaaatagccttcctgacctccatatgctgtacatgacatcaaaatgagtcaggcaattgattgtgaattccttaaagttttcctttttttaat

SEQ ID NO: 185802 - DNA, 1837 bp, Homo sapiens
  Payload ID: 16585
  Gene Symbol: SMS
  Gene Name: spermine synthase
  Uniprot ID: P52788
  ENST ID: ENST00000404933
  CDS Start-End: 253-1353
gtttccaccattagcgaggcctcacacccggcgctccaagttcggggctggaggcgtcccggcttcctccctcccggagcgggaccggccccgcccccgcgccccgggtcgctcccggcggcccctcccacctcctagtcctggcctccccgggcgcagcacactcccagccggccgcagcctgacacgccgcgcggccccccagtctcccgcggctgctcccccaggcatggcacagggcctcgcctcactatggcagcagcacggcacagcacgctcgacttcatgctcggcgccaaagctgatggtgagaccattctaaaaggcctccagtccattttccaggagcaggggatggcggagtcggtgcacacctggcaggaccatggctatttagcaacctacacaaacaagaacggcagctttgccaatttgagaatttacccacatggattggtgttgctggaccttcagagttatgatggtgatgcgcaaggcaaagaagagatcgacagtattttgaacaaagtagaggaaagaatgaaagaattgagtcaggacagtactgggcgggtgaaacgattaccacccatagtgcgaggaggagccatcgacagatactggcccaccgccgacgggcgcctggttgaatatgacatagatgaagtggtatatgacgaagattcaccttatcaaaatataaaaattctacactcgaagcagtttggaaatattctcatccttagtggggatgttaatttggcagagagtgatttggcatatacccgggccatcatgggcagtggcaaagaagattacactggcaaagatgtactcattctgggaggtggagacggaggcatattgtgtgaaatagtcaaactaaaaccaaagatggtcactatggtagagattgaccaaatggtgattgatgggtgtaagaaatacatgcgaaaaacgtgtggcgatgtcttagacaatcttaaaggagactgctatcaggttctaatagaagactgtatcccggtactgaagaggtacgccaaagaagggagagaatttgattatgtgattaatgatttgacagctgttccaatctccacgtctccagaagaagattccacatgggagtttctcagactgattcttgacctctcaatgaaagtgttgaaacaggatgggaaatattttacacaggggaactgtgtcaatctgacagaagcactgtcgctctatgaagaacagctggggcgcctgtattgtcctgtggaattttcaaaggagatcgtctgtgtcccttcatacttggaattgtgggtattttacactgtttggaagaaagctaaaccctgaagatcagtagcccctaatcacatgtgctgcaaatagccttcctgacctccatatgctgtacatgacatcaaaatgagtcaggcaattgattgtgaattccttaaagttttcctttttttaataattatttttaatttaaaaaagcaaatggaaaatgtatattttgatgagcttagggtgttttttttttgaaagtcagctgaaggatggttagacagcacagcgaagactgctaaatgcactgaccccccccattagaatgtgatttttgttcctttttatttctctgtgggcttttgtttttgtttttgttttggtagatcttcaatttggatatttggaggagtgaacatcgttgttttgctggagggaagatcttgatggtgtttctttccccaaaaattgacttagatattaaaatttggtgcttataagagagagttaaaaaaaaataggattgcttcaattaaaattacaaaagaga

SEQ ID NO: 185803 - DNA, 931 bp, Homo sapiens
  Payload ID: 16585
  Gene Symbol: SMS
  Gene Name: spermine synthase
  ENST ID: ENST00000457085
  CDS Start-End: 1-931
cggcggtcgggcggaggccgcgctcctgctggctccgcgctccgtcccggccgcagctcggggcctgcaggggcagtcccgggtgcccgccggccgcgccgcccttccgggccctggccgtccacccgcgctcccacgcgggctcgccgccttcgcgctcccgctcggggagtccccgggctgccgggcgcgggcggaccccccatgggacgagggttgcagggactgcggcggagcgaggcgtgacccgcgcggcgagcccgggctgggggcgtgcgccgagcggggctgcccgcgcgaccttttcctgttcttgcaggcggctgatggtgagaccattctaaaaggcctccagtccattttccaggagcaggggatggcggagtcggtgcacacctggcaggaccatggctatttagcaacctacacaaacaagaacggcagctttgccaatttgagaatttacccacatggattggtgttgctggaccttcagagttatgatggtgatgcgcaaggcaaagaagagatcgacagtattttgaacaaagtagaggaaagaatgaaagaattgagtcaggacagtactgggcgggtgaaacgattaccacccatagtgcgaggaggagccatcgacagatactggcccaccgccgacgggcgcctggttgaatatgacatagatgaagtggtatatgacgaagattcaccttatcaaaatataaaaattctacactcgaagcagtttggaaatattctcatccttagtggggatgttaatttggcagagagtgatttggcatatacccgggccatcatgggcagtggcaaagaagattacactggcaaagatgtactcattctgggaggtggagacggaggcatattgtgtgaaatagtcaaactaaaaccaaagatggtcactatggta

SEQ ID NO: 185804 - DNA, 2544 bp, Homo sapiens
  Payload ID: 16586
  Gene Symbol: STPG1
  Gene Name: sperm-tail PG-rich repeat containing 1
  Uniprot ID: Q5TH74
  ENST ID: ENST00000003583
  CDS Start-End: 143-1006
atagcgaccgggaggttgggctggccagattcagctgccgggaccggaccaggtgcttaggagaacatgcagtagaacttttcatcaaacaaatggaacacgtcacagaattttgctaacatggacaactctgcacagaaaaatgaacgcactggcaaacatcccagacgtgccagtgaagtacagaaagaatgatatcccaggacctgggttctacaatgttattcaccagtcaccggtgtccaacagtgtctcattgtccaagaaaggaacttgcatgtttccctcaatgtgcgcccgattggacaccatcatttctaaataccctgcagcgaatgcatacactatcccatcggattttatttccaagagagactttagtaattcgtgttccagcatgttccagttgccaagctttatgaaagctctcaagtttgaaactcctgcaccaaactattacaatgcctctgtctcttgctgcaagcagagaaacaacgtctgtactcgagccgggtttatgtcaaaaacccaaagaggatctttcgcttttgctgataaaggacctcccccagggcattatgatatcaacgaatcccttgtgaagcagtcgccaaatacattaatgtcttgttttaaatcaaaaaccaaccgtggattaaaactgacgtcaacaggcccgggacctggttattacaaccccagtgattgcacaaaagttccaaaaaagactcttttcccgaaaaaccccatcctgaacttctctgctcagccttcgcctctgcctccgaagccacctttcccaggtcctggtcagtatgagatcgtggactacttaggcccccgcaagcatttcatctctagtgcatcattcgtgtccaataccagccggtggacagcggcgccgcctcagccaggcctgcctggcccagctacgtacaagccagagcttccaggaaagcagtccttcctctacaacgaggacaagaaatggatcccggttctgtagggatgtcacacaaggtcaaggagaactccagccaccagcccaccctgcccagcgtccccaggacattcctcaggaggagaccgatcatgagtgtggcagctgacaacttggggggtggctctaccactctggcctggcatcctagccggactgctgccattgcctttgtcttgagctggagacattgctccctggagacttcaccccagccccacagactccagtggcttcctgagcagaagggaggagtggacagagccccctggctgcttccccacgcacccatccaggctgccttccggcacgactccctgccgcagactgaagggactcctgaagcgcagacttcaaggaggatcagtccaccctgaaggtggccaagcctggaagccccacccttccctgtttcattccttcattcatttacacattcattcattccctcactcctgcctttctcatttgtccctttctgacctcactcacttacggtatgtctactgggcgaaagctacctgcaggcaggtgatgctttttccaccagtccacagcttcctttctaaagtgaccacctgtttggaaagacctctctttactccttttagacctttttctctttggagtgggagatcatcttggaatggcagtggccgggcccgggggctgcgcttttccctgactttctctgctggcgggactgaattttctcaaggcttacaggcccttccatggagtccacatggcctgtctaggcctgatagctttcgtctctctatgtggagggaaaaagaaatgtgccctagtggttttggtggaggctgcacagattcgcggtgggtggggagctgccaggctccttttctgatctcccagcaggctttgactgacgctgtttagtctttctgtacattaaccccgccagataccgagaggttacaaagcctccaaggcctgtacaactgtggcctctccagagaagtggttctcagccttgactgcacactgtaatcacctggggactttaaaaagtactgaggcctggggcccacccacaaatgctgatttaactcctccagggtggggtctgggcagtggggaggcaggagccacccaggtgattccaatgataggtgtaggttgagaagcgccaccttccagcttcctaactggctctgggaggggagctgggtgggaagttcaggaggtgggaactttgtacacgcagagcacctggagcacctacagcatggctgtggttccacactcctctgtcatttaaccttcacacatcacctcgttctgacatcaagggtgcgtcacagccacagtgaggcctcgcctgggcagagcaactctgggtgccccactgggtccctcccacaggggcaggcaagcctaatgggaacccgaggcaaaaggaaacatcagtaatacgaatcctgtctttaaaactgtgatgttttgttcaccatggattttttttttgggggggggggccttaattttaaaaatattgcattaaacttatttatcttgct

SEQ ID NO: 185805 - DNA, 2715 bp, Homo sapiens
  Payload ID: 16586
  Gene Symbol: STPG1
  Gene Name: sperm-tail PG-rich repeat containing 1
  Uniprot ID: Q5TH74
  ENST ID: ENST00000337248
  CDS Start-End: 168-1172
cgcggacggcggaaggtggactcgcgaatgttaggcctgtgggtgccatagcgaccgggaggttgggctggccagattcagctgccgggaccggaccaggtgcttaggagaacatgcagtagaacttttcatcaaacaaatggaacacgtcacagaattttgctaacatggacaactctgcacagaaaaatgaacgcactggcaaacatcccagacgtgccagtgaagtacagaaaggttttactgctgcatatccaacacaatcctccattccttttaaatctcaagcttcagtaatcccagaatcagaaaaaaaaggattcaatagtcaagccaagagatttcctcataagaagaatgatatcccaggacctgggttctacaatgttattcaccagtcaccggtgtccaacagtgtctcattgtccaagaaaggaacttgcatgtttccctcaatgtgcgcccgattggacaccatcatttctaaataccctgcagcgaatgcatacactatcccatcggattttatttccaagagagactttagtaattcgtgttccagcatgttccagttgccaagctttatgaaagctctcaagtttgaaactcctgcaccaaactattacaatgcctctgtctcttgctgcaagcagagaaacaacgtctgtactcgagccgggtttatgtcaaaaacccaaagaggatctttcgcttttgctgataaaggacctcccccagggcattatgatatcaacgaatcccttgtgaagcagtcgccaaatacattaatgtcttgttttaaatcaaaaaccaaccgtggattaaaactgacgtcaacaggcccgggacctggttattacaaccccagtgattgcacaaaagttccaaaaaagactcttttcccgaaaaaccccatcctgaacttctctgctcagccttcgcctctgcctccgaagccacctttcccaggtcctggtcagtatgagatcgtggactacttaggcccccgcaagcatttcatctctagtgcatcattcgtgtccaataccagccggtggacagcggcgccgcctcagccaggcctgcctggcccagctacgtacaagccagagcttccaggaaagcagtccttcctctacaacgaggacaagaaatggatcccggttctgtagggatgtcacacaaggtcaaggagaactccagccaccagcccaccctgcccagcgtccccaggacattcctcaggaggagaccgatcatgagtgtggcagctgacaacttggggggtggctctaccactctggcctggcatcctagccggactgctgccattgcctttgtcttgagctggagacattgctccctggagacttcaccccagccccacagactccagtggcttcctgagcagaagggaggagtggacagagccccctggctgcttccccacgcacccatccaggctgccttccggcacgactccctgccgcagactgaagggactcctgaagcgcagacttcaaggaggatcagtccaccctgaaggtggccaagcctggaagccccacccttccctgtttcattccttcattcatttacacattcattcattccctcactcctgcctttctcatttgtccctttctgacctcactcacttacggtatgtctactgggcgaaagctacctgcaggcaggtgatgctttttccaccagtccacagcttcctttctaaagtgaccacctgtttggaaagacctctctttactccttttagacctttttctctttggagtgggagatcatcttggaatggcagtggccgggcccgggggctgcgcttttccctgactttctctgctggcgggactgaattttctcaaggcttacaggcccttccatggagtccacatggcctgtctaggcctgatagctttcgtctctctatgtggagggaaaaagaaatgtgccctagtggttttggtggaggctgcacagattcgcggtgggtggggagctgccaggctccttttctgatctcccagcaggctttgactgacgctgtttagtctttctgtacattaaccccgccagataccgagaggttacaaagcctccaaggcctgtacaactgtggcctctccagagaagtggttctcagccttgactgcacactgtaatcacctggggactttaaaaagtactgaggcctggggcccacccacaaatgctgatttaactcctccagggtggggtctgggcagtggggaggcaggagccacccaggtgattccaatgataggtgtaggttgagaagcgccaccttccagcttcctaactggctctgggaggggagctgggtgggaagttcaggaggtgggaactttgtacacgcagagcacctggagcacctacagcatggctgtggttccacactcctctgtcatttaaccttcacacatcacctcgttctgacatcaagggtgcgtcacagccacagtgaggcctcgcctgggcagagcaactctgggtgccccactgggtccctcccacaggggcaggcaagcctaatgggaacccgaggcaaaaggaaacatcagtaatacgaatcctgtctttaaaactgtgatgttttgttcaccatggattttttttttgggggggggggccttaattttaaaaatattgcattaaacttatttatcttgcttattg

SEQ ID NO: 185806 - DNA, 2804 bp, Homo sapiens
  Payload ID: 16586
  Gene Symbol: STPG1
  Gene Name: sperm-tail PG-rich repeat containing 1
  Uniprot ID: Q5TH74
  ENST ID: ENST00000374409
  CDS Start-End: 256-1260
tcgtcacagccatgagtgagacttgaagcccgttttacgtatgaagaaatgtcatttgggcctagacatcaacaatgagaaagaggcagttctagtctcagatcgtggggcagagaaagctccttgggaacatgggagaggaacgagttggtgcattgtagaaactgcccgaaggccagcagggctggtgcttaggagaacatgcagtagaacttttcatcaaacaaatggaacacgtcacagaattttgctaacatggacaactctgcacagaaaaatgaacgcactggcaaacatcccagacgtgccagtgaagtacagaaaggttttactgctgcatatccaacacaatcctccattccttttaaatctcaagcttcagtaatcccagaatcagaaaaaaaaggattcaatagtcaagccaagagatttcctcataagaagaatgatatcccaggacctgggttctacaatgttattcaccagtcaccggtgtccaacagtgtctcattgtccaagaaaggaacttgcatgtttccctcaatgtgcgcccgattggacaccatcatttctaaataccctgcagcgaatgcatacactatcccatcggattttatttccaagagagactttagtaattcgtgttccagcatgttccagttgccaagctttatgaaagctctcaagtttgaaactcctgcaccaaactattacaatgcctctgtctcttgctgcaagcagagaaacaacgtctgtactcgagccgggtttatgtcaaaaacccaaagaggatctttcgcttttgctgataaaggacctcccccagggcattatgatatcaacgaatcccttgtgaagcagtcgccaaatacattaatgtcttgttttaaatcaaaaaccaaccgtggattaaaactgacgtcaacaggcccgggacctggttattacaaccccagtgattgcacaaaagttccaaaaaagactcttttcccgaaaaaccccatcctgaacttctctgctcagccttcgcctctgcctccgaagccacctttcccaggtcctggtcagtatgagatcgtggactacttaggcccccgcaagcatttcatctctagtgcatcattcgtgtccaataccagccggtggacagcggcgccgcctcagccaggcctgcctggcccagctacgtacaagccagagcttccaggaaagcagtccttcctctacaacgaggacaagaaatggatcccggttctgtagggatgtcacacaaggtcaaggagaactccagccaccagcccaccctgcccagcgtccccaggacattcctcaggaggagaccgatcatgagtgtggcagctgacaacttggggggtggctctaccactctggcctggcatcctagccggactgctgccattgcctttgtcttgagctggagacattgctccctggagacttcaccccagccccacagactccagtggcttcctgagcagaagggaggagtggacagagccccctggctgcttccccacgcacccatccaggctgccttccggcacgactccctgccgcagactgaagggactcctgaagcgcagacttcaaggaggatcagtccaccctgaaggtggccaagcctggaagccccacccttccctgtttcattccttcattcatttacacattcattcattccctcactcctgcctttctcatttgtccctttctgacctcactcacttacggtatgtctactgggcgaaagctacctgcaggcaggtgatgctttttccaccagtccacagcttcctttctaaagtgaccacctgtttggaaagacctctctttactccttttagacctttttctctttggagtgggagatcatcttggaatggcagtggccgggcccgggggctgcgcttttccctgactttctctgctggcgggactgaattttctcaaggcttacaggcccttccatggagtccacatggcctgtctaggcctgatagctttcgtctctctatgtggagggaaaaagaaatgtgccctagtggttttggtggaggctgcacagattcgcggtgggtggggagctgccaggctccttttctgatctcccagcaggctttgactgacgctgtttagtctttctgtacattaaccccgccagataccgagaggttacaaagcctccaaggcctgtacaactgtggcctctccagagaagtggttctcagccttgactgcacactgtaatcacctggggactttaaaaagtactgaggcctggggcccacccacaaatgctgatttaactcctccagggtggggtctgggcagtggggaggcaggagccacccaggtgattccaatgataggtgtaggttgagaagcgccaccttccagcttcctaactggctctgggaggggagctgggtgggaagttcaggaggtgggaactttgtacacgcagagcacctggagcacctacagcatggctgtggttccacactcctctgtcatttaaccttcacacatcacctcgttctgacatcaagggtgcgtcacagccacagtgaggcctcgcctgggcagagcaactctgggtgccccactgggtccctcccacaggggcaggcaagcctaatgggaacccgaggcaaaaggaaacatcagtaatacgaatcctgtctttaaaactgtgatgttttgttcaccatggattttttttttgggggggggggccttaattttaaaaatattgcattaaacttatttatcttgcttattga

SEQ ID NO: 185807 - DNA, 772 bp, Homo sapiens
  Payload ID: 16586
  Gene Symbol: STPG1
  Gene Name: sperm-tail PG-rich repeat containing 1
  ENST ID: ENST00000435187
  CDS Start-End: 1-434
gttttactgctgcatatccaacacaatcctccattccttttaaatctcaagcttcagtaatcccagaatcagaaaaaaaaggattcaatagtcaagccaagagatttcctcataagaagaatgatatcccaggacctgggttctacaatgttattcaccagtcaccggtgtccaacagtgtctcattgtccaagaaaggaacttgcatgtttccctcaatgtgcgcccgattggacaccatcatttctaaataccctgcagcgaatgcatacactatcccatcggattttatttccaagagagactttagtaattcgtgttccagcatgttccagttgccaagctttatgaaagctctcaagtttgaaactcctgcaccaaactattacaatgtaagaactctgcctatgcttgctaaatacagatcgaattaatggtttactaaaataaaaggaagaggggatcttggggacatcgtattttaatgcagttgtcaagccagttagcatttgttgactacccaatgggtgcctaaggctgtacaagactcttacagggaatttgcagaccccagagatcaggatgggcaacatggaggccagtatcaagctgtggggaggccactgccctgagaaacacatattctaattactcttgtcctgtaacctttctgggacgtagttttctcatctgtaacaatgggtgtattatttaccactttgtctgcagccactaatgatttactttttaggttcttctagggaaaataaac

SEQ ID NO: 185808 - DNA, 811 bp, Homo sapiens
  Payload ID: 16586
  Gene Symbol: STPG1
  Gene Name: sperm-tail PG-rich repeat containing 1
  ENST ID: ENST00000438866
  CDS Start-End: 1-507
tgcgcccgattggacaccatcatttctaaataccctgcagcgaatgcatacactatcccatcggattttatttccaagagagactttagtaattcgtgttccagcatgttccagttgccaagctttatgaaagctctcaagtttgaaactcctgcaccaaactattacaatgcctctgtctcttgctgcaagcagagaaacaacgtctgtactcgagccgggtttatgtcaaaaacccaaagaggatctttcgcttttgctgataaaggacctcccccagggcattatgatatcaacgaatcccttgtgaagcagtcgccaaatacattaatgtcttgttttaaatcaaaaaccaaccgtggattaaaactgacgtcaacaggcccgggacctggttattacaaccccagtgattgcacaaaagttccaaaaaagactcttttcccaggaggaagcaaggcttcggatttggcgggacatttgcccaagtccacacagccaacttgaggagccacagggaattggctcaggactaagtctttcctcattccctgtgatgctggattcccctggtgctgacattgttctatttttgtaacataaaatcttcgctggagtggcaggacattcagaagcagtcaagctctcatagctttataccgatggaagtttaagccctgactttcgagttggtgatacctgctggatttgtacttcagctctgctgtttttatgctctgtgaccttgggcagagttctaacctctctgagcctccatgccctcatctgtaaggtgggaataattcctgcc

SEQ ID NO: 185809 - DNA, 1652 bp, Homo sapiens
  Payload ID: 16587
  Gene Symbol: STPG2
  Gene Name: sperm-tail PG-rich repeat containing 2
  Uniprot ID: Q8N412
  ENST ID: ENST00000295268
  CDS Start-End: 91-1470
cggcttcctttttctccacacttctagctaccttgtttttatcgttttcggcacctgcccttccccagcgcccccaccaccccgagcactatgtatgatcgggctccccgcctgctcaaattggctgaaggtggcagcactgaggcccatgtgggtcctggatcctaccaggtacctttcctgaagcagcaggcgacaggtagtaatgcaccatttctttctttgactgccagagaaagtacttttaccattgcctctagcattgagaaagctgttccaggtccaggacactataatgtttcagaagcacagaaaatttcaagatcacctacacttaccagaagtgttgatgttccttcaattccttcttgtggaaagtcatatggttatcatattaatgatgatggcagtattataaaatgttttccacctgcttgtgacagtacacttggtccagcatactacaaacctcaatttgatgtttccaatgcaactttgaaatacaaaggtatacattttggcaactcttcaggaagacaagagttacctaaaaagtcaggtcctggtccaggacagtatgatatagtccagaaaaagacatcatattatgaaaatgttaacatcaagagagatcaacaacaaaattattgttcatttatcccacgactatatgaaataatagtattgcaggagaaaaaaaagagatttttacctatgaaatcaatcaccccggctcctggcacatataatgaacctcgaactgctctcaagtctttgaagaaaacatcaggactgaaaaatattccatttggtcaaagtgctgttcgattcacacaggacatcaggacagaggaaatgccaggtcctggattttataatgtcttgaacaatactataattgccagtgttagaaatatctgctcaaagaaacagaagaaaagtgcatttggttcttctgttcctcggactttcttctcggttcagaaagaagcttgtgctacccctggacctgctgattatcaggaattttggcattcacagggtgtgggaatttctgatgaattacctaacttgactaacaaatatgctgctttcttgtcaagagccaaaagaactatgaaagtaccagatatggttattccagcgccaggcagctatgatgttcacaaatcatatgagatgtcccaagttaagcataaatatatgccacctcgtagtttagtggctaaaagaaaacatgcctcttttcttagtgcaactcctcggtgcctagaaaaagtgactgatgggccaggtcctgcagcatacaatcctgttttaaggaaatcttgccccatacccttatttgtgaaagcatcaaagcgctttgaagagtccaaagagattactccaggcccagcaacatatgagatatcccaggagaaaaagaaaggaaatctcattggtgaaatggctgctgatataatgtgacataaatttatggcaaaaacttaaaaaacaacttcatggaagtcagtttatttctttgtcattttaacaaaatttattccaaatataggagtaataaaagcataattttcacttgttcaggcattcgctcaggctttagtgactatatgacacaaccacggagaaataaaccttgttaagac

SEQ ID NO: 185810 - DNA, 4203 bp, Homo sapiens
  Payload ID: 16587
  Gene Symbol: STPG2
  Gene Name: sperm-tail PG-rich repeat containing 2
  ENST ID: ENST00000522676
  CDS Start-End: 1-561
ggttcttctgttcctcggactttcttctcggttcagaaagaagcttgtgctacccctggacctgctgattatcaggaattttggcattcacagggtgtgggaatttctgatgaattacctaacttgactaacaaatatgctgctttcttgtcaagagccaaaagaactatgaaagtaccagatatggttattccagcgccaggcagctatgatgttcacaaatcatatgagatgtcccaagttaagcataaatatatgccacctcgtagtttagtggctaaaagaaaacatgcctcttttcttagtgcaactcctcggtgcctagaaaaagtgactgatgggccaggtcctgcagcatacaatcctgttttaaggaaatcttgccccatacccttatttgtgaaagcatcaaagcgctttgaagagtccaaagagattactccaggcccagcaacatatgagatgaataatacagaggaaagcccacgtggactgaggacatactacatggagcatggaggtgataagaccatttcttcaggaatgaccagaatagcataaaagatcaatggaagcattgccaaaaaaggaagactgaaatctcaacctttcagggagtaatttatcatttggatgagcctaatgagaaaagcagtgcagtgaatgatgtgacaatatgaaacaacaaaatagtgaatgattaacgagtgacaaattgagagggaaaaaaaaggataacgctttcattatggtacaaaagagaatttgacaaactcatccaagaaagcaaccactttttcctccgtcttagttgaacgccttgaaaaacgaacaatcatactgctttcaaggaatttcataagagtaaaatagttaaacttctatagaatttcaataattaagggttacaaatatatttaaaggattttgaagctttaataatcaaaactttataaaaattatgctgcaattattcagggcaaatcaaaatgagaaaaaaccgtggcattttgataagtataaaagttataaaataaaacatattatttgttacaaatgacaatttaatgaaatatagttttgcattgaatctagctaggaaattttagatcatatgttttatggaattgatttgtattgtctgacatctaatttatagctggtcatgaattcaaattcttggcactgcttttttctaactatgtagcttgggaaaatatcttaagttttctaagtttcctaagattcaatttcctcatattctaacttgacctaacacactctatctgccaaaattattgtgaagaattaatgagctaatatctgggacagaaacaaaaaaatcaaagcctagtacctgtcacagaacacacatccacaatgtcattttcctcccattatgtcattagtctcaacaaaaagttaaaaatccaacctcatccaaaatccaatcaaaattaatcagaataagagaagttgggcaaattgatttccattaacttcaagtgcaaagtgttttgcacactcctgggatttacatgatggagaagaacagattcgaatgaactttgcctaacacaaattagataaatatccttttccttgaggacattaacatttagtaaacattaatgaaaaaaaaacaagtaatgcatgcctaatcatgtgctacatatgcctaatctgaattcatctttaaacggggaacggtttgaatggaaaattcatgttttgggttcctacttgtgacatgtaatgataataatttgtgtattccagtaaaattccatgccttttgaaatgtctctgtatgaatatgttgactaaaatgggtcattttagaaagacttatgaagtttgataactggaaaaagtcctaagaatggcctaatttatgtaaataatatacacaatgataatagaaatgtaactaatattagtttgttaataatgcttttatttctgaaaatacaaacaagtctgtagagtcacatgaacaatgggggaaatatttttctgactatgtctgtagaactttccaaaagtggaatctctaagttgcttttttttttttttttttttggtatggacttttaattaatgacacccttgtagaaaaatagaatttaaaaaaggggggtgggggactagggaaggggtagcattaggagaaatacctaatgtggatgacgagttaatgggtgcagcaagccaccatggcaggtgtataactatgtaacaaacctgcaggttctgcacatgtatcccagaactttaagtataataaataaagaaaaatatataagagattttaagacattaaatggccattttgaattaactcctaaaactaaaaatcaatgtcctcagcatttttaaaagaacaactatggcagaaaatgagaaacaaagtaagtggtggagtgagggatgaagatggggctgagtaatagggtgataaattgaaaggttttcagtatggatttgactgaatgacctggggcccaggtcacctgactcctaaccaaattattttccctgtaataaaagtttatattctaagcagagaaaatatggttggatggatggatgaatcgatagatggatggatggatggatggattatagatatgaaaatctttctgaattctattacatactttgtggagaaaattattttcagtattagttattcatctgggttgtaatagagtgagtcatttgagctgagttggaaaattttccttaaacataaattgccccagactgtcattttgttctcaatgtttcattctgcagtgtttggttctctcttgatgtcaaactgtcagaaatcatcctgtggtcagtacacctgccacagcagtcacttcttgtcttcccaggggaaacaggatagtatacttacagagaaaactgaatgaaccttggagttagacaaacctcagctataccctggatctcccattgtgggctagctactcaaactaaatgaagctctctatcttcacctgaaaaatgaggataacaggaagtgcctgttgtgtgaatcaagtaaacaaaattttaaaaatatgtaacagaattcctgaaacacatacatacagtcaatggaacttttctcctttctacattctcccatgctgttgaaggcatgcctttgttgttgttgtgttgttggagagtgctaatctagcttgataaggtgttatatgaaataatggtaaattggctgtgattggatgtctgagaagctcttcaatgtgtttacatttgactgttttggctgcctacatctaagtttttggctgttttctgaataattgagattttttgaacatgtgaaatgtcaccacagtgttgcaaaactctatattctttatgttcctgtgttaagataaaaatctcatgtgtcaaattgataacccgagttttcctacccatgtatgtcataagaaaatcactgaaaaaggtaaatatatcaattaagttatttatcatatagactataaattttcccagattgttggggttttttttttagtactttacctagcatacattttaatttagtcaaactggtttcatgtatattttactaaacatgcttcagacatggtaccagttcaatattctaatttaatttctatagattattaaaaatttttaaattataccagttttactgagttctgtttttaatacattttaggaattctgaaaaatagaattcccacagaaaggaatcctaagaaaattcatgtgaagaatgagatcttatttgggggattaattataatctggaagttttacttataacctcgtatttcatatatattataagatacttacattgaattatagaaatatacaaacaataattgaaaagcttaacttctgcctctgaagatatgattatctcatctcctggcctcttttgtgtttgttttaaggcaataaatacttgcttttctcctcctgatcatgagaaaatgatctttatttaatataaatttgatttatattttatcttttaaaattattattttggttatatctgctcaataatagaaaaaaattatggcttaactgatattgaattatttcaaatattacaacaagaaagcatacagaaatcacagtacagagatataaaatatgtaaaataaaaagtttaaaaagatttcaaatgtagcagaaaaa

SEQ ID NO: 185811 - DNA, 2269 bp, Homo sapiens
  Payload ID: 16588
  Gene Symbol: SPX
  Gene Name: spexin hormone
  Uniprot ID: Q9BT56
  ENST ID: ENST00000256969
  CDS Start-End: 167-517
aatcttgcttgaagactgacaagatgtccctgtggactcccaaactctactccagatggggaggtgcccttaacaccaagattttaaaagctccaatttcagagcaagagtcgaaaactcacagataaagttatagttatttcagggttctgaaaagacgcagaacatgaagggactcagaagtctggcagcaacaaccttggctcttttcctggtgtttgttttcctgggaaactccagctgcgctccgcagagactgttggagagaaggaactggactcctcaagctatgctctacctgaaaggggcacagggtcgccgcttcatctccgaccagagccggagaaaggacctctccgaccggccactgccggaaagacgaagcccaaatccccaactactaactattccggaggcagcaaccatcttactggcgtcccttcagaaatcaccagaagatgaagaaaaaaactttgatcaaaccagattcctggaagacagtctgcttaactggtgaaaatatactggattatgtttaattatggttctattctctttgaaaacatgaaccatgtgaataaaacctttggacccttttattccatttgtaatcttaagaacacacacagatagttttattctttcagaaacaaaatatatataggatgcttagctgagaacatcatcttctttcattgcttcaggtcctgtttagatgaccaaaaatgttttcagatcaccttgtgtcttactcttgagtttcttagaatatttataattataaggctgaagactaaagtgttctttccttttaactatagccagtacctgtcttgatcttagttgtgtttttttttcattttgttacccacttgcattttgttttcactcagcagaaattctccttctctgttttccttttatcccatccccaagaatgtggaaggaaggtgagaaacatggcaggatgggaaataggagagtatgactctctatagctcatccaggagtaatcaattaagaagataaattggatgactgtggagaagctctgtgataggaacacttcagtgtggttgctgagaggagacagtcattgaggtagaaggtttgccaaagatccagagctcagagctccctttgtgctctttgggaattaccttgcattcagtttagaaacatggatctaaaagttactgggaaataagcagatggagacacactctgttgtttacgtattggaagaagggaacaagccagttttgttagaggtaactcattttccatgaccaaacagactcaacagattcaagtactctgcttactctaattgactagactctaggttttatttgacatcatagcattacataaatcactctgataacataagtgcacagtaatatgcctgatctcttcctttttaaaagccaacttgagttcagtaccatctgaatacacacacatgcacatatacccacacacgcatacacacatactcctgtggcaaacataataatgtatttatttagaattataatatgaccatcatgttaattattttttacctaatcagagttgttattgacaaatgtcataagtggaaagtattaattcttattgtcatcagtatttagccattatttagtagctcaagaatatctttatgtgaatgtctctgtaacttggaattgcaatttcactgtgttaagtaatcagaactctgcttataagatttatctgtatcttgtttcataatttaataatgaaactaaattcaagttaatgtaatgttgatctccgtcgaaaaataacttgtgagcattaaaatatctgtatggcattataataggcacctgtcattaattatgatttgatttgaaagtagacttactaggtagtgcttacatctgatttattgaaaattttttccaaaagcattgtcttttatttatacagtcctaaccacttcaccattaggaggggtgggacattaaaaattatttacccatcagacataaaattgtacaaattgactattcaaaatagtatgtgtattcaaagaacacttttaacatctatcttatgaaataattcttcctacaactaaccagaacaatctcaaaaatgtcatactaaccattgttttaaaagctgtctcaatgatcaatagctgttaaaatatagctccaagtattctaagtactcaaattccttgaatgttcttatgtacaaatatgctgattaattaaaaggtccctcttcccaa

SEQ ID NO: 185812 - DNA, 554 bp, Homo sapiens
  Payload ID: 16588
  Gene Symbol: SPX
  Gene Name: spexin hormone
  ENST ID: ENST00000546199
  CDS Start-End: 41-151
atagagactgttggagagaaggaactggactcctcaagctatgctctacctgaaaggggcacagggtcgccgcttcatctccgaccagagccggagaaaggacctctccgaccggccactgccggacgaagcccaaatccccaactactaactattccggaggcagcaaccatcttactggcgtcccttcagaaatcaccagaagatgaagaaaaaaactttgatcaaaccagattcctggaagacagtctgcttaactggtgaaaatatactggattatgtttaattatggttctattctctttgaaaacatgaaccatgtgaataaaacctttggacccttttattccatttgtaatcttaagaacacacacagatagttttattctttcagaaacaaaatatatataggatgcttagctgagaacatcatcttctttcattgcttcaggtcctgtttagatgaccaaaaatgttttcagatcaccttgtgtcttactcttgagtttcttagaatatttataattataaggctgaagactaaagtgttcttt

SEQ ID NO: 185813 - DNA, 4707 bp, Homo sapiens
  Payload ID: 16589
  Gene Symbol: SCAPER
  Gene Name: S-phase cyclin A-associated protein in the ER
  Uniprot ID: Q9BY12
  ENST ID: ENST00000324767
  CDS Start-End: 60-4262
gagtcatactccatgggtttatgtgataaatgatcttggcatagaagagaatttaaagaatgatggcttcattccagcgctccaatagtcatgacaaagtaaggagaatagttgcagaggagggtcgtacagcaagaaacctaatagcttggagtgttccactagaaagcaaagatgatgatggaaaacctaaatgtcaaactggtggaaaatctaagaggaccattcaaggcactcataaaactactaaacagagtactgcagtggactgtaaaataacatcgtctacgactggagataaacactttgataaaagtcccactaaaacaaggcaccctcggaaaattgatctaagagctcgatactgggcatttctttttgataatcttcgccgagcagtagatgaaatctatgtaacttgcgaatcagatcagagtgtggtcgaatgtaaggaggtgctaatgatgctggataactatgtaagagatttcaaagcattgattgactggattcagcttcaggaaaagctagagaagacagatgctcaaagcagaccaacatcattggcatgggaagtaaagaagatgtctccgggacgccatgtgattccaagtccatcaacagatagaataaatgtaacatcaaatgctcgacgaagcttaaattttggaggttcaactggcacagtgccagctcctcgtctggctcccacaggtgtcagttgggctgacaaggtaaaggctcatcatacaggctctactgcttcttcagaaataacacccgcccagtcttgcccaccaatgacagtgcagaaggcctcacgcaaaaatgaacggaaagatgctgaaggatgggagaccgttcagagaggaaggcctattcgttctcgatcaacagcagtgatgccaaaagtttcattggcaacagaagccacaagatcaaaggatgacagtgataaagaaaatgtatgtcttttacctgatgaaagcatacagaaaggtcaatttgttggagatggaacttctaatactatagaatctcatcccaaagactcattacactcttgtgaccatcctcttgccgaaaaaacccagttcacagtgagtacattggatgatgtgaagaattctggcagtattcgagacaattatgttcgaacttctgaaatatctgctgtccacattgatacagagtgtgtttcagttatgctgcaagctggtacacctcctttacaagtaaatgaagaaaaatttccagcagagaaagcaaggatagaaaatgaaatggacccttcagatatttcaaattccatggcagaagtccttgctaaaaaagaagagctagcagatcgtctagaaaaggccaatgaagaagccattgctagtgctattgctgaagaagaacagttaactagagaaattgaagctgaagaaaacaatgatattaacattgaaactgacaacgacagtgatttttctgccagcatgggcagtgggagtgtttctttctgtggtatgtccatggactggaacgatgtccttgcagattatgaagctcgtgagtcttggcgccaaaatacatcctggggggacattgtagaagaagaacctgctagacctccagggcatggaattcacatgcatgaaaaactttcttcaccctctcgtaaaagaacaattgcagaatctaagaagaaacatgaagaaaaacaaatgaaagcacagcagctaagggaaaagttacgcgaagagaaaacattgaagcttcagaaattgttagaaagggagaaggatgtccggaagtggaaggaagaattgctagatcaacgacgcaggatgatggaagaaaaattacttcatgctgagtttaagcgagaagtgcagttacaagcaattgtgaaaaaagcacaagaagaagaagctaaggtaaatgaaattgcctttataaatacccttgaagcccagaataaacgtcatgatgttttatcaaaattgaaggaatatgaacagaggcttaatgagctacaggaagagcgtcagagaagacaggaagaaaagcaagcacgtgatgaagctgtgcaggaacgcaagagagctctagaggcagagcggcaggcccgtgtagaagaattgttaatgaagaggaaagaacaagaagcccgaattgaacaacagaggcaagaaaaggaaaaagcccgtgaggatgcagcccgggaaagagctagagacagggaagaacgattggcagcactcacagctgctcaacaagaagctatggaagagttacagaaaaaaattcagctcaagcatgatgaaagtattcgaaggcacatggaacagattgaacaaagaaaagaaaaagctgctgagctaagcagtgggcgacatgcaaatactgattatgcccccaaactgaccccttatgaaagaaagaagcagtgttctctctgcaatgtcctgatctcttcagaggtatatctttttagccatgttaaagggagaaaacaccagcaagccgtgagagagaataccagcatccaggggcgtgaactgtcagatgaagaagtggagcatctttccttgaagaagtacattattgacattgtggttgaaagtacagctccagcagaagctttgaaagatggagaagagcggcaaaaaaataaaaaaaaagccaaaaagataaaagcccggatgaacttcagggctaaggaatatgagagtttaatggaaaccaaaaattctggctctgattcaccttataaagcaaagcttcagcgattagccaaagatcttctaaaacaagtacaagttcaagacagtggctcatgggcaaacaataaagtgtctgctttggatcggaccctaggagagatcactagaatactggaaaaagagaatgtggcagatcagattgcatttcaagctgctggtggattaacagcccttgaacacatccttcaagcagtagtcccagccacaaatgtgaacacagttttaagaattcctcctaagtctctctgcaatgcaatcaatgtttacaacctcacctgcaataactgttcagaaaactgcagtgatgttctgtttagtaacaagattaccttcttaatggacctcctgatacaccagttgacggtttatgttccagatgaaaataatactattttggggagaaatacaaataaacaagtttttgaaggcttgacaactggacttctcaaagtcagtgctgtggttttgggctgcctgattgccaatcgaccagatggaaactgccagccagctaccccaaaaataccaacacaggaaatgaaaaacaaaccctcacaaggtgatccttttaacaatcgagttcaggaccttatcagctacgtggtgaacatgggtctgattgacaaactgtgtgcctgcttcctctcggtgcaaggcccagtggatgagaatcccaagatggccatatttctgcagcatgccgcaggactcttacatgcaatgtgtacactgtgctttgctgtcactggaaggtcatacagcatatttgacaataatcgccaggatcccacagggctgacagctgctcttcaggcaaccgacctggctggagttcttcatatgctctactgtgtcctcttccatggcaccatcttggaccccagcactgccagtcccaaggagaattacactcaaaataccatccaagtggccattcagagtttacgtttcttcaacagctttgcagctcttcatctgcctgcttttcagtctattgtaggggcagagggcttgtcccttgcattccggcacatggccagctccctgctgggccactgcagccaagtctcctgtgaaagcctccttcatgaggtcatcgtctgtgtgggctacttcactgtcaaccacccagataaccaggtgatcgtgcagtccggccgccaccccacagtgctgcagaagctctgccagttgcccttccagtatttcagtgacccacggctgatcaaagtactgttcccttcacttatcgctgcttgttacaacaaccatcagaacaagatcattctggagcaagagatgagctgtgttttactggccactttcattcaggatttggcacagactccaggtcaagcggaaaaccagccttaccaacccaaagggaaatgccttggttcccaagactatcttgagctggctaacagatttcctcagcaggcctgggaagaagctcgacagtttttcttgaaaaaagagaaaaaataaatgttttggttgattctgtatttgagtacccttgttaatattttaaattgtccaaacaaacattctaattgttccttaagaactcattttcccatgtttatactcttcccacactgtagatatggcatgtactttacactatttataatgactgtagatacttgaatgttctacttgctaattttgcaagttgagtttatttcatttatgcagagtatcttggagtttggtaatttccatcttatgataatatatactttgcatttgtgatatgggtgaaaggagacataaaattagcaagtctgttttgttcttgtaataaagtaacttattctgttttcattgttgacttttcatgttaaggaaatacgaatctgaaagaaaaatgttaactccagctcttgaagtatcttaaataaagacttaattaaagtttacctgctct

SEQ ID NO: 185814 - DNA, 4853 bp, Homo sapiens
  Payload ID: 16589
  Gene Symbol: SCAPER
  Gene Name: S-phase cyclin A-associated protein in the ER
  Uniprot ID: Q9BY12
  ENST ID: ENST00000538941
  CDS Start-End: 941-4405
acttctccttcctgctgccttgtaaagaaggcgccttgcttgcccttctccttccaccatgattgcaagtttcctgaggcctccccagccatgctgaactgaaaacctaaatgtcaaactggtggaaaatctaagaggaccattcaaggcactcataaaactactaaacagctctttgaggaatcgccatacttctttccataatggccgaactaatttacactcccagcaatagcgtagtactgcagtggactgtaaaataacatcgtctacgactggagataaacactttgataaaagtcccactaaaacaaggcaccctcggaaaattgatctaagagctcgatactgggcatttctttttgataatcttcgccgagcagtagatgaaatctatgtaacttgcgaatcagatcagagtgtggtcgaatgtaaggaggtgctaatgatgctggataactatgtaagagatttcaaagcattgattgactggattcagcttcaggaaaagctagagaagacagatgctcaaagcagaccaacatcattggcatgggaagtaaagaagatgtctccgggacgccatgtgattccaagtccatcaacagatagaataaatgtaacatcaaatgctcgacgaagcttaaattttggaggttcaactggcacagtgccagctcctcgtctggctcccacaggtgtcagttgggctgacaaggtaaaggctcatcatacaggctctactgcttcttcagaaataacacccgcccagtcttgcccaccaatgacagtgcagaaggcctcacgcaaaaatgtgaccagcttccatcctgaagccacctaggggctgccagccacttgtcaactcattagcatacaaaaagacacatcattttgggaattccaaagattttaggagttgcatgccaggagacttgagatgaagaccaaatatatattttgcaatatcacagaacggaaagatgctgaaggatgggagaccgttcagagaggaaggcctattcgttctcgatcaacagcagtgatgccaaaagtttcattggcaacagaagccacaagatcaaaggatgacagtgataaagaaaatgtatgtcttttacctgatgaaagcatacagaaaggtcaatttgttggagatggaacttctaatactatagaatctcatcccaaagactcattacactcttgtgaccatcctcttgccgaaaaaacccagttcacagtgagtacattggatgatgtgaagaattctggcagtattcgagacaattatgttcgaacttctgaaatatctgctgtccacattgatacagagtgtgtttcagttatgctgcaagctggtacacctcctttacaagtaaatgaagaaaaatttccagcagagaaagcaaggatagaaaatgaaatggacccttcagatatttcaaattccatggcagaagtccttgctaaaaaagaagagctagcagatcgtctagaaaaggccaatgaagaagccattgctagtgctattgctgaagaagaacagttaactagagaaattgaagctgaagaaaacaatgatattaacattgaaactgacaacgacagtgatttttctgccagcatgggcagtgggagtgtttctttctgtggtatgtccatggactggaacgatgtccttgcagattatgaagctcgtgagtcttggcgccaaaatacatcctggggggacattgtagaagaagaacctgctagacctccagggcatggaattcacatgcatgaaaaactttcttcaccctctcgtaaaagaacaattgcagaatctaagaagaaacatgaagaaaaacaaatgaaagcacagcagctaagggaaaagttacgcgaagagaaaacattgaagcttcagaaattgttagaaagggagaaggatgtccggaagtggaaggaagaattgctagatcaacgacgcaggatgatggaagaaaaattacttcatgctgagtttaagcgagaagtgcagttacaagcaattgtgaaaaaagcacaagaagaagaagctaaggtaaatgaaattgcctttataaatacccttgaagcccagaataaacgtcatgatgttttatcaaaattgaaggaatatgaacagaggcttaatgagctacaggaagagcgtcagagaagacaggaagaaaagcaagcacgtgatgaagctgtgcaggaacgcaagagagctctagaggcagagcggcaggcccgtgtagaagaattgttaatgaagaggaaagaacaagaagcccgaattgaacaacagaggcaagaaaaggaaaaagcccgtgaggatgcagcccgggaaagagctagagacagggaagaacgattggcagcactcacagctgctcaacaagaagctatggaagagttacagaaaaaaattcagctcaagcatgatgaaagtattcgaaggcacatggaacagattgaacaaagaaaagaaaaagctgctgagctaagcagtgggcgacatgcaaatactgattatgcccccaaactgaccccttatgaaagaaagaagcagtgttctctctgcaatgtcctgatctcttcagaggtatatctttttagccatgttaaagggagaaaacaccagcaagccgtgagagagaataccagcatccaggggcgtgaactgtcagatgaagaagtggagcatctttccttgaagaagtacattattgacattgtggttgaaagtacagctccagcagaagctttgaaagatggagaagagcggcaaaaaaataaaaaaaaagccaaaaagataaaagcccggatgaacttcagggctaaggaatatgagagtttaatggaaaccaaaaattctggctctgattcaccttataaagcaaagcttcagcgattagccaaagatcttctaaaacaagtacaagttcaagacagtggctcatgggcaaacaataaagtgtctgctttggatcggaccctaggagagatcactagaatactggaaaaagagaatgtggcagatcagattgcatttcaagctgctggtggattaacagcccttgaacacatccttcaagcagtagtcccagccacaaatgtgaacacagttttaagaattcctcctaagtctctctgcaatgcaatcaatgtttacaacctcacctgcaataactgttcagaaaactgcagtgatgttctgtttagtaacaagattaccttcttaatggacctcctgatacaccagttgacggtttatgttccagatgaaaataatactattttggggagaaatacaaataaacaagtttttgaaggcttgacaactggacttctcaaagtcagtgctgtggttttgggctgcctgattgccaatcgaccagatggaaactgccagccagctaccccaaaaataccaacacaggaaatgaaaaacaaaccctcacaaggtgatccttttaacaatcgagttcaggaccttatcagctacgtggtgaacatgggtctgattgacaaactgtgtgcctgcttcctctcggtgcaaggcccagtggatgagaatcccaagatggccatatttctgcagcatgccgcaggactcttacatgcaatgtgtacactgtgctttgctgtcactggaaggtcatacagcatatttgacaataatcgccaggatcccacagggctgacagctgctcttcaggcaaccgacctggctggagttcttcatatgctctactgtgtcctcttccatggcaccatcttggaccccagcactgccagtcccaaggagaattacactcaaaataccatccaagtggccattcagagtttacgtttcttcaacagctttgcagctcttcatctgcctgcttttcagtctattgtaggggcagagggcttgtcccttgcattccggcacatggccagctccctgctgggccactgcagccaagtctcctgtgaaagcctccttcatgaggtcatcgtctgtgtgggctacttcactgtcaaccacccagataaccaggtgatcgtgcagtccggccgccaccccacagtgctgcagaagctctgccagttgcccttccagtatttcagtgacccacggctgatcaaagtactgttcccttcacttatcgctgcttgttacaacaaccatcagaacaagatcattctggagcaagagatgagctgtgttttactggccactttcattcaggatttggcacagactccaggtcaagcggaaaaccagccttaccaacccaaagggaaatgccttggttcccaagactatcttgagctggctaacagatttcctcagcaggcctgggaagaagctcgacagtttttcttgaaaaaagagaaaaaataaatgttttggttgattctgtatttgagtacccttgttaatattttaaattgtccaaacaaacattctaattgttccttaagaactcattttcccatgtttatactcttcccacactgtagatatggcatgtactttacactatttataatgactgtagatacttgaatgttctacttgctaattttgcaagttgagtttatttcatttatgcagagtatcttggagtttggtaatttccatcttatgataatatatactttgcatttgtgatatgggtgaaaggagacataaaattagcaagtctgttttgttcttgtaataaagtaacttattctgttttcattgttgacttttcatgttaaggaaatacgaatctgaaagaaaaatgttaactccagctcttgaagtatcttaaataaagacttaattaaagtttacctgctctaaa

SEQ ID NO: 185815 - DNA, 5028 bp, Homo sapiens
  Payload ID: 16589
  Gene Symbol: SCAPER
  Gene Name: S-phase cyclin A-associated protein in the ER
  Uniprot ID: Q9BY12
  ENST ID: ENST00000563290
  CDS Start-End: 97-4299
gctttgagccgccccgaactaagcagggcggtcgggggagtcatactccatgggtttatgtgataaatgatcttggcatagaagagaatttaaagaatgatggcttcattccagcgctccaatagtcatgacaaagtaaggagaatagttgcagaggagggtcgtacagcaagaaacctaatagcttggagtgttccactagaaagcaaagatgatgatggaaaacctaaatgtcaaactggtggaaaatctaagaggaccattcaaggcactcataaaactactaaacagagtactgcagtggactgtaaaataacatcgtctacgactggagataaacactttgataaaagtcccactaaaacaaggcaccctcggaaaattgatctaagagctcgatactgggcatttctttttgataatcttcgccgagcagtagatgaaatctatgtaacttgcgaatcagatcagagtgtggtcgaatgtaaggaggtgctaatgatgctggataactatgtaagagatttcaaagcattgattgactggattcagcttcaggaaaagctagagaagacagatgctcaaagcagaccaacatcattggcatgggaagtaaagaagatgtctccgggacgccatgtgattccaagtccatcaacagatagaataaatgtaacatcaaatgctcgacgaagcttaaattttggaggttcaactggcacagtgccagctcctcgtctggctcccacaggtgtcagttgggctgacaaggtaaaggctcatcatacaggctctactgcttcttcagaaataacacccgcccagtcttgcccaccaatgacagtgcagaaggcctcacgcaaaaatgaacggaaagatgctgaaggatgggagaccgttcagagaggaaggcctattcgttctcgatcaacagcagtgatgccaaaagtttcattggcaacagaagccacaagatcaaaggatgacagtgataaagaaaatgtatgtcttttacctgatgaaagcatacagaaaggtcaatttgttggagatggaacttctaatactatagaatctcatcccaaagactcattacactcttgtgaccatcctcttgccgaaaaaacccagttcacagtgagtacattggatgatgtgaagaattctggcagtattcgagacaattatgttcgaacttctgaaatatctgctgtccacattgatacagagtgtgtttcagttatgctgcaagctggtacacctcctttacaagtaaatgaagaaaaatttccagcagagaaagcaaggatagaaaatgaaatggacccttcagatatttcaaattccatggcagaagtccttgctaaaaaagaagagctagcagatcgtctagaaaaggccaatgaagaagccattgctagtgctattgctgaagaagaacagttaactagagaaattgaagctgaagaaaacaatgatattaacattgaaactgacaacgacagtgatttttctgccagcatgggcagtgggagtgtttctttctgtggtatgtccatggactggaacgatgtccttgcagattatgaagctcgtgagtcttggcgccaaaatacatcctggggggacattgtagaagaagaacctgctagacctccagggcatggaattcacatgcatgaaaaactttcttcaccctctcgtaaaagaacaattgcagaatctaagaagaaacatgaagaaaaacaaatgaaagcacagcagctaagggaaaagttacgcgaagagaaaacattgaagcttcagaaattgttagaaagggagaaggatgtccggaagtggaaggaagaattgctagatcaacgacgcaggatgatggaagaaaaattacttcatgctgagtttaagcgagaagtgcagttacaagcaattgtgaaaaaagcacaagaagaagaagctaaggtaaatgaaattgcctttataaatacccttgaagcccagaataaacgtcatgatgttttatcaaaattgaaggaatatgaacagaggcttaatgagctacaggaagagcgtcagagaagacaggaagaaaagcaagcacgtgatgaagctgtgcaggaacgcaagagagctctagaggcagagcggcaggcccgtgtagaagaattgttaatgaagaggaaagaacaagaagcccgaattgaacaacagaggcaagaaaaggaaaaagcccgtgaggatgcagcccgggaaagagctagagacagggaagaacgattggcagcactcacagctgctcaacaagaagctatggaagagttacagaaaaaaattcagctcaagcatgatgaaagtattcgaaggcacatggaacagattgaacaaagaaaagaaaaagctgctgagctaagcagtgggcgacatgcaaatactgattatgcccccaaactgaccccttatgaaagaaagaagcagtgttctctctgcaatgtcctgatctcttcagaggtatatctttttagccatgttaaagggagaaaacaccagcaagccgtgagagagaataccagcatccaggggcgtgaactgtcagatgaagaagtggagcatctttccttgaagaagtacattattgacattgtggttgaaagtacagctccagcagaagctttgaaagatggagaagagcggcaaaaaaataaaaaaaaagccaaaaagataaaagcccggatgaacttcagggctaaggaatatgagagtttaatggaaaccaaaaattctggctctgattcaccttataaagcaaagcttcagcgattagccaaagatcttctaaaacaagtacaagttcaagacagtggctcatgggcaaacaataaagtgtctgctttggatcggaccctaggagagatcactagaatactggaaaaagagaatgtggcagatcagattgcatttcaagctgctggtggattaacagcccttgaacacatccttcaagcagtagtcccagccacaaatgtgaacacagttttaagaattcctcctaagtctctctgcaatgcaatcaatgtttacaacctcacctgcaataactgttcagaaaactgcagtgatgttctgtttagtaacaagattaccttcttaatggacctcctgatacaccagttgacggtttatgttccagatgaaaataatactattttggggagaaatacaaataaacaagtttttgaaggcttgacaactggacttctcaaagtcagtgctgtggttttgggctgcctgattgccaatcgaccagatggaaactgccagccagctaccccaaaaataccaacacaggaaatgaaaaacaaaccctcacaaggtgatccttttaacaatcgagttcaggaccttatcagctacgtggtgaacatgggtctgattgacaaactgtgtgcctgcttcctctcggtgcaaggcccagtggatgagaatcccaagatggccatatttctgcagcatgccgcaggactcttacatgcaatgtgtacactgtgctttgctgtcactggaaggtcatacagcatatttgacaataatcgccaggatcccacagggctgacagctgctcttcaggcaaccgacctggctggagttcttcatatgctctactgtgtcctcttccatggcaccatcttggaccccagcactgccagtcccaaggagaattacactcaaaataccatccaagtggccattcagagtttacgtttcttcaacagctttgcagctcttcatctgcctgcttttcagtctattgtaggggcagagggcttgtcccttgcattccggcacatggccagctccctgctgggccactgcagccaagtctcctgtgaaagcctccttcatgaggtcatcgtctgtgtgggctacttcactgtcaaccacccagataaccaggtgatcgtgcagtccggccgccaccccacagtgctgcagaagctctgccagttgcccttccagtatttcagtgacccacggctgatcaaagtactgttcccttcacttatcgctgcttgttacaacaaccatcagaacaagatcattctggagcaagagatgagctgtgttttactggccactttcattcaggatttggcacagactccaggtcaagcggaaaaccagccttaccaacccaaagggaaatgccttggttcccaagactatcttgagctggctaacagatttcctcagcaggcctgggaagaagctcgacagtttttcttgaaaaaagagaaaaaataaatgttttggttgattctgtatttgagtacccttgttaatattttaaattgtccaaacaaacattctaattgttccttaagaactcattttcccatgtttatactcttcccacactgtagatatggcatgtactttacactatttataatgactgtagatacttgaatgttctacttgctaattttgcaagttgagtttatttcatttatgcagagtatcttggagtttggtaatttccatcttatgataatatatactttgcatttgtgatatgggtgaaaggagacataaaattagcaagtctgttttgttcttgtaataaagtaacttattctgttttcattgttgacttttcatgttaaggaaatacgaatctgaaagaaaaatgttaactccagctcttgaagtatcttaaataaagacttaattaaagtttacctgctctaaatttaactttttaaggtctacggtaaagatatttgcaacacttttgcattctgactacataatatgtttgggggctatttgaaatcaacttagggcgttgtattcattggtctgcccgaactctcctagcagataatcctctcttggcattgccgagctgaaattactctcctaaggaaaaattagtgataaaaaagatgtgtcctagtgaatcaccctagagtattttctcacatggttgtgaaatgaagcaacgctgaaataaaagtcacacagaaagtc

SEQ ID NO: 185816 - DNA, 641 bp, Homo sapiens
  Payload ID: 16589
  Gene Symbol: SCAPER
  Gene Name: S-phase cyclin A-associated protein in the ER
  ENST ID: ENST00000563919
  CDS Start-End: 307-641
cccgccccgtcacgcccctttcccggcgggacgctttgagccgccccgaactaagcagggcggtcggggctctgcccaggaaacggggcaggaatggcctctccgtcttccagatgcgtgcgctgaggcctggaggggcgaagagcctctcgcacctgggagtagtgggacccagcctcctgcctctgttgctgctcttttccaaaacagcacttccttggcgcctttcctctacaccgttttccaggagtcatactccatgggtttatgtgataaatgatcttggcatagaagagaatttaaagaatgatggcttcattccagcgctccaatagtcatgacaaagtaaggagaatagttgcagaggagggtcgtacagcaagaaacctaatagcttggagtgttccactagaaagcaaagatgatgatggaaaacctaaatgtcaaactggtggaaaatctaagaggaccattcaaggcactcataaaactactaaacagagtactgcagtggactgtaaaataacatcgtctacgactggagataaacactttgataaaagtcccactaaaacaaggcaccctcggaaaattgatctaagagctcgatactgggcatttctttttgataatcttcgccg

SEQ ID NO: 185817 - DNA, 2388 bp, Homo sapiens
  Payload ID: 16589
  Gene Symbol: SCAPER
  Gene Name: S-phase cyclin A-associated protein in the ER
  ENST ID: ENST00000565970
  CDS Start-End: 147-2388
gtgcgtagcgcagacccgggcgggtccgggttggggcgcgggccgtctgaatgccttgcggggaccaggggacaaaatggcggcggggagtcatactccatgggtttatgtgataaatgatcttggcatagaagagaatttaaagaatgatggcttcattccagcgctccaatagtcatgacaaagtaaggagaatagttgcagaggagggtcgtacagcaagaaacctaatagcttggagtgttccactagaaagcaaagatgatgatggaaaacctaaatgtcaaactggtggaaaatctaagaggaccattcaaggcactcataaaactactaaacagagtactgcagtggactgtaaaataacatcgtctacgactggagataaacactttgataaaagtcccactaaaacaaggcaccctcggaaaattgatctaagagctcgatactgggcatttctttttgataatcttcgccgagcagtagatgaaatctatgtaacttgcgaatcagatcagagtgtggtcgaatgtaaggaggtgctaatgatgctggataactatgtaagagatttcaaagcattgattgactggattcagcttcaggaaaagctagagaagacagatgctcaaagcagaccaacatcattggcatgggaagtaaagaagatgtctccgggacgccatgtgattccaagtccatcaacagatagaataaatgtaacatcaaatgctcgacgaagcttaaattttggaggttcaactggcacagtgccagctcctcgtctggctcccacaggtgtcagttgggctgacaaggtaaaggctcatcatacaggctctactgcttcttcagaaataacacccgcccagtcttgcccaccaatgacagtgcagaaggcctcacgcaaaaatgaacggaaagatgctgaaggatgggagaccgttcagagaggaaggcctattcgttctcgatcaacagcagtgatgccaaaagtttcattggcaacagaagccacaagatcaaaggatgacagtgataaagaaaatgtatgtcttttacctgatgaaagcatacagaaaggtcaatttgttggagatggaacttctaatactatagaatctcatcccaaagactcattacactcttgtgaccatcctcttgccgaaaaaacccagttcacagtgagtacattggatgatgtgaagaattctggcagtattcgagacaattatgttcgaacttctgaaatatctgctgtccacattgatacagagtgtgtttcagttatgctgcaagctggtacacctcctttacaagtaaatgaagaaaaatttccagcagagaaagcaaggatagaaaatgaaatggacccttcagatatttcaaatgtgagtgctgctaacttgtccatggcagaagtccttgctaaaaaagaagagctagcagatcgtctagaaaaggccaatgaagaagccattgctagtgctattgctgaagaagaacagttaactagagaaattgaagctgaagaaaacaatgatattaacattgaaactgacaacgacagtgatttttctgccagcatgggcagtgggagtgtttctttctgtggtatgtccatggactggaacgatgtccttgcagattatgaagctcgtgagtcttggcgccaaaatacatcctggggggacattgtagaagaagaacctgctagacctccagggcatggaattcacatgcatgaaaaactttcttcaccctctcgtaaaagaacaattgcagaatctaagaagaaacatgaagaaaaacaaatgaaagcacagcagctaagggaaaagttacgcgaagagaaaacattgaagcttcagaaattgttagaaagggagaaggatgtccggaagtggaaggaagaattgctagatcaacgacgcaggatgatggaagaaaaattacttcatgctgagtttaagcgagaagtgcagttacaagcaattgtgaaaaaagcacaagaagaagaagctaaggtaaatgaaattgcctttataaatacccttgaagcccagaataaacgtcatgatgttttatcaaaattgaaggaatatgaacagaggcttaatgagctacaggaagagcgtcagagaagacaggaagaaaagcaagcacgtgatgaagctgtgcaggaacgcaagagagctctagaggcagagcggcaggcccgtgtagaagaattgttaatgaagaggaaagaacaagaagcccgaattgaacaacagaggcaagaaaaggaaaaagcccgtgaggatgcagcccgggaaagagctagagacagggaagaacgattggcagcactcacagctgctcaacaagaagctatggaagagt

SEQ ID NO: 185818 - DNA, 2627 bp, Homo sapiens
  Payload ID: 16589
  Gene Symbol: SCAPER
  Gene Name: S-phase cyclin A-associated protein in the ER
  ENST ID: ENST00000565507
  CDS Start-End: 277-504
acgctttgagccgccccgaactaagcagggcggtcggggctctgcccaggaaacggggcaggaatggcctctccgtcttccagatgcgtgcgctgaggcctggaggggcgaagagcctctcgcacctgggagtagtgggacccagcctcctgcctctgttgctgctcttttccaaaacagcacttccttggcgcctttcctctacaccgttttccaggagtcatactccatgggtttatgtgataaatgatcttggcatagaagagaatttaaagaatgatggcttcattccagcgctccaatagtcatgacaaagtaaggagaatagttgcagaggagggtcgtacagcaagaaacctaatagcttggagtgttccactagaaagcaaagatgatgatggaaaacctaaatgtcaaactggtggaaaatctaagaggaccattcaaggcactcataaaactactaaacagctctttgaggaatcgccatacttctttccataatggccgaactaatttacactcccagcaatagcgtagtactgcagtggactgtaaaataacatcgtctacgactggagataaacactttgataaaagtcccactaaaacaaggcaccctcggaaaattgatctaagagctcgatactgggcatttctttttgataatcttcgccgagcagtagatgaaatctatgtaacttgcgaatcagatcagagtgtggtcgaatgtaaggaggtgctaatgatgctggataactatgtaagagatttcaaagcattgattgactggattcagcttcaggaaaagctagagaagacagatgctcaaagcagaccaacatcattggcatgggaagtaaagaagatgtctccgggacgccatgtgattccaagtccatcaacagatagaataaatgtaacatcaaatgctcgacgaagcttaaattttggaggttcaactggcacagtgccagctcctcgtctggctcccacaggtgtcagttgggctgacaaggtaaaggctcatcatacaggctctactgcttcttcagaaataacacccgcccagtcttgcccaccaatgacagtgcagaaggcctcacgcaaaaatgaacggaaagatgctgaaggatgggagaccgttcagagaggaaggcctattcgttctcgatcaacagcagtgatgccaaaagtttcattggcaacagaagccacaagatcaaaggatgacagtgataaagaaaatgtatgtcttttacctgatgaaagcatacagaaaggtcaatttgttggagatggaacttctaatactatagaatctcatcccaaagactcattacactcttgtgaccatcctcttgccgaaaaaacccagttcacagtgagtacattggatgatgtgaagaattctggcagtattcgagacaattatgttcgaacttctgaaatatctgctgtccacattgatacagagtgtgtttcagttatgctgcaagctggtacacctcctttacaagtaaatgaagaaaaatttccagcagagaaagcaaggatagaaaatgaaatggacccttcagatatttcaaattccatggcagaagtccttgctaaaaaagaagagctagcagatcgtctagaaaaggccaatgaagaagccattgctagtgctattgctgaagaagaacagttaactagagaaattgaagctgaagaaaacaatgatattaacattgaaactgacaacgacagtgatttttctgccagcatgggcagtgggagtgtttctttctgtggtatgtccatggactggaacgatgtccttgcagattatgaagctcgtgagtcttggcgccaaaatacatcctggggggacattgtagaagaagaacctgctagacctccagggcatggaattcacatgcatgaaaaactttcttcaccctctcgtaaaagaacaattgcagaatctaagaagaaacatgaagaaaaacaaatgaaagcacagcagctaagggaaaagttacgcgaagagaaaacattgaagcttcagaaattgttagaaagggagaaggatgtccggaagtggaaggaagaattgctagatcaacgacgcaggatgatggaagaaaaattacttcatgctgagtttaagcgagaagtgcagttacaagcaattgtgaaaaaagcacaagaagaagaagctaaggtaaatgaaattgcctttataaatacccttgaagcccagaataaacgtcatgatgttttatcaaaattgaaggaatatgaacagaggcttaatgagctacaggaagagcgtcagagaagacaggaagaaaagcaagcacgtgatgaagctgtgcaggaacgcaagagagctctagaggcagagcggcaggcccgtgtagaagaattgttaatgaagaggaaagaacaagaagcccgaattgaacaacagaggcaagaaaaggaaaaagcccgtgaggatgcagcccgggaaagagctagagacagggaagaacgattggcagcactcacagctgctcaacaagaagctatggaagagttacagaaaaaaattcagctcaagcatgatgaaagtattcgaaggcacatggaacagattg

SEQ ID NO: 185819 - DNA, 572 bp, Homo sapiens
  Payload ID: 16589
  Gene Symbol: SCAPER
  Gene Name: S-phase cyclin A-associated protein in the ER
  ENST ID: ENST00000565372
  CDS Start-End: 111-572
tttcccggcgggacgctttgagccgccccgaactaagcagggcggtcgggggagtcatactccatgggtttatgtgataaatgatcttggcatagaagagaatttaaagaatgatggcttcattccagcgctccaatagtcatgacaaagtaaggagaatagttgcagaggagggtcgtacagcaagaaacctaatagcttggagtgttccactagaaagcaaagatgatgatggaaaacctaaatgtcaaactggtggaaaatctaagaggaccattcaaggcactcataaaactactaaacaggaggtgctaatgatgctggataactatgtaagagatttcaaagcattgattgactggattcagcttcaggaaaagctagagaagacagatgctcaaagcagaccaacatcattggcatgggaagtaaagaagatgtctccgggacgccatgtgattccaagtccatcaacagatagaataaatgtaacatcaaatgctcgacgaagcttaaattttggaggttcaactggcacagtgccagctcctcgtctggctcccacaggtgtc

SEQ ID NO: 185820 - DNA, 544 bp, Homo sapiens
  Payload ID: 16589
  Gene Symbol: SCAPER
  Gene Name: S-phase cyclin A-associated protein in the ER
  ENST ID: ENST00000568382
  CDS Start-End: 199-544
cctttcccggcgggacgctttgagccgccccgaactaagcagggcggtcgggggagtcatactccatgggtttatgtgataaatgatcttggcatagaagagaatttaaagaatgatggaaaacctaaatgtcaaactggtggaaaatctaagaggaccattcaaggcactcataaaactactaaacaggaggtgctaatgatgctggataactatgtaagagatttcaaagcattgattgactggattcagcttcaggaaaagctagagaagacagatgctcaaagcagaccaacatcattggcatgggaagtaaagaagatgtctccgggacgccatgtgattccaagtccatcaacagatagaataaatgtaacatcaaatgctcgacgaagcttaaattttggaggttcaactggcacagtgccagctcctcgtctggctcccacaggtgtcagttgggctgacaaggtaaaggctcatcatacaggctctactgcttcttcagaaataacacccgcccagtcttgcccaccaatgacag

SEQ ID NO: 185821 - DNA, 2507 bp, Homo sapiens
  Payload ID: 16589
  Gene Symbol: SCAPER
  Gene Name: S-phase cyclin A-associated protein in the ER
  ENST ID: ENST00000564590
  CDS Start-End: 206-2507
agccgggagcggcgcggcagcggctgagatcacgtggtgcgccgggaagccaccccgcctctccgaggcctccctgccccgccccgtcacgcccctttcccggcgggacgctttgagccgccccgaactaagcagggcggtcgggggagtcatactccatgggtttatgtgataaatgatcttggcatagaagagaatttaaagaatgatggcttcattccagcgctccaatagtcatgacaaagtaaggagaatagttgcagaggagggtcgtacagcaagaaacctaatagcttggagtgttccactagaaagcaaagatgatgatggaaaacctaaatgtcaaactggtggaaaatctaagaggaccattcaaggcactcataaaactactaaacagagtactgcagtggactgtaaaataacatcgtctacgactggagataaacactttgataaaagtcccactaaaacaaggcaccctcggaaaattgatctaagagctcgatactgggcatttctttttgataatcttcgccgagcagtagatgaaatctatgtaacttgcgaatcagatcagagtgtggtcgaatgtaaggaggtgctaatgatgctggataactatgtaagagatttcaaagcattgattgactggattcagcttcaggaaaagctagagaagacagatgctcaaagcagaccaacatcattggcatgggaagtaaagaagatgtctccgggacgccatgtgattccaagtccatcaacagatagaataaatgtaacatcaaatgctcgacgaagcttaaattttggaggttcaactggcacagtgccagctcctcgtctggctcccacaggtgtcagttgggctgacaaggtaaaggctcatcatacaggctctactgcttcttcagaaataacacccgcccagtcttgcccaccaatgacagtgcagaaggcctcacgcaaaaatgaacggaaagatgctgaaggatgggagaccgttcagagaggaaggcctattcgttctcgatcaacagcagtgatgccaaaagtttcattggcaacagaagccacaagatcaaaggatgacagtgataaagaaaatgtatgtcttttacctgatgaaagcatacagaaaggtcaatttgttggagatggaacttctaatactatagaatctcatcccaaagactcattacactcttgtgaccatcctcttgccgaaaaaacccagttcacagtgagtacattggatgatgtgaagaattctggcagtattcgagacaattatgttcgaacttctgaaatatctgctgtccacattgatacagagtgtgtttcagttatgctgcaagctggtacacctcctttacaagtaaatgaagaaaaatttccagcagagaaagcaaggatagaaaatgaaatggacccttcagatatttcaaatgtgagtgctgctaacttgtccatggcagaagtccttgctaaaaaagaagagctagcagatcgtctagaaaaggccaatgaagaagccattgctagtgctattgctgaagaagaacagttaactagagaaattgaagctgaagaaaacaatgatattaacattgaaactgacaacgacagtgatttttctgccagcatgggcagtgggagtgtttctttctgtggtatgtccatggactggaacgatgtccttgcagattatgaagctcgtgagtcttggcgccaaaatacatcctggggggacattgtagaagaagaacctgctagacctccagggcatggaattcacatgcatgaaaaactttcttcaccctctcgtaaaagaacaattgcagaatctaagaagaaacatgaagaaaaacaaatgaaagcacagcagctaagggaaaagttacgcgaagagaaaacattgaagcttcagaaattgttagaaagggagaaggatgtccggaagtggaaggaagaattgctagatcaacgacgcaggatgatggaagaaaaattacttcatgctgagtttaagcgagaagtgcagttacaagcaattgtgaaaaaagcacaagaagaagaagctaaggtaaatgaaattgcctttataaatacccttgaagcccagaataaacgtcatgatgttttatcaaaattgaaggaatatgaacagaggcttaatgagctacaggaagagcgtcagagaagacaggaagaaaagcaagcacgtgatgaagctgtgcaggaacgcaagagagctctagaggcagagcggcaggcccgtgtagaagaattgttaatgaagaggaaagaacaagaagcccgaattgaacaacagaggcaagaaaaggaaaaagcccgtgaggatgcagcccgggaaagagctagagacagggaagaacgattggcagcactcacagctgctcaacaagaagctatggaagagttacagaaaaaaattcagctcaagcatgatgaaagtattcgaaggcacatggaacagattg

SEQ ID NO: 185822 - DNA, 574 bp, Homo sapiens
  Payload ID: 16589
  Gene Symbol: SCAPER
  Gene Name: S-phase cyclin A-associated protein in the ER
  ENST ID: ENST00000564022
  CDS Start-End: 1-574
tctcgatcaacagcagtgatgccaaaagtttcattggcaacagaagccacaagatcaaaggatgacagtgataaagaaaatgtatgtcttttacctgatgaaagcatacagaaaggtcaatttgttggagatggaacttctaatactatagaatctcatcccaaagactcattacactcttgtgaccatcctcttgccgaaaaaacccagaatttcctccaggatccagtgtggaattactcagttcatttgttcacagtgagtacattggatgatgtgaagaattctggcagtattcgagacaattatgttcgaacttctgaaatatctgctgtccacattgatacagagtgtgtttcagttatgctgcaagctggtacacctcctttacaagtaaatgaagaaaaatttccagcagagaaagcaaggatagaaaatgaaatggacccttcagatatttcaaattccatggcagaagtccttgctaaaaaagaagagctagcagatcgtctagaaaaggccaatgaagaagccattgctagtgctattgctgaagaagaacagttaactagag

SEQ ID NO: 185823 - DNA, 626 bp, Homo sapiens
  Payload ID: 16589
  Gene Symbol: SCAPER
  Gene Name: S-phase cyclin A-associated protein in the ER
  ENST ID: ENST00000564757
  CDS Start-End: 1-298
cttcagggctaaggaatatgagagtttaatggaaaccaaaaattctggctctgattcaccttataaagcaaagcttcagcgattagccaaagatcttctaaaacaagtacaagttcaagacagtggctcatgggcaaacaataaagtgtctgctttggatcggaccctaggagagatcactagaatactggaaaaagaggtatatactgtatggaaagcaatgcatatatccaccaggcaagatatacacaaatgttcaatggcagcattgtttataatcaccacatatggaaaatagtgcaagaatccatcaacagctggagatacaaattatgaatgtggcagatcagattgcatttcaagctgctggtggattaacagcccttgaacacatccttcaagcagtagtcccagccacaaatgtgaacacagttttaagaattcctcctaagtctctctgcaatgcaatcaatgtttacaacctcacctgcaataactgttcagaaaactgcagtgatgttctgtttagtaacaagattaccttcttaatggacctcctgatacaccagttgacggtttatgttccagatgaaaataatactattttggggagaaatacaaataaa

SEQ ID NO: 185824 - DNA, 576 bp, Homo sapiens
  Payload ID: 16589
  Gene Symbol: SCAPER
  Gene Name: S-phase cyclin A-associated protein in the ER
  ENST ID: ENST00000564177
  CDS Start-End: 395-576
tttcccggcgggacgctttgagccgccccgaactaagcagggcggtcgggggagtcatactccatgggtttatgtgataaatgatcttggcatagaagagaatttaaagaatgatggaaaacctaaatgtcaaactggtggaaaatctaagaggaccattcaaggcactcataaaactactaaacagagtactgcagtggactgtaaaataacatcgtctacgactggagataaacactttgataaaagtcccactaaaacaaggcaccctcggaaaattgatctaagagctcgatactgggcatttctttttgataatcttcgccgagcagtagatgaaatctatgtaacttgcgaatcagatcagagtgtggtcgaatgtaaggaggtgctaatgatgctggataactatgtaagagatttcaaagcattgattgactggattcagcttcaggaaaagctagagaagacagatgctcaaagcagaccaacatcattggcatgggaagtaaagaagatgtctccgggacgccatgtgattccaagtccatcaacagatagaataaatgtaacatc

SEQ ID NO: 185825 - DNA, 625 bp, Homo sapiens
  Payload ID: 16589
  Gene Symbol: SCAPER
  Gene Name: S-phase cyclin A-associated protein in the ER
  ENST ID: ENST00000568549
  CDS Start-End: 1-189
cgacgaagcttaaattttggaggttcaactggcacagtgccagctcctcgtctggctcccacaggtgtcagttgggctgacaaggtaaaggctcatcatacaggctctactgcttcttcagaaataacacccgcccagtcttgcccaccaatgacagtgcagaaggcctcacgcaaaaatggcaagtgacttcgaattagccattttgtgtagtaaacagaacggaaagatgctgaaggatgggagaccgttcagagaggaaggcctattcgttctcgatcaacagcagtgatgccaaaagtttcattggcaacagaagccacaagatcaaaggatgacagtgataaagaaaatgtatgtcttttacctgatgaaagcatacagaaaggtcaatttgttggagatggaacttctaatactatagaatctcatcccaaagactcattacactcttgtgaccatcctcttgccgaaaaaacccagttcacagtgagtacattggatgatgtgaagaattctggcagtattcgagacaattatgttcgaacttctgaaatatctgctgtccacattgatacagagtgtgtttcagttatgctgcaagctggtacacctcctttacaag

SEQ ID NO: 185826 - DNA, 9474 bp, Homo sapiens
  Payload ID: 16590
  Gene Symbol: SKP1
  Gene Name: S-phase kinase-associated protein 1
  Uniprot ID: P63208
  ENST ID: ENST00000353411
  CDS Start-End: 185-676
agcccagccgcgatgtgacgccgcgcgccccggggtcctcggcgcctgcgccctctcctataaagcagacgccgcgccgcgctgcgacgctgtagtggcttcgtcttcggtttttctcttccttcgctaacgcctcccggctctcgtcagcctcccgccggccgtctccttaacaccgaacaccatgccttcaattaagttgcagagttctgatggagagatatttgaagttgatgtggaaattgccaaacaatctgtgactattaagaccatgttggaagatttgggaatggatgatgaaggagatgatgacccagttcctctaccaaatgtgaatgcagcaatattaaaaaaggtcattcagtggtgcacccaccacaaggatgaccctcctcctcctgaagatgatgagaacaaagaaaagcgaacagatgatatccctgtttgggaccaagaattcctgaaagttgaccaaggaacactttttgaactcattctggctgcaaactacttagacatcaaaggtttgcttgatgttacatgcaagactgttgccaatatgatcaaggggaaaactcctgaggagattcgcaagaccttcaatatcaaaaatgactttactgaagaggaggaagcccaggtacgcaaagagaaccagtggtgtgaagagaagtgaaatgttgtgcctgacactgtaacactgtaaggattgttccaaatactagttgcactgctctgtttataattgttaatattagacaaacagtagacaaatgcagcagcaagtcaattgtattagcagaatattgtcctcattgcatgtgtagtttgagcacagatcccaaaccttacggccaagtttcttctagtatgatggaaagtttcttttttctttgctctgaataaaactgaactgtgggttctctataagtggcattttgggctttccctcttttttgtaaagcaatgtctgcctagtttattgtccagttaactttagtgaccttttaaaagttggcattgtaaataaaacaacttgcaaaaaagttttctggaatagaattaacaaaatattatctttattcatgagttggaaactggaaaaaggcttcttgaagtaaatgttctgagtggagctactaggatgtcttccagcctcctgcagtcaaggagtaccactgtattgattagcctgtatgtagcagggctcccttcattgcatctgaggacttgttttctttttctttatttttaatcctcttagttttaaatatattgcctagagactcagttactacccagtttgtggttttttgggagaaatgtaactggacagttagcttttcaattaaaaagacacttaacccatgtgggatgtcatctttttataattagtgttcccatgtggagaaaattattcacactacttgcatgtaaagaataatttaacttttaacattaaaatatgtggtaaaacccagaaagcatccatcatgaatgcaagatactttcaataaaaagtaagttatatagtaggtagttaagtttgcttttgtggacttaaatgtgtctcttcacttaaatgggttgaatgtgtatatatttgttcagcttgaaaagacttagtttatatcctagctcactggaggctgctgacataaccataacttctgtcccttctaattgtcatttatatgcctaactggagctagtactttaattcttaacacaaaattactctgccattgtttccagcttccctcctacaatagaatgaagtttttttgatggcttgagatggctcacaaattttgatttttttttcttccttgtgctccctttttttctccttgcttttccagttaacatctatattcacatgtaatcttgttttctcttcacattcactgagttgttcaggctcagatcatcccttgacagtagtttgccttcatctcacctttcatttgtcccaaattcaccttatttaataaagtcccatatgttgtctcacttaattccaatttgttgtctgtaccagagataggaaactataatgtgtgggtcaaatcaggcccatagcctgtttttgtagtctttgagctaaaaatggtttttacgttgtaaagagttatttaaaattctctctctctctctctctctctctcaggagataagcttgttttctgtttgtcctggttttagtggggaaggtagcggtgtatagtcctagctgaattgtctcatctaccaattcctgctattataagatcaacttctgcaaaaaccttatccacctcaagtatccttagcagctgggcatggtggcttatgcctgtaatctcaacattttgggaggacaagacaggaggatcgtttgagcccaggagttcaagaccagcctgggcaacacagaaagtccctgtctctccaaaaaaaaaaaaaaaaattagcagtcatatggtgcatgcctataatcccaactacttgagaggctgaggtgggaagatggcttgagcctgagaggtcgaggctgcagtgagctggcattgcaccactgcactccagtctaggcaatagagcgagaccttgtctcaaaaacaaaccagaagtatccttagcagtattatgacaaacaaatcttcactgaaggtccaggattactgccatatgccatgtttaacttgtaaaggaagtatcaccttctaagaaactggagcttgttattaccacttgatctgtataatactcagcagtagttagaattatatgagtaaataacgtcactatccgtatttaaaggataatgagatctttcagaaagattggatggacagacaatatagtagtaatttaaatttttgtttcctgactttctgtagtccctaaacaaacaacaaaaaatcctagtaatcttaaacttttacattaatagagatccaagagaaaataagccatttttcaccattgtggacccaaataaatcatagacatggtattaagaagcccttttcagtctggttgcagtattattttcctacctttctttttcctgttccctgctgtatgcccactattcctttaatatatctactagaacttttctaggctttcacctggagtgagtggtcctttctcattatcacagtagccaaacctcagtcttcaaaactccactcatttctggctactctcttacttcccaactattcttctaaactaatattgtggcattaagtcataccttgaggctggagttttagtgtcttcatggccttgggcaagttggaaataggtactacggttttatagatctagtgcagtctgctttatattagttccagaacttcattggaagtcacttgacagcaggatttaacttgtatttagcagcactactccatgaatttcagtataagtaacagaagtgaaaagtccttgtgaaatgcaggtacagggcataatgaaaacaagaagagtagttttaatgcatgagaggggagagcttgataatagctgataatagccttggtttggagagtggttactgatgaattatgaagactttctctaattactgttatagtagtaaaggaaagaaaacccttgttgataaagtaaacttagggattaattaggaaatgccttttatttcaccaggaaagagaatgagaggaagaaggtatttggcagatttgggtgattgaaggatgtttgtcggtttcctctgtaaacaacatgctgctttctgcagtgtgctgcttttaatgatgaagtcctttcaaggactccatggcagtcctttggcttctcaccttttcattgattatgtcacttgtgatctaaaagtaaaccaaaaccttcctgaatgttagcttattattttctccttaacattgtcataggctaaagatgtgccccctcaaattctaataatttttttttttttttttttttttttgagacagagtctcactctgtcgcccagactggaatgcagtggtgcgatctcagctcactgcaacctccgcctcctgggttcaagtgattctcctgcctcagcctcccgagtagctgggattacaggcacatgccaccatgcctggctaatttttttgtgtttttattagagatggagttttaccatattggccaggctggtcttgaactcctgaccttgtgatccgcccgccttagcctccgaaagtgctgaggttacacgtgtgacccaccgcacacggccctaataattcttaagttgtagaagcaagttactcttttgaagtgccatgtgttagcttgccttaatctattcttggtatacaaaatagatactgctttacagttcttatattttctcagagattcacaaaatcatcctgtagctccctgtgtgggattatagctgtgactttttactctacaactgtcagaatacaccagctcctggaattaagcaagaactatattgtgacttggttggacaggtaactgcagccttgtaacatgacatcatagtaatgctgagcttatcttaaaactagctggggagggaggatagtaacagtgagtcactgtgggcatctcacttagggcaggcagatattccaaatcacattgatttttcagtttacgtaaaaattgaccaatcctatgggctgtgttctgatcccaacataaattttgtttaagttaatttgcctaggctctcaataaggcagtttgggaatataaggtgattttccaccagaaaagagaaaattgagagagcagcagacctcttgctctcagcaccctttacaagcttaacttttgcttgccaccattagcttttgaagattttttttaactgctccttgcagagcaggactaccccataggcagtgtgcccagagtagcccgaagagctttttgattcttcttttaagagacaaggtctcacctctgccccccaggctggagtgcagtgatgtgatcacagctcattgcagcctcgaactcttgggctccaacagtcctcctgcctcagcctcctgaatagctaggactacatgtgtgtgctaccatgccttgctagtttttgtttttttaaattgatttttatagagatgaggtctcctcatgttgcccaggctgttttcgaattcctgggctcaagatcctcctgcctcaacctcccaaagtgctggtattacagatgtgagccacagcacccaccaatttttccttttctaaagctcagtgtacattctggtaggaaggaatcaaccaagtaaatgttctccctacaaagttgtttgaggatttgaaaagttaatcttcaattatctggatttgaaaccagtctataactttttaagctaggaagaagtcaagaataagaagattgcaagcaaagggaaagcttacaaaatggctgaatccttaaagtgtagctcctggcttctccttggtaggaagcattagacatggtttccctctagggagctgggagcttttggtgtagttcaggagagaaggcataaatactgctgggagggagtggataactctaataaaaatgttcctgggctgggcacggtggctcacgcctgtaatcccaacattttcagaggctgaggtgtgcagatcacgaggtcaagagatcgagaccatcctggccaacatggtgaaacctcatctctactaaaaatacaaaaattagctgggcgtggtggcacatgcctgtagtcccagcaactcgggaggctgaggcaggagaaccgcttgaacccgggaggcggaagttgcagtgagccgacatcacgccactgactgcagtccagcctggcgacagagcgagactccgtttcaaaaaaaaaaagtttctggacagaacagattaatgagccaatggggggctacagagctgaaaggtgctacgaaaggttttgtaaagtgaaactaatttggtttcaagaatcaagttggatttgtttgggggtggacagatgccaaagtgaggaaaaagcagtgcacagtcaggaactaacagcagaaggttgggtgttggtacatttccctgagaatatagactaaagagaaattagggcaggattagtcacagtactttgctgacactcagtagtattttatcagcatttattcatcagacccacattaggcagggcaatttttgagtgagctaaattctaatttttttaattttaatttttatttatttattttttggctgttcaactaaaccagtcttttgaatgttgggggttttacagttagagtcctgatgactttttcttgtttactgttgttaaaaatcactacctccagtggtcacagagaatgagtaagagaactggctgtgcatatcaagatgaagtatggtgtaagaaatatttcagagcatgtcctttggcccaagattgagccatttggacacctaagcaggattggctgaatgttatcctttctgctgaggcatcagtggagatgatcattagtggtggccgaaaagtgttgtcgaaggtgctcttgcttgacacacttccaatgcgggacatagtttgagtgatagatggctaattcattgataatgtacttgttgccttgcagtcttgtgtactgctggctacctctggtctgtgtgccagtattgagcagcattctatgggaggaatgtagttgctcataacagtgtctgcttccacatctgtagttcttgcgaccttctgatatctgtcaactttaaattttctggaagtatttaagtatattcagaccttctgatatctcttaacttcaaattttcaacctgctatatagcagcctcttattgcacactgaggatcagcttatttccttaaagtgctctcactttgaatacctcccacctatctggtgaaaattcttatttgtcctttctttcctgaatgtaccatttcacaacctctaactgccttcttcagttgctttgcagatttttctgttccaggaagcttacggaaaggggtgggaaaatagagaagctgtactctatcctcaagtactcaagcagggtttccagagtggctttgtaaaaatttttatttatttatttatttatttttggtgagtggaacctggcttttcctcttccctccccaagccccaccccgcttcctgacattgcacatgcctgaaagaactaggcttcagataaaagaatgagaacacttgaatgaaaaaggaagacttggtccagagcccctggtgaatatgaaagaagtattggcctggactatctcccgcataattcacagctgctatcttgtcttcagaagtgaaacatcccttaccaatagtgacctaacttgtgaggactgcttgtgatagtatagttcccacccccaggacataagttttccctttccagttaacatgcctaatcccatgctatctttaagagcttgaaaatccttcctgacctgagctaggcttttattctaagggactgtgtatgtgaacatccccaccatctatgtttcctgttttcaaactcggtgccgttttgagtattttcagatgctcactgccagtaatggtttgttagtagctccaaactattagagaagagctcaggagtcagaatttgaaagatgcccatagggtgatttgagatttggaacaaggttatcacaataagttgggattgggggagttgacacaaccagggtctgcttgggtgggcagctgtttcagaaacccttggtgaactcttaaagccctgaagagcttaaaaaatgctctgaagagatctgagagtcgcagttaaggactctcaaagaacctcaaagaaaagccaacttagcctttttatacaattaactagatttgggtcttaaattctactttgacatataggcctaagaggtagtttaacatggccttgttacccttaccccttctgttctgtgctgttttctgagaaacggatgcaggaactgattccctttcttcctctctggaacaggatataaagaacccttccgcttccctttacttgtggccttcctggccaggcttatgtatactgaacaaagctagggtgcagtgcttctgagctagctgttaggggtccacagccagaaggaatgggagaccacaggagccattcaaaagataattacatgtcagaagagagtccatccatggggttctgttaaagtagacaccttcacgttgggagacataggctttgtctgcttgctgggctgaaccctcaccatatccacagagaacaaaatggggagcagctgtaccaggggagggatgaacgtctttcacccaagttgccagtctgctagttgtctggaaatgttcaagggaggctaaggtatcttgtcttatgatgtctcaggaaacagggttggttctcagctggcagtgaagggggactggtgtggtattagcagttgaacttgaggttgcaatctcaagtcaccctctggcctcgcaggaatgcaccagggtgatttgggaggatctgagtttcctttatgaagtcagattaaaaaaaaaaaaagctgatctgatttaaacagagttgccaaagacttccccgccaatacacaaagactgcattgttcaggtaccctgtgtactctaagtgagacaccaaatcagatgcagcaacctggtcttgcataagccctggttagaatgtaggttttttaaacaactaggccagtagccagaacagaattctttaaaatgggacagatgtccagagaatggctagtgtcctctagcactctctcagaagcaaaagcaagtctggggttacaacttccagtggcctactttaaatagacgctgttctggaaaatgactttatactttaaacacaaaatccaaaaaatagaactcagtggagtgacaatgacaatgcatgatggtggcccagtggctgtcccatgtgaaatacttcttgcctgacatgtatcatctacttgttgactgacctattgaggtgccttcatgacaccttttacattcatgataggtctcaggaagacagcagtgtacttggtggaaactcatgtaaaaagtgggttgtagggagctaaacagtgagtacacatggtatatggatacggaatggaataatagacattggagacttcaaaaggtgggagatgaaagggggatgaggtatgaaatcctacctgttgagtacaatgtacactacttacgtgcacagtacactgtttgggtgagaggcacactaaaagcccggacctcaccgctacccagtatgttcatgtaacacagctgcacttgtaccccctaaatgtatacaaataatctaaaaatagcccggacctcaccgctacacaatatattcatgtaacacagctgcatttgtaccccctaaatgtatacaaataatctaaaaataaagtggatatggtggctgtcgtgtccaccaacagcgta

SEQ ID NO: 185827 - DNA, 572 bp, Homo sapiens
  Payload ID: 16590
  Gene Symbol: SKP1
  Gene Name: S-phase kinase-associated protein 1
  ENST ID: ENST00000328392
  CDS Start-End: 97-572
gctgtagtggcttcgtcttcggtttttctcttccttcgctaacgcctcccggctctcgtcagcctcccgccggccgtctccttaacaccgaacaccatgccttcaattaagttgcagagttctgatggagagatatttgaagttgatgtggaaattgccaaacaatctgtgactattaagaccatgttggaagatttgggaatggatgatgaaggagatgatgacccagttcctctaccaaatgtgaatgcagcaatattaaaaaaggtcattcagtggtgcacccaccacaaggatgaccctcctcctcctgaagatgatgagaacaaagaaaagcgaacagatgatatccctgtttgggaccaagaattcctgaaagttgaccaaggaacactttttgaactcattctggctgcaaactacttagacatcaaaggtttgcttgatgttacatgcaagactgttgccaatatgatcaaggggaaaactcctgaggagattcgcaagaccttcaatatcaaaaatgactttactgaagaggaggaagcccagcagggcagaataaaaaccat

SEQ ID NO: 185828 - DNA, 748 bp, Homo sapiens
  Payload ID: 16590
  Gene Symbol: SKP1
  Gene Name: S-phase kinase-associated protein 1
  ENST ID: ENST00000523359
  CDS Start-End: 693-748
ctgcattgttagatttgtgattctgcactgttcatttcagtactatctaatataaaaattacatgtttaaatgttttataattaaaaattgggctcaggttaaaatattttcttttggagataccttttgttgtggtcttgtcacaggaagggtcctctactctgcatccttctccattaagcagggacaactgcattattggcaagcgctaagcaacatggagaagcagacatgtttgtgaatcgcaaagtgaaatctgattctctccaactatggatgagtgagagtaggatatttcagtggctggttttaaaacatgctttacttttttgcttcctttgcctaacaacctgtttgctttggggttggcgacaattgtctcagagaagctgaatgaatattttaaccgatgtaatgggtcataagtctttgaacataaaatgggtgtgatgcatgttttaaatgccaaatgatacacttttgggaaaatatatgcgatttgtaatacaacacacctagaaaacttcagaggtgccataagttaatagtgacatcaccggattatgaatacttgagaagcatgggccttttaaaagttgtatgtgagttttaagaggccttgaattaatctgtaccagacataaatgagcatattctgatgtactctttggatctgaactcatcttcacagatgccttcaattaagttgcagagttctgatggagagatatttgaagttgatgtgga

SEQ ID NO: 185829 - DNA, 692 bp, Homo sapiens
  Payload ID: 16590
  Gene Symbol: SKP1
  Gene Name: S-phase kinase-associated protein 1
  ENST ID: ENST00000519321
  CDS Start-End: 266-692
gctgtagtggcttcgtcttcggtttttctcttccttcgctaacgcctcccggctctcgtcagcctcccgccggccgtctccttaacaccgaacaccgtgagtagccgcccactgaactggaaagggtcgtggctaccggattgcgtgccggctggcctcaccgctgcggtttgggcctgcccgcggcgggcggtgactgggcctggccttctttcgggcccggtggatcgcgttgtcgaccctgttcttcgggagaccctaccagatgccttcaattaagttgcagagttctgatggagagatatttgaagttgatgtggaaattgccaaacaatctgtgactattaagaccatgttggaagatttgggaatggatgatgaaggagatgatgacccagttcctctaccaaatgtgaatgcagcaatattaaaaaaggtcattcagtggtgcacccaccacaaggatgaccctcctcctcctgaagatgatgagaacaaagaaaagcgaacagatgatatccctgtttgggaccaagaattcctgaaagttgaccaaggaacactttttgaactcattctggctgcaaactacttagacatcaaaggtttgcttgatgttacatgcaagactgttgccaatatgatcaaggggaaaactcctgaggagattcgcaagaccttcaatatcaaaa

SEQ ID NO: 185830 - DNA, 1683 bp, Homo sapiens
  Payload ID: 16590
  Gene Symbol: SKP1
  Gene Name: S-phase kinase-associated protein 1
  Uniprot ID: P63208
  ENST ID: ENST00000522552
  CDS Start-End: 111-593
cgccgcgctgcgacgctgtagtggcttcgtcttcggtttttctcttccttcgctaacgcctcccggctctcgtcagcctcccgccggccgtctccttaacaccgaacaccatgccttcaattaagttgcagagttctgatggagagatatttgaagttgatgtggaaattgccaaacaatctgtgactattaagaccatgttggaagatttgggaatggatgatgaaggagatgatgacccagttcctctaccaaatgtgaatgcagcaatattaaaaaaggtcattcagtggtgcacccaccacaaggatgaccctcctcctcctgaagatgatgagaacaaagaaaagcgaacagatgatatccctgtttgggaccaagaattcctgaaagttgaccaaggaacactttttgaactcattctggctgcaaactacttagacatcaaaggtttgcttgatgttacatgcaagactgttgccaatatgatcaaggggaaaactcctgaggagattcgcaagaccttcaatatcaaaaatgactttactgaagaggaggaagcccaggtaggtagcacacagttttgtctttgatcacatgctcttaaaaagggagtaacacctataacatgccagcaaaagaggtgactgtatcaagtagtcttgatactttagggataatatgtacttaatgtgtcttaaacatactcttactgttctgtctttatgaatctgaacacttagatgatactgcattttaagcataagaacaattagttttcaatgagaagagctcttgttaatgtattaacagttactagttttggcacctgcaactttctgtatagaccatacatatctgacatcagaaaagcaggccctagagagaagtatatactagggtactttagagcaacttaatgaggggaggaaatgaaagaatagatcagaatgattttgttgacatgactacagactgaaataatgtgaatgaattaactgaatttgctctgtcaactttagtaaattgcccattgcctttgctttgttcataatttcagcagggcagaataaaaaccatgggaggcaaagaaaggaaatccggaaatatagtcttaacctggtgttgttctaattttccatctgttcttctgactcaactcactggctatcgatgaatcagtaggtagtatttataagtcttaggaaagactactcaagttaaggtacttccctatatccatctcttttaggtacgcaaagagaaccagtggtgtgaagagaagtgaaatgttgtgcctgacactgtaacactgtaaggattgttccaaatactagttgcactgctctgtttataattgttaatattagacaaacagtagacaaatgcagcagcaagtcaattgtattagcagaatattgtcctcattgcatgtgtagtttgagcacagatcccaaaccttacggccaagtttcttctagtatgatggaaagtttcttttttctttgctctgaataaaactgaactgtgggttctctataagtggcattttgggctttccctcttttttgtaaagcaatgtctgcctagtttattgtccagttaactttagtgaccttttaaaagttggcattgtaaataaaacaacttgcaaaaaagttttctggaatagaattaacaaaa

SEQ ID NO: 185831 - DNA, 802 bp, Homo sapiens
  Payload ID: 16590
  Gene Symbol: SKP1
  Gene Name: S-phase kinase-associated protein 1
  Uniprot ID: P63208
  ENST ID: ENST00000522855
  CDS Start-End: 150-641
gctgtagtggcttcgtcttcggtttttctcttccttcgctaacgcctcccggctctcgtcagcctcccgccggccgtctccttaacaccgaacaccacataaatgagcatattctgatgtactctttggatctgaactcatcttcacagatgccttcaattaagttgcagagttctgatggagagatatttgaagttgatgtggaaattgccaaacaatctgtgactattaagaccatgttggaagatttgggaatggatgatgaaggagatgatgacccagttcctctaccaaatgtgaatgcagcaatattaaaaaaggtcattcagtggtgcacccaccacaaggatgaccctcctcctcctgaagatgatgagaacaaagaaaagcgaacagatgatatccctgtttgggaccaagaattcctgaaagttgaccaaggaacactttttgaactcattctggctgcaaactacttagacatcaaaggtttgcttgatgttacatgcaagactgttgccaatatgatcaaggggaaaactcctgaggagattcgcaagaccttcaatatcaaaaatgactttactgaagaggaggaagcccaggtacgcaaagagaaccagtggtgtgaagagaagtgaaatgttgtgcctgacactgtaacactgtaaggattgttccaaatactagttgcactgctctgtttataattgttaatattagacaaacagtagacaaatgcagcagcaagtcaattgtattagcagaatattgtcctcattgcatgtgtagtttgagcaca

SEQ ID NO: 185832 - DNA, 876 bp, Homo sapiens
  Payload ID: 16590
  Gene Symbol: SKP1
  Gene Name: S-phase kinase-associated protein 1
  Uniprot ID: P63208
  ENST ID: ENST00000517625
  CDS Start-End: 160-651
gttgtcgaccctgttcttcgggagaccctaccaggttccgttcacctgccccgcccccgactcagcgaggcctcctctggccgggcgtcctcacggcgctccataaacataaatgagcatattctgatgtactctttggatctgaactcatcttcacagatgccttcaattaagttgcagagttctgatggagagatatttgaagttgatgtggaaattgccaaacaatctgtgactattaagaccatgttggaagatttgggaatggatgatgaaggagatgatgacccagttcctctaccaaatgtgaatgcagcaatattaaaaaaggtcattcagtggtgcacccaccacaaggatgaccctcctcctcctgaagatgatgagaacaaagaaaagcgaacagatgatatccctgtttgggaccaagaattcctgaaagttgaccaaggaacactttttgaactcattctggctgcaaactacttagacatcaaaggtttgcttgatgttacatgcaagactgttgccaatatgatcaaggggaaaactcctgaggagattcgcaagaccttcaatatcaaaaatgactttactgaagaggaggaagcccaggtacgcaaagagaaccagtggtgtgaagagaagtgaaatgttgtgcctgacactgtaacactgtaaggattgttccaaatactagttgcactgctctgtttataattgttaatattagacaaacagtagacaaatgcagcagcaagtcaattgtattagcagaatattgtcctcattgcatgtgtagtttgagcacagatcccaaaccttacggccaagtttcttctagtatgatggaaagtttcttttttctttgctctg

SEQ ID NO: 185833 - DNA, 899 bp, Homo sapiens
  Payload ID: 16590
  Gene Symbol: SKP1
  Gene Name: S-phase kinase-associated protein 1
  ENST ID: ENST00000523966
  CDS Start-End: 97-222
gctgtagtggcttcgtcttcggtttttctcttccttcgctaacgcctcccggctctcgtcagcctcccgccggccgtctccttaacaccgaacaccatgccttcaattaagttgcagagttctgatggagagatatttgaagttgatgtggaaattgccaaacaatctgtgactattaagaccatgttggaagtcactgttcatcaagtacctattgaatgaagagtatgttgtgctcactaaaaaaaactgaaagcaatccaagtgtccctaaaaggcagatttgggaatggatgatgaaggagatgatgacccagttcctctaccaaatgtgaatgcagcaatattaaaaaaggtcattcagtggtgcacccaccacaaggatgaccctcctcctcctgaagatgatgagaacaaagaaaagcgaacagatgatatccctgtttgggaccaagaattcctgaaagttgaccaaggaacactttttgaactcattctggctgcaaactacttagacatcaaaggtttgcttgatgttacatgcaagactgttgccaatatgatcaaggggaaaactcctgaggagattcgcaagaccttcaatatcaaaaatgactttactgaagaggaggaagcccaggtacgcaaagagaaccagtggtgtgaagagaagtgaaatgttgtgcctgacactgtaacactgtaaggattgttccaaatactagttgcactgctctgtttataattgttaatattagacaaacagtagacaaatgcagcagcaagtcaattgtattagcagaatattgtcctcattgcatgtgtagtttgagcacagatcccaaaccttacggccaagtttcttctagtatgatggaaagtttcttttttctttgctc

SEQ ID NO: 185834 - DNA, 610 bp, Homo sapiens
  Payload ID: 16590
  Gene Symbol: SKP1
  Gene Name: S-phase kinase-associated protein 1
  ENST ID: ENST00000520417
  CDS Start-End: 305-610
tgtaagattatatctttttcctaacgactcataattaatctgaattaataaatgcgttttcagagcaagtaataggttattattatggagatcttgccaagagatctcaaagttggtcacctggacagtcagtactgaaagataaaaagggctctgaaatgaagcttttaagtagatttagggaattgtactcacatctgcttatctttaaatcattttattctcttgtatatggtcttgcattgcctcagacataaatgagcatattctgatgtactctttggatctgaactcatcttcacagatgccttcaattaagttgcagagttctgatggagagatatttgaagttgatgtggaaattgccaaacaatctgtgactattaagaccatgttggaagatttgggaatggatgatgaaggagatgatgacccagttcctctaccaaatgtgaatgcagcaatattaaaaaaggtcattcagtggtgcacccaccacaaggatgaccctcctcctcctgaagatgatgagaacaaagaaaagcgaacagatgatatccctgtttgggaccaagaattcctgaaagttgaccaaggaacactttttgaa

SEQ ID NO: 185835 - DNA, 654 bp, Homo sapiens
  Payload ID: 16590
  Gene Symbol: SKP1
  Gene Name: S-phase kinase-associated protein 1
  ENST ID: ENST00000519054
  CDS Start-End: 158-277
gctgcgacgctgtagtggcttcgtcttcggtttttctcttccttcgctaacgcctcccggctctcgtcagcctcccgccggccgtctccttaacaccgaacaccacataaatgagcatattctgatgtactctttggatctgaactcatcttcacagatgccttcaattaagttgcagagttctgatggagagatatttgaagttgatgtggaaattgccaaacaatctgtgactattaagaccatgttggaaggtcatcctttctgcattgtctgaattagtgagggtcgttctctcattaaatggataaaatcataagatttgggaatggatgatgaaggagatgatgacccagttcctctaccaaatgtgaatgcagcaatattaaaaaaggtcattcagtggtgcacccaccacaaggatgaccctcctcctcctgaagatgatgagaacaaagaaaagcgaacagatgatatccctgtttgggaccaagaattcctgaaagttgaccaaggaacactttttgaactcattctggctgcaaactacttagacatcaaaggtttgcttgatgttacatgcaagactgttgccaatatgatcaaggggaaaactcctgaggagattcgcaagaccttcaatatcaaaaatga

SEQ ID NO: 185836 - DNA, 899 bp, Homo sapiens
  Payload ID: 16590
  Gene Symbol: SKP1
  Gene Name: S-phase kinase-associated protein 1
  ENST ID: ENST00000521216
  CDS Start-End: 67-558
ttccttcgctaacgcctcccggctctcgtcagcctcccgccggccgtctccttaacaccgaacaccatgccttcaattaagttgcagagttctgatggagagatatttgaagttgatgtggaaattgccaaacaatctgtgactattaagaccatgttggaagatttgggaatggatgatgaaggagatgatgacccagttcctctaccaaatgtgaatgcagcaatattaaaaaaggtcattcagtggtgcacccaccacaaggatgaccctcctcctcctgaagatgatgagaacaaagaaaagcgaacagatgatatccctgtttgggaccaagaattcctgaaatatactttaaggaaaacaactgtctctttacaggctgcaaactacttagacatcaaaggtttgcttgatgttacatgcaagactgttgccaatatgatcaaggggaaaactcctgaggagattcgcaagaccttcaatatcaaaaatgactttactgaagaggaggaagcccaggtacgcaaagagaaccagtggtgtgaagagaagtgaaatgttgtgcctgacactgtaacactgtaaggattgttccaaatactagttgcactgctctgtttataattgttaatattagacaaacagtagacaaatgcagcagcaagtcaattgtattagcagaatattgtcctcattgcatgtgtagtttgagcacagatcccaaaccttacggccaagtttcttctagtatgatggaaagtttcttttttctttgctctgaataaaactgaactgtgggttctctataagtggcattttgggctttccctcttttttgtaaagcaatgtctgcctagtttattgtccagttaactttagtgaccttttaaaagttg

SEQ ID NO: 185837 - DNA, 1537 bp, Homo sapiens
  Payload ID: 16591
  Gene Symbol: SKP2
  Gene Name: S-phase kinase-associated protein 2, E3 ubiquitin protein ligase
  Uniprot ID: Q13309
  ENST ID: ENST00000274254
  CDS Start-End: 275-1507
aagggaaggaagtaagggcgagcccgtcggactacgaagcgggacggaaactacaattcccagcaggccttgggcctcagtgcggccgcgaagcagagcgggctgtagagccttgcgcgcgcagtggggatggaacgttgctaggcttagcgggtctggctgctgggggcccgagcagcacgctcggagccgccgcgcgccaaagcgggaatctgggaggcgagcagctctgcagttaatgcacgtattttaaactcccgggcctgcggacgctatgcacaggaagcacctccaggagattccagacctgagtagcaacgttgccaccagcttcacgtggggatgggattccagcaagacttctgaactgctgtcaggcatgggggtctccgccctggagaaagaggagcccgacagtgagaacatcccccaggaactgctctcaaacctgggccacccggagagccccccacggaaacggctgaagagcaaagggagtgacaaagactttgtgattgtccgcaggcctaagctaaatcgagagaactttccaggtgtttcatgggactcccttccggatgagctgctcttgggaatcttttcctgtctgtgcctccctgagctgctaaaggtctctggtgtttgtaagaggtggtatcgcctagcgtctgatgagtctctatggcagaccttagacctcacaggtaaaaatctgcacccggatgtgactggtcggttgctgtctcaaggggtgattgccttccgctgcccacgatcatttatggaccaaccattggctgaacatttcagcccttttcgtgtacagcacatggacctatcgaactcagttatagaagtgtccaccctccacggcatactgtctcagtgttccaagttgcagaatctaagcctggaaggcctgcggctttcggatcccattgtcaatactctcgcaaaaaactcaaatttagtgcgacttaacctttctgggtgttctggattctctgaatttgccctgcagactttgctaagcagctgttccagactggatgagctgaacctctcctggtgttttgatttcactgaaaagcatgtacaggtggctgttgcgcatgtgtcagagaccatcacccagctgaatcttagcggctacagaaagaatctccagaaatcagatctctctactttagttagaagatgccccaatcttgtccatctagacttaagtgatagtgtcatgctaaagaatgactgctttcaggaatttttccagctcaactacctccaacacctatcactcagtcggtgctatgatataatacctgaaactttactattagtgacaagagctggggttaggatccggttggactctgacatcggatgccctcaaacatacagaacttccaaactcaagtccagccataagctattttgccaacatgtcagagtaatctgtatttttgtatgtgatttctacttttatagacttgttttaaaacaataaaacacatttttataaaaatgagtgcttaaa

SEQ ID NO: 185838 - DNA, 3759 bp, Homo sapiens
  Payload ID: 16591
  Gene Symbol: SKP2
  Gene Name: S-phase kinase-associated protein 2, E3 ubiquitin protein ligase
  Uniprot ID: Q13309
  ENST ID: ENST00000274255
  CDS Start-End: 197-1471
agtgcggccgcgaagcagagcgggctgtagagccttgcgcgcgcagtggggatggaacgttgctaggcttagcgggtctggctgctgggggcccgagcagcacgctcggagccgccgcgcgccaaagcgggaatctgggaggcgagcagctctgcagttaatgcacgtattttaaactcccgggcctgcggacgctatgcacaggaagcacctccaggagattccagacctgagtagcaacgttgccaccagcttcacgtggggatgggattccagcaagacttctgaactgctgtcaggcatgggggtctccgccctggagaaagaggagcccgacagtgagaacatcccccaggaactgctctcaaacctgggccacccggagagccccccacggaaacggctgaagagcaaagggagtgacaaagactttgtgattgtccgcaggcctaagctaaatcgagagaactttccaggtgtttcatgggactcccttccggatgagctgctcttgggaatcttttcctgtctgtgcctccctgagctgctaaaggtctctggtgtttgtaagaggtggtatcgcctagcgtctgatgagtctctatggcagaccttagacctcacaggtaaaaatctgcacccggatgtgactggtcggttgctgtctcaaggggtgattgccttccgctgcccacgatcatttatggaccaaccattggctgaacatttcagcccttttcgtgtacagcacatggacctatcgaactcagttatagaagtgtccaccctccacggcatactgtctcagtgttccaagttgcagaatctaagcctggaaggcctgcggctttcggatcccattgtcaatactctcgcaaaaaactcaaatttagtgcgacttaacctttctgggtgttctggattctctgaatttgccctgcagactttgctaagcagctgttccagactggatgagctgaacctctcctggtgttttgatttcactgaaaagcatgtacaggtggctgttgcgcatgtgtcagagaccatcacccagctgaatcttagcggctacagaaagaatctccagaaatcagatctctctactttagttagaagatgccccaatcttgtccatctagacttaagtgatagtgtcatgctaaagaatgactgctttcaggaatttttccagctcaactacctccaacacctatcactcagtcggtgctatgatataatacctgaaactttacttgaacttggagaaattcccacactaaaaacactacaagtttttggaatcgtgccagatggtacccttcaactgttaaaggaagcccttcctcatctacagattaattgctcccatttcaccaccattgccaggccaactattggcaacaaaaagaaccaggagatatggggcatcaaatgccgactgacactgcaaaagcccagttgtctatgaagtatttattgcaggatggtgtctcttctttagaacagggaaaataggcaggaagcccaattgctggagtacttagctagttttattcttggttttccctttgccttcattctgcaagtatactagggagccatttgagagggaaaactatgaaatcttgctttttgaaatgattctaaaagcttctatcactgctttgctcttaagagccaaagttgtaggccttttgaaattttaggagagtgagcctataatttcaagataccttaaagagcaaaatttgagccacctcttccaagtgcccttcttactaagtctattcagaatcaagcttaaaaattaccaccagcaaacaatcttcatagcccatataacttttatctatttaattttatagtattgctttataagacagcttagaagaacaataagctatttgtattatgagctgaacaaaaagagaatcataggatagtagcgtctgaggccatcttttctaggaataggaaagagaaaaatgtatttgaattttgcctttagatttgaaattaggttaatagaaataagtaaccccatgtaattcaccttaaaacttaacaaaagaccaaacattacaaaacccagagatatagaatcaatataggatttgaaggcccagcagacagttttctatgacaggttaatctgaagtatcctgtaatgttcattaagttactgtgtttccagaatctaaattagatgagaaatataattgtggttttctaacttgataatcaaattatgttaacatgggtcctttagcttttaaaatgacttgctttgttttagaaaggtggtattaatccactctctattcttgaaaatttggatgggagaattctgaagttgcctgctgttttcctttagcgctgaggttcttaaggttacttttatattactctggaatcaagtattttaaattgtattttttttttaaatgatctctcagcaataattgtttgaaactatccatatataaggttatcagacctacagttccctaagaggaactgcatgttctcttcaatcagaaatatacagtagaagcaggtatatcttccatgcagtttcagtagtaagcactacttatacctacataagagttaaaatccagatgtgggaccttttgataccatcagtgatatatatttttttaaactggtacagagaagtgaaaagattaaattctacttctattttttttttttttttttgagacggagtctcgctctgtcaccaaggccggagtgcagtggtgcgatctcggctcactgcaagctccgcctcccaggttcacgtcattctcctgcctcagcctcccgactagctgggactacaggcgcccaccaccacgcccggctaatttttttgtatttttagtagagacggggtttcaccatgttagccaggatggtctcaatctcctgacctcatgatccgcccgtcttggcctcccaaagtgctgggattacaggcatgagcaactgcgcccagccaaattctacttcttaaaaatcacaaaaactagtttaaattgatgacttgttcgtatgttcaaaatgtaacaacaaaaaaagctaacaccagtcatttatattaactttttttttttaaatcaaaaattgttaatgttagaaacatactatgaagtgcctttatctgcttagacctaaggaagattttaaagttgggttgcacaggaaatgatgatgcttcaatttcttaatagttaaaaagtgctaaatactacttgaaattattgtttacagattagtgacaagagctggggttaggatccggttggactctgacatcggatgccctcaaacatacagaacttccaaactcaagtccagccataagctattttgccaacatgtcagagtaatctgtatttttgtatgtgatttctacttttatagacttgttttaaaacaataaaacacatttttataaaaatgagtgcttaaactaagttgtattccttttttctttctctttttttaagtgctgtggttaaaatttgaaagcatttagtgtggtatgccatttggcttagatacctctaaataagactcttcaaaacagagccctgagatggtcctttttgacccatctacttcatatgcttgtcacattaaaaaaaaaagtttataatgcctttataaaaggggctaatacagtcttgttatctttttttttaaattatactttaagttctagggtacatgtgcacaacgtgcaggttt

SEQ ID NO: 185839 - DNA, 821 bp, Homo sapiens
  Payload ID: 16591
  Gene Symbol: SKP2
  Gene Name: S-phase kinase-associated protein 2, E3 ubiquitin protein ligase
  ENST ID: ENST00000508514
  CDS Start-End: 142-795
aacgttgctaggcttagcgggtctggctgctgggggcccgagcagcacgctcggagccgccgcgcgccaaagcgggaatctgggaggcgagcagctctgcagttaatgcacgtattttaaactcccgggcctgcggacgctatgcacaggaagcacctccaggagattccagacctgagtagcaacgttgccaccagcttcacgtggggatgggattccagcaagacttctgaactgctgtcaggcatgggggtctccgccctggagaaagaggagcccgacagtgagaacatcccccaggaactgctctcaaacctgggccacccggagagccccccacggaaacggctgaagagcaaagggagtgacaaagactttgtgattgtccgcaggcctaagctaaatcgagagaactttccagatctctctactttagttagaagatgccccaatcttgtccatctagacttaagtgatagtgtcatgctaaagaatgactgctttcaggaatttttccagctcaactacctccaacacctatcactcagtcggtgctatgatataatacctgaaactttacttgaacttggagaaattcccacactaaaaacactacaagtttttggaatcgtgccagatggtacccttcaactgttaaaggaagcccttcctcatctacagattaattgctcccatttcaccaccattgccaggccaactattggcaacaaaaagaaccaggagatatggggcatcaaatgccgactgacactgcaaaagcccagttgtctatgaagtatttattgcaggatggtgtctct

SEQ ID NO: 185840 - DNA, 901 bp, Homo sapiens
  Payload ID: 16591
  Gene Symbol: SKP2
  Gene Name: S-phase kinase-associated protein 2, E3 ubiquitin protein ligase
  ENST ID: ENST00000513151
  CDS Start-End: 136-901
gctaggcttagcgggtctggctgctgggggcccgagcagcacgctcggagccgccgcgcgccaaagcgggaatctgggaggcgagcagctctgcagttaatgcacgtattttaaactcccgggcctgcggacgctatgcacaggaagcacctccaggagattccagacctgagtagcaacgttgccaccagcttcacgtggggatgggattccagcaagacttctgaactgctgtcaggcatgggggtctccgccctggagaaagaggagcccgacagtgagaacatcccccaggaactgctctcaaacctgggccacccggagagccccccacggaaacggctgaagagcaaagggagtgacaaagactttgtgattgtccgcaggcctaagctaaatcgagagaactttccaggtgtttcatgggactcccttccggatgagctgctcttgggaatcttttcctgtctgtgcctccctgagctgctaaaggtctctggtgtttgtaagaggtggtatcgcctagcgtctgatgagtctctatggcagaccttagacctcacaggtaaaaatctgcacccggatgtgactggtcggttgctgtctcaaggggtgattgccttccgctgcccacgatcatttatggaccaaccattggctgaacatttcagtactctcgcaaaaaactcaaatttagtgcgacttaacctttctgggtgttctggattctctgaatttgccctgcagactttgctaagcagctgttccagactggatgagctgaacctctcctggtgttttgatttcactgaaaagcatgtacaggtggctgttgcgcatgtgtcagagaccatcacccagctgaatcttagcggctacagaaagaatctccagaaatcag

SEQ ID NO: 185841 - DNA, 574 bp, Homo sapiens
  Payload ID: 16591
  Gene Symbol: SKP2
  Gene Name: S-phase kinase-associated protein 2, E3 ubiquitin protein ligase
  ENST ID: ENST00000504386
  CDS Start-End: 1-243
tcaaacctgggccacccggagagccccccacggaaacggctgaagagcaaagggagtgacaaagactttgtgattgtccgcaggcctaagctaaatcgagagaactttccaggtgtttcatgggactcccttccggatgagctgctcttgggaatcttttcctgtctgtgcctccctgagctgctaaaggtctctggtgtttgtaagaggtggtatcgcctagcatctctctactttagttagaagatgccccaatcttgtccatctagacttaagtgatagtgtcatgctaaagaatgactgctttcaggaatttttccagctcaactacctccaacacctatcactcagtcggtgctatgatataatacctgaaactttactattagtgacaagagctggggttaggatccggttggactctgacatcggatgccctcaaacatacagaacttccaaactcaagtccagccataagctattttgccaacatgtcagagtaatctgtatttttgtatgtgatttctacttttatagacttgttttaaaacaataaaacacatttttataaaaa

SEQ ID NO: 185842 - DNA, 1646 bp, Homo sapiens
  Payload ID: 16591
  Gene Symbol: SKP2
  Gene Name: S-phase kinase-associated protein 2, E3 ubiquitin protein ligase
  ENST ID: ENST00000509692
  CDS Start-End: 136-444
gctaggcttagcgggtctggctgctgggggcccgagcagcacgctcggagccgccgcgcgccaaagcgggaatctgggaggcgagcagctctgcagttaatgcacgtattttaaactcccgggcctgcggacgctatgcacaggaagcacctccaggagattccagacctgagtagcaacgttgccaccagcttcacgtggggatgggattccagcaagacttctgaactgctgtcaggcatgggggtctccgccctggagaaagaggagcccgacagtgagaacatcccccaggaactgctctcaaacctgggccacccggagagccccccacggaaacggctgaagagcaaagggagtgacaaagactttgtgattgtccgcaggcctaagctaaatcgagagaactttccaggtctgatgagtctctatggcagaccttagacctcacaggtaaaaatctgcacccggatgtgactggtcggttgctgtctcaaggggtgattgccttccgctgcccacgatcatttatggaccaaccattggctgaacatttcagtactctcgcaaaaaactcaaatttagtgcgacttaacctttctgggtgttctggattctctgaatttgccctgcagactttgctaagcagctgttccagactggatgagctgaacctctcctggtgttttgatttcactgaaaagcatgtacaggtggctgttgcgcatgtgtcagagaccatcacccagctgaatcttagcggctacagaaagaatctccagaaatcagatctctctactttagttagaagatgccccaatcttgtccatctagacttaagtgatagtgtcatgctaaagaatgactgctttcaggaatttttccagctcaactacctccaacacctatcactcagtcggtgctatgatataatacctgaaactttacttgaacttggagaaattcccacactaaaaacactacaagtttttggaatcgtgccagatggtacccttcaactgttaaaggaagcccttcctcatctacagattaattgctcccatttcaccaccattgccaggccaactattggcaacaaaaagaaccaggagatatggggcatcaaatgccgactgacactgcaaaagcccagttgtctatgaagtatttattgcaggatggtgtctcttctttagaacagggaaaataggcaggaagcccaattgctggagtacttagctagttttattcttggttttccctttgccttcattctgcaagtatactagggagccatttgagagggaaaactatgaaatcttgctttttgaaatgattctaaaagcttctatcactgctttgctcttaagagccaaagttgtaggccttttgaaattttaggagagtgagcctataatttcaagataccttaaagagcaaaatttgagccacctcttccaagtgcccttcttactaagtctattcagaatcaagcttaaaaattaccaccagcaaacaatcttcatagcccatataacttttatctatttaattttatagtattgctttataagacagcttagaagaacaataagctatttgtattatgagctgaacaaaaagagaatcataggatagtagcgtct

SEQ ID NO: 185843 - DNA, 694 bp, Homo sapiens
  Payload ID: 16591
  Gene Symbol: SKP2
  Gene Name: S-phase kinase-associated protein 2, E3 ubiquitin protein ligase
  ENST ID: ENST00000513263
  CDS Start-End: 95-403
cgctcggagccgccgcgcgccaaagcgggaatctgggaggcgagcagctctgcagttaatgcacgtattttaaactcccgggcctgcggacgctatgcacaggaagcacctccaggagattccagacctgagtagcaacgttgccaccagcttcacgtggggatgggattccagcaagacttctgaactgctgtcaggcatgggggtctccgccctggagaaagaggagcccgacagtgagaacatcccccaggaactgctctcaaacctgggccacccggagagccccccacggaaacggctgaagagcaaagggagtgacaaagactttgtgattgtccgcaggcctaagctaaatcgagagaactttccaggtctgatgagtctctatggcagaccttagacctcacaggtaaaaatctgcacccggatgtgactggtcggttgctgtctcaaggggtgattgccttccgctgcccacgatcatttatggaccaaccattggctgaacatttcagcccttttcgtgtacagcacatggacctatcgaactcagttatagaagtgtccaccctccacggcatactgtctcagtgttccaagttgcagaatctaagcctggaaggcctgcggctttcggatcccattgtcaatactctcgcaaaaaactcaaatttagtgcgacttaaccttt

SEQ ID NO: 185844 - DNA, 1589 bp, Homo sapiens
  Payload ID: 16591
  Gene Symbol: SKP2
  Gene Name: S-phase kinase-associated protein 2, E3 ubiquitin protein ligase
  ENST ID: ENST00000546211
  CDS Start-End: 141-1448
cgggctgtagagccttgcgcgcgcagtggggatggaacgttgctaggcttagcgggtctggctgctgggggcccgagcagcacgctcggagccgccgcgcgccaaagcgggaatctgggaggcgagcagctctgcagttaatgcacgtatttactcccgggcctgcggacgctatgcacaggaagcacctccaggagattccagacctgagtagcaacgttgccaccagcttcacgtggggatgggattccagcaagacttctgaactgctgtcaggcatgggggtctccgccctggagaaagaggagcccgacagtgagaacatcccccaggaactgctctcaaacctgggccacccggagagccccccacggaaacggctgaagagcaaagggagtgacaaagactttgtgattgtccgcaggcctaagctaaatcgagagaactttccaggtgtttcatgggactcccttccggatgagctgctcttgggaatcttttcctgtctgtgcctccctgagctgctaaaggtctctggtgtttgtaagaggtggtatcgcctagcgtctgatgagtctctatggcagaccttagacctcacaggtaaaaatctgcacccggatgtgactggtcggttgctgtctcaaggggtgattgccttccgctgcccacgatcatttatggaccaaccattggctgaacatttcagcccttttcgtgtacagcacatggacctatcgaactcagttatagaagtgtccaccctccacggcatactgtctcagtgttccaagttgcagaatctaagcctggaaggcctgcggctttcggatcccattgtcaatactctcgcaaaaaactcaaatttagtgcgacttaacctttctgggtgttctggattctctgaatttgccctgcagactttgctaagcagctgttccagactggatgagctgaacctctcctggtgttttgatttcactgaaaagcatgtacaggtggctgttgcgcatgtgtcagagaccatcacccagctgaatcttagcggctacagaaagaatctccagaaatcagatctctctactttagttagaagatgccccaatcttgtccatctagacttaagtgatagtgtcatgctaaagaatgactgctttcaggaatttttccagctcaactacctccaacacctatcactcagtcggtgctatgatataatacctgaaactttacttgaacttggagaaattcccacactaaaaacactacaagtttttggaatcgtgccagatggtacccttcaactgttaaaggaagcccttcctcatctacagattaattgctcccatttcaccaccattgccaggccaactattggcaacaaaaagaaccaggagatatggggcatcaaatgccgactgacactgcaaaagcccagttgtctatgaagtatttattgcaggatggtgtctcttctttagaacagggaaaataggcaggaagcccaattgctggagtacttagctagttttattcttggttttccctttgccttcattctgcaagtatactagggagccatttgagag

SEQ ID NO: 185845 - DNA, 3255 bp, Homo sapiens
  Payload ID: 16591
  Gene Symbol: SKP2
  Gene Name: S-phase kinase-associated protein 2, E3 ubiquitin protein ligase
  Uniprot ID: Q13309
  ENST ID: ENST00000620197
  CDS Start-End: 616-1248
aattcccagcaggccttgggcctcagtgcggccgcgaagcagagcgggctgtagagccttgcgcgcgcagtggggatggaacgttgctaggcttagcgggtctggctgctgggggcccgagcagcacgctcggagccgccgcgcgccaaagcgggaatctgggaggcgagcagctctgcagttaatgcacgtattttaaactcccgggcctgcggacgctatgcacaggaagcacctccaggagattccagacctgagtagcaacgttgccaccagcttcacgtggggatgggattccagcaagacttctgaactgctgtcaggcatgggggtctccgccctggagaaagaggagcccgacagtgagaacatcccccaggaactgctctcaaacctgggccacccggagagccccccacggaaacggctgaagagcaaagggagtgacaaagactttgtgattgtccgcaggcctaagctaaatcgagagaactttccaggtctgatgagtctctatggcagaccttagacctcacaggtaaaaatctgcacccggatgtgactggtcggttgctgtctcaaggggtgattgccttccgctgcccacgatcatttatggaccaaccattggctgaacatttcagtactctcgcaaaaaactcaaatttagtgcgacttaacctttctgggtgttctggattctctgaatttgccctgcagactttgctaagcagctgttccagactggatgagctgaacctctcctggtgttttgatttcactgaaaagcatgtacaggtggctgttgcgcatgtgtcagagaccatcacccagctgaatcttagcggctacagaaagaatctccagaaatcagatctctctactttagttagaagatgccccaatcttgtccatctagacttaagtgatagtgtcatgctaaagaatgactgctttcaggaatttttccagctcaactacctccaacacctatcactcagtcggtgctatgatataatacctgaaactttacttgaacttggagaaattcccacactaaaaacactacaagtttttggaatcgtgccagatggtacccttcaactgttaaaggaagcccttcctcatctacagattaattgctcccatttcaccaccattgccaggccaactattggcaacaaaaagaaccaggagatatggggcatcaaatgccgactgacactgcaaaagcccagttgtctatgaagtatttattgcaggatggtgtctcttctttagaacagggaaaataggcaggaagcccaattgctggagtacttagctagttttattcttggttttccctttgccttcattctgcaagtatactagggagccatttgagagggaaaactatgaaatcttgctttttgaaatgattctaaaagcttctatcactgctttgctcttaagagccaaagttgtaggccttttgaaattttaggagagtgagcctataatttcaagataccttaaagagcaaaatttgagccacctcttccaagtgcccttcttactaagtctattcagaatcaagcttaaaaattaccaccagcaaacaatcttcatagcccatataacttttatctatttaattttatagtattgctttataagacagcttagaagaacaataagctatttgtattatgagctgaacaaaaagagaatcataggatagtagcgtctgaggccatcttttctaggaataggaaagagaaaaatgtatttgaattttgcctttagatttgaaattaggttaatagaaataagtaaccccatgtaattcaccttaaaacttaacaaaagaccaaacattacaaaacccagagatatagaatcaatataggatttgaaggcccagcagacagttttctatgacaggttaatctgaagtatcctgtaatgttcattaagttactgtgtttccagaatctaaattagatgagaaatataattgtggttttctaacttgataatcaaattatgttaacatgggtcctttagcttttaaaatgacttgctttgttttagaaaggtggtattaatccactctctattcttgaaaatttggatgggagaattctgaagttgcctgctgttttcctttagcgctgaggttcttaaggttacttttatattactctggaatcaagtattttaaattgtattttttttttaaatgatctctcagcaataattgtttgaaactatccatatataaggttatcagacctacagttccctaagaggaactgcatgttctcttcaatcagaaatatacagtagaagcaggtatatcttccatgcagtttcagtagtaagcactacttatacctacataagagttaaaatccagatgtgggaccttttgataccatcagtgatatatatttttttaaactggtacagagaagtgaaaagattaaattctacttctattttttttttttttttttgagacggagtctcgctctgtcaccaaggccggagtgcagtggtgcgatctcggctcactgcaagctccgcctcccaggttcacgtcattctcctgcctcagcctcccgactagctgggactacaggcgcccaccaccacgcccggctaatttttttgtatttttagtagagacggggtttcaccatgttagccaggatggtctcaatctcctgacctcatgatccgcccgtcttggcctcccaaagtgctgggattacaggcatgagcaactgcgcccagccaaattctacttcttaaaaatcacaaaaactagtttaaattgatgacttgttcgtatgttcaaaatgtaacaacaaaaaaagctaacaccagtcatttatattaactttttttttttaaatcaaaaattgttaatgttagaaacatactatgaagtgcctttatctgcttagacctaaggaagattttaaagttgggttgcacaggaaatgatgatgcttcaatttcttaatagttaaaaagtgctaaatactacttgaaattattgtttacagattagtgacaagagctggggttaggatccggttggactctgacatcggatgccctcaaacatacagaacttccaaactcaagtccagccataagctattttgccaacatgtcagagtaatctgtatttttgtatgtgatttctacttttatagacttgttttaaaacaataaaacacatttttataaaaatgagtgctt

SEQ ID NO: 185846 - DNA, 648 bp, Homo sapiens
  Payload ID: 16592
  Gene Symbol: SPHAR
  Gene Name: S-phase response (cyclin related)
  Uniprot ID: Q15513
  ENST ID: ENST00000366688
  CDS Start-End: 279-470
tatattgggtatattgaagtatatattgtattacaaagacttgttcttgtattttaaaatgtcagtgcaaaaaatatatggtggaacctttctttaaagttgaaatgcagtattatttaaatctgaaaggttaaaaagctttcttcaccttatatatgttcttccactgtgactttttagttgaagactagtaaattaacttttagttagaagatgcctactgcttttgttgtttattttaatcagcagagcacagagacacataaaaactctgggaaatgactaggataaaaatatcagtatgtatctgttttagatattttgagttttgctttttttatgccttgaatattttatttcaaaaagtatctgaagcaaattctcagactgaactacttcttagacctcactgtaagaatattttattcaatgtctcatttatgatagatttgcaagctgctcatttttgaacagctttttgcatgggataggagcatgtctattctaacacatcagcttattcaaaagcaagaattttaaaaataagataaatgtaaagttgttttataaacgatcctgttaattaaaccacagacaccatatatccttctgcatcctttggccaataaaagttgctggagaaccaaa

SEQ ID NO: 185847 - DNA, 2452 bp, Homo sapiens
  Payload ID: 16593
  Gene Symbol: SMPD1
  Gene Name: sphingomyelin phosphodiesterase 1, acid lysosomal
  Uniprot ID: P17405
  ENST ID: ENST00000342245
  CDS Start-End: 169-2064
ggaagaggaaggggcggagctgctttgcggccggccgcggagcagtcagccgactacagagaagggtaatcgggtgtccccggcgccgcccggggccctgagggctggctagggtccaggccgggggggacgggacagacgaaccagccccgtgtaggaagcgcgacaatgccccgctacggagcgtcactccgccagagctgccccaggtccggccgggagcagggacaagacgggaccgccggagcccccggactcctttggatgggcctggtgctggcgctggcgctggcgctggcgctggcgctggctctgtctgactctcgggttctctgggctccggcagaggctcaccctctttctccccaaggccatcctgccaggttacatcgcatagtgccccggctccgagatgtctttgggtgggggaacctcacctgcccaatctgcaaaggtctattcaccgccatcaacctcgggctgaagaaggaacccaatgtggctcgcgtgggctccgtggccatcaagctgtgcaatctgctgaagatagcaccacctgccgtgtgccaatccattgtccacctctttgaggatgacatggtggaggtgtggagacgctcagtgctgagcccatctgaggcctgtggcctgctcctgggctccacctgtgggcactgggacattttctcatcttggaacatctctttgcctactgtgccgaagccgccccccaaaccccctagccccccagccccaggtgcccctgtcagccgcatcctcttcctcactgacctgcactgggatcatgactacctggagggcacggaccctgactgtgcagacccactgtgctgccgccggggttctggcctgccgcccgcatcccggccaggtgccggatactggggcgaatacagcaagtgtgacctgcccctgaggaccctggagagcctgttgagtgggctgggcccagccggcccttttgatatggtgtactggacaggagacatccccgcacatgatgtctggcaccagactcgtcaggaccaactgcgggccctgaccaccgtcacagcacttgtgaggaagttcctggggccagtgccagtgtaccctgctgtgggtaaccatgaaagcacacctgtcaatagcttccctccccccttcattgagggcaaccactcctcccgctggctctatgaagcgatggccaaggcttgggagccctggctgcctgccgaagccctgcgcaccctcagaattggggggttctatgctctttccccataccccggtctccgcctcatctctctcaatatgaatttttgttcccgtgagaacttctggctcttgatcaactccacggatcccgcaggacagctccagtggctggtgggggagcttcaggctgctgaggatcgaggagacaaagtgcatataattggccacattcccccagggcactgtctgaagagctggagctggaattattaccgaattgtagccaggtatgagaacaccctggctgctcagttctttggccacactcatgtggatgaatttgaggtcttctatgatgaagagactctgagccggccgctggctgtagccttcctggcacccagtgcaactacctacatcggccttaatcctggttaccgtgtgtaccaaatagatggaaactactccgggagctctcacgtggtcctggaccatgagacctacatcctgaatctgacccaggcaaacataccgggagccataccgcactggcagcttctctacagggctcgagaaacctatgggctgcccaacacactgcctaccgcctggcacaacctggtatatcgcatgcggggcgacatgcaacttttccagaccttctggtttctctaccataagggccacccaccctcggagccctgtggcacgccctgccgtctggctactctttgtgcccagctctctgcccgtgctgacagccctgctctgtgccgccacctgatgccagatgggagcctcccagaggcccagagcctgtggccaaggccactgttttgctagggccccagggcccacatttgggaaagttcttgatgtaggaaagggtgaaaaagcccaaatgctgctgtggttcaaccaggcaagatcatccggtgaaagaaccagtccctgggccccaaggatgccggggaaacaggaccttctcctttcctggagctggtttagctggatatgggagggggtttggctgcctgtgcccaggagctagactgccttgaggctgctgtcctttcacagccatggagtagaggcctaagttgacactgccctgggcagacaagacaggagctgtcgccccaggcctgtgctgcccagccaggaaccctgtactgctgctgcgacctgatgctgccagtctgttaaaataaagataagagacttggactcc

SEQ ID NO: 185848 - DNA, 447 bp, Homo sapiens
  Payload ID: 16593
  Gene Symbol: SMPD1
  Gene Name: sphingomyelin phosphodiesterase 1, acid lysosomal
  ENST ID: ENST00000530395
  CDS Start-End: 290-447
ggagctgctttgcggccggccgcggagcagtcagccgactacagagaagggtaatcgggtgtccccggcgccgcccggggccctgagggctggctagggtccaggccgggggggacgggacagacgaaccagccccgtgtaggaagcgcgacaatgccccgctacggagcgtcactccgccagagctgccccaggtgccggatactggggcgaatacagcaagtgtgacctgcccctgaggaccctggagagcctgttgagtgggctgggcccagccggcccttttgatatggtgtactggacaggagacatccccgcacatgatgtctggcaccagactcgtcaggaccaactgcgggccctgaccaccgtcacagcacttgtgaggaagttcctggggccagtgccagtgtaccctgctgtgggtaaccatgaaagcacacctgt

SEQ ID NO: 185849 - DNA, 1451 bp, Homo sapiens
  Payload ID: 16593
  Gene Symbol: SMPD1
  Gene Name: sphingomyelin phosphodiesterase 1, acid lysosomal
  ENST ID: ENST00000531303
  CDS Start-End: 18-533
gtgtaggaagcgcgacaatgccccgctacggagcgtcactccgccagagctgccccaggtccggccgggagcagggacaagacgggaccgccggagcccccggactcctttggatgggcctggtgctggcgctggcgctggcgctggcgctggcgctggctctgtctgactctcgggttctctgggctccggcagaggctcaccctctttctccccaaggccatcctgccaggttacatcgcatagtgccccggctccgagatgtctttgggtgggggaacctcacctgcccaatctgcaaaggtctattcaccgccatcaacctcgggctgaagaaggaacccaatgtggctcgcgtgggctccgtggccatcaagctgtgcaatctgctgaagatagcaccacctgccgtgtgccaatccattgtccacctctttgaggatgacatggtggagaattggggggttctatgctctttccccataccccggtctccgcctcatctctctcaatatgaatttttgttcccgtgagaacttctggctcttgatcaactccacggatcccgcaggacagctccagtggctggtgggggagcttcaggctgctgaggatcgaggagacaaagtgcatataattggccacattcccccagggcactgtctgaagagctggagctggaattattaccgaattgtagccaggtatgagaacaccctggctgctcagttctttggccacactcatgtggatgaatttgaggtcttctatgatgaagagactctgagccggccgctggctgtagccttcctggcacccagtgcaactacctacatcggccttaatcctgtcagccccacatccttgcaggttaccgtgtgtaccaaatagatggaaactactccgggagctctcacgtggtcctggaccatgagacctacatcctgaatctgacccaggcaaacataccgggagccataccgcactggcagcttctctacagggctcgagaaacctatgggctgcccaacacactgcctaccgcctggcacaacctggtatatcgcatgcggggcgacatgcaacttttccagaccttctggtttctctaccataagggccacccaccctcggagccctgtggcacgccctgccgtctggctactctttgtgcccagctctctgcccgtgctgacagccctgctctgtgccgccacctgatgccagatgggagcctcccagaggcccagagcctgtggccaaggccactgttttgctagggccccagggcccacatttgggaaagttcttgatgtaggaaagggtgaaaaagcccaaatgctgctgtggttcaaccaggcaagatcatccggtgaaagaaccagtccctgggccccaaggatgccggggaaacaggaccttctcctttcctggagctggtttagctggat

SEQ ID NO: 185850 - DNA, 2446 bp, Homo sapiens
  Payload ID: 16593
  Gene Symbol: SMPD1
  Gene Name: sphingomyelin phosphodiesterase 1, acid lysosomal
  ENST ID: ENST00000534405
  CDS Start-End: 127-1335
cagtcagccgactacagagaagggtaatcgggtgtccccggcgccgcccggggccctgagggctggctagggtccaggccgggggggacgggacagacgaaccagccccgtgtaggaagcgcgacaatgccccgctacggagcgtcactccgccagagctgccccaggtccggccgggagcagggacaagacgggaccgccggagcccccggactcctttggatgggcctggtgctggcgctggcgctggcgctggcgctggcgctggctctgtctgactctcgggttctctgggctccggcagaggctcaccctctttctccccaaggccatcctgccaggttacatcgcatagtgccccggctccgagatgtctttgggtgggggaacctcacctgcccaatctgcaaaggtctattcaccgccatcaacctcgggctgaagaaggaacccaatgtggctcgcgtgggctccgtggccatcaagctgtgcaatctgctgaagatagcaccacctgccgtgtgccaatccattgtccacctctttgaggatgacatggtggaggtgtggagacgctcagtgctgagcccatctgaggcctgtggcctgctcctgggctccacctgtgggcactgggacattttctcatcttggaacatctctttgcctactgtgccgaagccgccccccaaaccccctagccccccagccccaggtgcccctgtcagccgcatcctcttcctcactgacctgcactgggatcatgactacctggagggcacggaccctgactgtgcagacccactgtgctgccgccggggttctggcctgccgcccgcatcccggccaggtgccggatactggggcgaatacagcaagtgtgacctgcccctgaggaccctggagagcctgttgagtgggctgggcccagccggcccttttgatatggtgtactggacaggagacatccccgcacatgatgtctggcaccagactcgtcaggaccaactgcgggccctgaccaccgtcacagcacttgtgaggaagttcctggggccagtgccagtgtaccctgctgtgggtaaccatgaaagcacacctgtcaatagcttccctccccccttcattgagggcaaccactcctcccgctggctctatgaagcgatggccaaggcttgggagccctggctgcctgccgaagccctgcgcaccctcaggtacttatcgtccgtggaaacccaggaagggaaaagaaagaattggggggttctatgctctttccccataccccggtctccgcctcatctctctcaatatgaatttttgttcccgtgagaacttctggctcttgatcaactccacggatcccgcaggacagctccagtggctggtgggggagcttcaggctgctgaggatcgaggagacaaagtgcatataattggccacattcccccagggcactgtctgaagagctggagctggaattattaccgaattgtagccaggtatgagaacaccctggctgctcagttctttggccacactcatgtggatgaatttgaggtcttctatgatgaagagactctgagccggccgctggctgtagccttcctggcacccagtgcaactacctacatcggccttaatcctggttaccgtgtgtaccaaatagatggaaactactccgggagctctcacgtggtcctggaccatgagacctacatcctgaatctgacccaggcaaacataccgggagccataccgcactggcagcttctctacagggctcgagaaacctatgggctgcccaacacactgcctaccgcctggcacaacctggtatatcgcatgcggggcgacatgcaacttttccagaccttctggtttctctaccataagggccacccaccctcggagccctgtggcacgccctgccgtctggctactctttgtgcccagctctctgcccgtgctgacagccctgctctgtgccgccacctgatgccagatgggagcctcccagaggcccagagcctgtggccaaggccactgttttgctagggccccagggcccacatttgggaaagttcttgatgtaggaaagggtgaaaaagcccaaatgctgctgtggttcaaccaggcaagatcatccggtgaaagaaccagtccctgggccccaaggatgccggggaaacaggaccttctcctttcctggagctggtttagctggatatgggagggggtttggctgcctgtgcccaggagctagactgccttgaggctgctgtcctttcacagccatggagtagaggcctaagttgacactgccctgggcagacaagacaggagctgtcgccccaggcctgtgctgcccagccaggaaccctgtactgctgctgcgacctgatgctgccagtctgttaaaataaagataagagacttgga

SEQ ID NO: 185851 - DNA, 2188 bp, Homo sapiens
  Payload ID: 16593
  Gene Symbol: SMPD1
  Gene Name: sphingomyelin phosphodiesterase 1, acid lysosomal
  Uniprot ID: P17405
  ENST ID: ENST00000527275
  CDS Start-End: 125-2017
gtcagccgactacagagaagggtaatcgggtgtccccggcgccgcccggggccctgagggctggctagggtccaggccgggggggacgggacagacgaaccagccccgtgtaggaagcgcgacaatgccccgctacggagcgtcactccgccagagctgccccaggtccggccgggagcagggacaagacgggaccgccggagcccccggactcctttggatgggcctggtgctggcgctggcgctggcgctggcgctggcgctggctctgtctgactctcgggttctctgggctccggcagaggctcaccctctttctccccaaggccatcctgccaggttacatcgcatagtgccccggctccgagatgtctttgggtgggggaacctcacctgcccaatctgcaaaggtctattcaccgccatcaacctcgggctgaaggaacccaatgtggctcgcgtgggctccgtggccatcaagctgtgcaatctgctgaagatagcaccacctgccgtgtgccaatccattgtccacctctttgaggatgacatggtggaggtgtggagacgctcagtgctgagcccatctgaggcctgtggcctgctcctgggctccacctgtgggcactgggacattttctcatcttggaacatctctttgcctactgtgccgaagccgccccccaaaccccctagccccccagccccaggtgcccctgtcagccgcatcctcttcctcactgacctgcactgggatcatgactacctggagggcacggaccctgactgtgcagacccactgtgctgccgccggggttctggcctgccgcccgcatcccggccaggtgccggatactggggcgaatacagcaagtgtgacctgcccctgaggaccctggagagcctgttgagtgggctgggcccagccggcccttttgatatggtgtactggacaggagacatccccgcacatgatgtctggcaccagactcgtcaggaccaactgcgggccctgaccaccgtcacagcacttgtgaggaagttcctggggccagtgccagtgtaccctgctgtgggtaaccatgaaagcacacctgtcaatagcttccctccccccttcattgagggcaaccactcctcccgctggctctatgaagcgatggccaaggcttgggagccctggctgcctgccgaagccctgcgcaccctcagaattggggggttctatgctctttccccataccccggtctccgcctcatctctctcaatatgaatttttgttcccgtgagaacttctggctcttgatcaactccacggatcccgcaggacagctccagtggctggtgggggagcttcaggctgctgaggatcgaggagacaaagtgcatataattggccacattcccccagggcactgtctgaagagctggagctggaattattaccgaattgtagccaggtatgagaacaccctggctgctcagttctttggccacactcatgtggatgaatttgaggtcttctatgatgaagagactctgagccggccgctggctgtagccttcctggcacccagtgcaactacctacatcggccttaatcctggttaccgtgtgtaccaaatagatggaaactactccgggagctctcacgtggtcctggaccatgagacctacatcctgaatctgacccaggcaaacataccgggagccataccgcactggcagcttctctacagggctcgagaaacctatgggctgcccaacacactgcctaccgcctggcacaacctggtatatcgcatgcggggcgacatgcaacttttccagaccttctggtttctctaccataagggccacccaccctcggagccctgtggcacgccctgccgtctggctactctttgtgcccagctctctgcccgtgctgacagccctgctctgtgccgccacctgatgccagatgggagcctcccagaggcccagagcctgtggccaaggccactgttttgctagggccccagggcccacatttgggaaagttcttgatgtaggaaagggtgaaaaagcccaaatgctgctgtggttcaaccaggcaagatcatccggtgaaagaaccagtccctgggccccaaggatgccggggaaacaggaccttctcctttcctggagctggtttagctggat

SEQ ID NO: 185852 - DNA, 2211 bp, Homo sapiens
  Payload ID: 16593
  Gene Symbol: SMPD1
  Gene Name: sphingomyelin phosphodiesterase 1, acid lysosomal
  ENST ID: ENST00000533123
  CDS Start-End: 97-1197
ggtgtccccggcgccgcccggggccctgagggctggctagggtccaggccgggggggacgggacagacgaaccagccccgtgtaggaagcgcgacaatgccccgctacggagcgtcactccgccagagctgccccaggtccggccgggagcagggacaagacgggaccgccggagcccccggactcctttggatgggcctggtgctggcgctggcgctggcgctggcgctggcgctggctctgtctgactctcgggttctctgggctccggcagaggctcaccctctttctccccaaggccatcctgccaggttacatcgcatagtgccccggctccgagatgtctttgggtgggggaacctcacctgcccaatctgcaaaggtctattcaccgccatcaacctcgggctgaagaaggaacccaatgtggctcgcgtgggctccgtggccatcaagctgtgcaatctgctgaagatagcaccacctgccgtgtgccaatccattgtccacctctttgaggatgacatggtggaggtgtggagacgctcagtgctgagcccatctgaggcctgtggcctgctcctgggctccacctgtgggcactgggacattttctcatcttggaacatctctttgcctactgtgccgaagccgccccccaaaccccctagccccccagccccaggtgcccctgtcagccgcatcctcttcctcactgacctgcactgggatcatgactacctggagggcacggaccctgactgtgcagacccactgtgctgccgccggggttctggcctgccgcccgcatcccggccaggtgccggatactggggcgaatacagcaagtgtgacctgcccctgaggaccctggagagcctgttgagtgggctgggcccagccggcccttttgatatggtgtactggacaggagacatccccgcacatgatgtctggcaccagactcgtcaggaccaactgcgggccctgaccaccgtcacagcacttgtgaggaagttcctggggccagtgccagtgtaccctgctgtgggtaaccatgaaagcacacctgtcaatagcttccctccccccttcattgagggcaaccactcctcccgctggctctatgaagcgatggccaaggcttgggagccctggctgcctgccgaagccctgcgcaccctcaggtgcatataattggccacattcccccagggcactgtctgaagagctggagctggaattattaccgaattgtagccaggtatgagaacaccctggctgctcagttctttggccacactcatgtggatgaatttgaggtcttctatgatgaagagactctgagccggccgctggctgtagccttcctggcacccagtgcaactacctacatcggccttaatcctggttaccgtgtgtaccaaatagatggaaactactccgggagctctcacgtggtcctggaccatgagacctacatcctgaatctgacccaggcaaacataccgggagccataccgcactggcagcttctctacagggctcgagaaacctatgggctgcccaacacactgcctaccgcctggcacaacctggtatatcgcatgcggggcgacatgcaacttttccagaccttctggtttctctaccataagggccacccaccctcggagccctgtggcacgccctgccgtctggctactctttgtgcccagctctctgcccgtgctgacagccctgctctgtgccgccacctgatgccagatgggagcctcccagaggcccagagcctgtggccaaggccactgttttgctagggccccagggcccacatttgggaaagttcttgatgtaggaaagggtgaaaaagcccaaatgctgctgtggttcaaccaggcaagatcatccggtgaaagaaccagtccctgggccccaaggatgccggggaaacaggaccttctcctttcctggagctggtttagctggatatgggagggggtttggctgcctgtgcccaggagctagactgccttgaggctgctgtcctttcacagccatggagtagaggcctaagttgacactgccctgggcagacaagacaggagctgtcgccccaggcctgtgctgcccagccaggaaccctgtactgctgctgcgacctgatgctgccagtctgttaaaataaagataagagacttggactccaga

SEQ ID NO: 185853 - DNA, 1344 bp, Homo sapiens
  Payload ID: 16593
  Gene Symbol: SMPD1
  Gene Name: sphingomyelin phosphodiesterase 1, acid lysosomal
  ENST ID: ENST00000526280
  CDS Start-End: 1-953
cttttgatatggtgtactggacaggagacatccccgcacatgatgtctggcaccagactcgtcaggaccaactgcgggccctgaccaccgtcacagcacttgtgaggaagttcctggggccagtgccagtgtaccctgctgtgggtaaccatgaaagcacacctgtcaatagcttccctccccccttcattgagggcaaccactcctcccgctggctctatgaagcgatggccaaggcttgggagccctggctgcctgccgaagccctgcgcaccctcaggtacttatcgtccgtggaaacccaggaagggaaaagaaaggtgcatataattggccacattcccccagggcactgtctgaagagctggagctggaattattaccgaattgtagccaggtatgagaacaccctggctgctcagttctttggccacactcatgtggatgaatttgaggtcttctatgatgaagagactctgagccggccgctggctgtagccttcctggcacccagtgcaactacctacatcggccttaatcctggttaccgtgtgtaccaaatagatggaaactactccgggagctctcacgtggtcctggaccatgagacctacatcctgaatctgacccaggcaaacataccgggagccataccgcactggcagcttctctacagggctcgagaaacctatgggctgcccaacacactgcctaccgcctggcacaacctggtatatcgcatgcggggcgacatgcaacttttccagaccttctggtttctctaccataagggccacccaccctcggagccctgtggcacgccctgccgtctggctactctttgtgcccagctctctgcccgtgctgacagccctgctctgtgccgccacctgatgccagatgggagcctcccagaggcccagagcctgtggccaaggccactgttttgctagggccccagggcccacatttgggaaagttcttgatgtaggaaagggtgaaaaagcccaaatgctgctgtggttcaaccaggcaagatcatccggtgaaagaaccagtccctgggccccaaggatgccggggaaacaggaccttctcctttcctggagctggtttagctggatatgggagggggtttggctgcctgtgcccaggagctagactgccttgaggctgctgtcctttcacagccatggagtagaggcctaagttgacactgccctgggcagacaagacaggagctgtcgccccaggcctgtgctgcccagccaggaaccctgtactgctgctgcgacctgatgctgccagtctgttaaaataaagataagagacttggactccaga

SEQ ID NO: 185854 - DNA, 1645 bp, Homo sapiens
  Payload ID: 16594
  Gene Symbol: SMPD2
  Gene Name: sphingomyelin phosphodiesterase 2, neutral membrane (neutral sphingomyelinase)
  Uniprot ID: O60906
  ENST ID: ENST00000258052
  CDS Start-End: 360-1631
gcggccgcgaccgccggggacgagcttggaggaaaaggaaccgggagccgcccacccgggggcgctctccggacccccagggtcctagcgcgcggcccttaccgagcctgggcgcccggatttcggcagcggatcgcctttccgggttggcggcccgcctgattgggaacagccggccggttgccgggggaacgcgggagtcgggcccgacctgagccacgcgggcttggtgcccacctgtgcgcgccgcctgcgaagaaggaacggtctggggagaaggcgccgccggccgcccccgtccccaccgcggccgtcgctggagagttcgagccgcctagcgcccctggagctccccaaccatgaagcccaacttctccctgcgactgcggatcttcaacctcaactgctggggcattccgtacttgagcaagcaccgggccgaccgcatgaggcgcctgggagactttctgaaccaggagagcttcgacctggctttgctggaggaggtgtggagtgagcaggacttccagtacctgagacagaagctgtcacctacctacccagctgcacaccacttccggagcggaatcattggcagtggcctctgtgtcttctccaaacatccaatccaggagcttacccagcacatctacactctcaatggctacccctacatgatccatcatggtgactggttcagtgggaaggctgtggggctgctggtgctccatctaagtggcatggtgctcaacgcctatgtgacccatctccatgccgaatacaatcgacagaaggacatctacctagcacatcgtgtggcccaagcttgggaattggcccagttcatccaccacacatccaagaaggcagacgtggttctgttgtgtggagacctcaacatgcacccagaagacctgggctgctgcctgctgaaggagtggacagggcttcatgatgcctatcttgaaactcgggacttcaagggctctgaggaaggcaacacaatggtacccaagaactgctacgtcagccagcaggagctgaagccatttccctttggtgtccgcattgactacgtgctttacaaggcagtttctgggttttacatctcctgtaagagttttgaaaccactacaggctttgaccctcacaggggcacccccctctctgatcatgaagccctgatggctactctgtttgtgaggcacagccccccacagcagaaccccagctctacccacggaccagcagagaggtcgccgttgatgtgtgtgctaaaggaggcctggacggagctgggtctgggcatggctcaggctcgctggtgggccaccttcgctagctatgtgattggcctggggctgcttctcctggcactgctgtgtgtcctggcggctggaggaggggccggggaagctgccatactgctctggacccccagtgtagggctggtgctgtgggcaggtgcattctacctcttccacgtacaggaggtcaatggcttatatagggcccaggctgagctccagcatgtgctaggaagggcaagggaggcccaggatctgggcccagagcctcagccagccctactcctggggcagcaggagggggacagaactaaagaacaataaagcttggcccttta

SEQ ID NO: 185855 - DNA, 613 bp, Homo sapiens
  Payload ID: 16594
  Gene Symbol: SMPD2
  Gene Name: sphingomyelin phosphodiesterase 2, neutral membrane (neutral sphingomyelinase)
  ENST ID: ENST00000458487
  CDS Start-End: 1-613
acatctacctagcacatcgtgtggcccaagcttgggaattggcccagttcatccagtgtgtgagcctgggcttgaaatgggaagtgggatgggacccaggggctgagggtgaacaaggccccagtcatggggaagagctggtgatggaagaactcccgcctcaccaacctggttcccccagccacacatccaagaaggcagacgtggttctgttgtgtggagacctcaacatgcacccagaagacctgggctgctgcctgctgaaggagtggacagggcttcatgatgcctatcttgaaactcgggacttcaagggctctgaggaaggcaacacaatggtacccaagaactgctacgtcagccagcaggagctgaagccatttccctttggtgtccgcattgactacgtgctttacaaggcagtttctgggttttacatctcctgtaagagttttgaaaccactacaggctttgaccctcacaggggcacccccctctctgatcatgaagccctgatggctactctgtttgtgaggcacagccccccacagcagaaccccagctctacccacggaccagcagagaggtcgccgttgatgtgtgtgctaaagga

SEQ ID NO: 185856 - DNA, 5453 bp, Homo sapiens
  Payload ID: 16595
  Gene Symbol: SMPD3
  Gene Name: sphingomyelin phosphodiesterase 3, neutral membrane (neutral sphingomyelinase II)
  Uniprot ID: Q9NY59
  ENST ID: ENST00000219334
  CDS Start-End: 605-2572
ggtctctgggggatgtggtcttgaaggagagacccaggaacctgcgggcggggccggagggagaggggaggacgcccccaatgggcagactcctgggcggggtccgggtcaccattggctccggcggcgcgagggaggcggggtcagaggaatgaagcgcggagctgttcgccgctccaggtgctgagtctgagggaggctccggacccgagagccgcgagagccgccgccgctgcggccgccgccagatctgcggccgggagcccgggctgtgaggagccgggaggagcggggtgcgctgccgggcgctgaccgccctcccgcccgccgtcagaggtctgcggtgacagctcttcttcagagagaaggacaacaaggtcccagtggcccctcctcagggtctgcagtaggcctccgcatggcccaccgaggtgaaccatgaccggctggccaacattcgccattgaccagccggagttgcatctcgccaggaggtgacccctcctccagctgcccccaactcgcccaccctcgcccaggaaagtgcccgcagctgccacggacaccatgtagtagggccggctgcggcgcccagtgagctgcgatggttttgtacacgaccccctttcctaacagctgtctgtccgccctgcactgtgtgtcctgggcccttatctttccatgctactggctggtggaccggctcgctgcctccttcatacccaccacctacgagaagcgccagcgggcagacgacccgtgctgcctgcagctgctctgcactgccctcttcacgcccatctacctggccctcctggtggcctcgctgccctttgcgtttctcggctttctcttctggtccccactgcagtcggcccgccggccctacatctattcacggctggaagacaagggcctggccggtggggcagccctgctcagtgaatggaagggcacggggcctggcaaaagcttctgctttgccactgccaacgtctgcctcctgcccgactcactcgccagggtcaacaacctttttaacacccaagcgcgggccaaggagatcgggcagagaatccgcaatggggccgcccggccccagatcaaaatttacatcgactcccccaccaatacctccatcagcgccgctagcttcagcagcctggtgtcaccacagggcggcgatggggtggcccgggccgtccccgggagcattaagaggacagcctctgtggagtacaagggtgacggtgggcggcaccccggtgacgaggctgccaacggcccagcctctggggaccctgtcgacagcagcagcccggaggatgcctgcatcgtgcgcatcggtggcgaggagggcggccggccacctgaagctgacgaccctgtgcctgggggccaggccaggaacggagctggcgggggcccaaggggccagacgcccaaccataatcagcaggacggggattcagggagcctgggcagcccctcggcctcccgggagtccctggtgaaggggcgagctgggccagacaccagtgccagcggggagccaggtgccaacagcaagctcctgtacaaggcctcggtggtgaagaaggcggctgcacgcaggaggcggcaccccgacgaggccttcgaccatgaggtctccgccttcttccccgccaacctggacttcctgtgcctgcaggaggtgtttgacaagcgagcagccaccaaattgaaagagcagctgcacggctacttcgagtacatcctgtacgacgtcggggtctacggctgccagggctgctgcagcttcaagtgtctcaacagcggcctcctctttgccagccgctaccccatcatggacgtggcctatcactgttaccccaacaagtgtaacgacgatgccctggcctctaagggagctctgtttctcaaggtgcaggtgggaagcacacctcaggaccaaagaatcgtcgggtacatcgcctgcacacacctgcatgccccgcaagaggacagcgccatccggtgtgggcagctggacctgcttcaggactggctggctgatttccgaaaatctacctcctcgtccagcgcagccaaccccgaggagctggtggcatttgacgtcgtctgtggagatttcaactttgataactgctcctctgacgacaagctggagcagcaacactccctgttcacccactacagggacccctgccgcctggggcctggtgaggagaagccgtgggccatcggtactctgctggacacgaacggcctgtacgatgaggatgtgtgcacccccgacaacctgcagaaggtcctggagagtgaggagggccgcagggagtacctggcgtttcccaccagcaagagctcgggccagaaggggcggaaggagctgctgaagggcaacggccggcgcatcgactacatgctgcatgcagaggaggggctgtgcccagactggaaggccgaggtggaagaattcagttttatcacccagctgtccggcctgacggaccacctgccagtagccatgcgactgatggtgtcttcgggggaggaggaggcatagaccgtccggagcagcggggcctctgccagcccttgcagctgcagcccatccctgggccatgtcccctccatcgagtgcccggtgcttgggggaggagggcagggacagggagggagccacagtcagtgcccgggaacctggaagctgcgctgctctgcgcctctgggcctcactgtggacagaggagtcaggcccgccccaggagcctccagctgcctaaccagtgccattctttcacaacacgattttctacaaatctacagcacaaccgagtttgtaacccgtgggttagtatgaggaccgggttcgtgtactctctgtatctcctcttaagcttcgtccagggttctttatttttgtctgctgccaatgtcgtctcgcatgcctgcaccctcgcatgcacgctgcccgcatgccacgtgccacgctgtagccacagaccccttgctcgggcctcacccaaggccaaactccaaacacaatcagaaccagccaaagaagcacttcctgggcacggccaccagctctcccgcctccagtgtgggccggctcctgcagggtccgagggctgcatctctaccagccagcccagggctcttcccagggtctcgcattcaagggcaattacattttaaaaagaaaaacagaaaaaggttaatcacaaaaccaaccctcacttcacagggtctgtaagtcactcatagaactttgctcttcccgagacagggtcccttccccagctcaggcacaacagagtctggcaggctctggcaccctgggcctcctccgggagcctcccatctgggcagtggagccataaacggggatccgagaagagagtatccacttttttttttacaggaagaagggactcacagcataaacgggggtgggggggatcctgattttgaaaataatctatttgtagcttctcttctatcaaaaccaacacatcctcttctttctgccaatcctctcccccacgggacacctctctggttcgggaccaatccctccctggggacgtgccccacctgcgtgccggctgagctcaggaacccctgcctgccccccgggtggggctgcggctctggcctcccaggcccatcctcaacagctaccccagccaacaccaaggccacaaggggaccccggcctaggaggcaggaagccaaggtgcagagagcagcctggccctcaccagtgcgcaagctggggcagcaaggctgacagttgctgcatgcccagggcagggtgtggtactggcacccaagttcagcatggcagagctggccaacagcttgtggtccccgatctgcctccagccccaagatgcctacagcccccaggccccttcggcagcactgcctctgcccacctgcctttaagagactccagggctgctcctgtcatgcagcgaaggttttgtctgtttcaaagttcgagactcaacttgagggactgtttttgacaatccccgctgacctccgctcctcgtggcgccctggccctacacccagcctggcccagggccggctttgcctggtgaggctggagggagcaccaggacctgctgtctgctgtcagcccctcctggtgctggtgccctgatgctgtgccttgtcacccattgagctgcaagagggaccaagagggggccacgcagccagccagatgcctggccctgtgctggggcagacaacgctgcagagcccagggagcctggcgctaggacgtgcgtccttgtgacactggcctgtctgaactcacctggcctgggaagcaccgtctgcccgggcccaagccctgcccctccagagtccagagccaggaaggggctgctgagggcgagcatcctgctgggctctctgcccggcccacccctccaaggggctggcctgtgagccttgactgggattcatgatgtggaggcccccaacttccagaagcagctggtactctgctcacacaagcgactgggccggccggccctggacccctagaccccgagccgcctgccgactgcctgcacagggagagcagttgaggcccgggcagggcccccacaccagaccccaacatagcttccccacccaggcaccccctcccggggcagcaggcgtgggagtcagggctgcatgctcctcccctcccacctcacaggcggccttaggcaagtcattttctgtcatcacaaggtcgcctctgcctagtcaggtcctggggtccagagtaaggatgtgcggcccccaggcccccgcacacctccctcagcaccaagaccgggacccccccacccacgtgtctcattgtggctgcctatggactcccgggccttgtgtgcaggccaggcccttccactgattttttaaagtgaaccattgctggatctcagattctgtggcatctaaggcctagcaggggtgggcacacgggtcacccgaggcccataccaagactctgttcctgccctaggcccagtctcaaaggaagccacaaggcgcgggggccactgaggaaggaaatgttcattttcatttgtccaaaaccaccttaagttttaagtatattaatcttgatgctttttaactattgctttttaacttgctgagatttagaaatactgttataaaaacttttttaatttctgtatttttttctgtattgtatcttcatgggacattaggggttttctatggtaagcacacctatggttttggtaaaaacattatcaaatatatatccagacggttcttccctagaagaaaaacaagtctttacacctgataaaatattttgcgaagagaggtgttctttttccttactggtgctgaaaggaaggatggataacgaggagaaaataaaactgtgaggctcaagg

SEQ ID NO: 185857 - DNA, 2093 bp, Homo sapiens
  Payload ID: 16595
  Gene Symbol: SMPD3
  Gene Name: sphingomyelin phosphodiesterase 3, neutral membrane (neutral sphingomyelinase II)
  Uniprot ID: Q9NY59
  ENST ID: ENST00000563226
  CDS Start-End: 78-2021
accctcgcccaggaaagtgcccgcagctgccacggacaccatgtagtagggccggctgcggcgcccagtgagctgcgatggttttgtacacgaccccctttcctaacagctgtctgtccgccctgcactgtgtgtcctgggcccttatctttccatgctactggctggtggaccggctcgctgcctccttcatacccaccacctacgagaagcgccagcgggcagacgacccgtgctgcctgcagctgctctgcactgccctcttcacgcccatctacctggccctcctggtggcctcgctgccctttgcgtttctcggctttctcttctggtccccactgcagtcggcccgccggccctacatctattcacggctggaagacaagggcctggccggtggggcagccctgctcagtgaatggaagggcacggggcctggcaaaagcttctgctttgccactgccaacgtctgcctcctgcccgactcactcgccagggtcaacaacctttttaacacccaagcgcgggccaaggagatcgggcagagaatccgcaatggggccgcccggccccagatcaaaatttacatcgactcccccaccaatacctccatcagcgccgctagcttcagcagcctggtgtcaccacagggcggcgatggggtggcccgggccgtccccgggagcattaagaggacagcctctgtggagtacaagggtgacggtgggcggcaccccggtgacgaggctgccaacggcccagcctctggggaccctgtcgacagcagcagcccggaggatgcctgcatcgtgcgcatcggtggcgaggagggcggccggccacctgaagctgacgaccctgtgcctgggggccaggccaggaacggagctggcgggggcccaaggggccagacgcccaaccataatcagcaggacggggattcagggagcctgggcagcccctcggcctcccgggagtccctggtgaaggggcgagctgggccagacaccagtgccagcggggagccaggtgccaacagcaagctcctgtacaaggcctcggtggtgaagaaggcggctgcacgcaggaggcggcaccccgacgaggccttcgaccatgaggtctccgccttcttccccgccaacctggacttcctgtgcctgcaggaggtgtttgacaagcgagcagccaccaaattgaaagagcagctgcacggctacttcgagtacatcctgtacgacgtcggggtctacggctgccagggctgctgcagcttcaagtgtctcaacagcggcctcctctttgccagccgctaccccatcatggacgtggcctatcactgttaccccaacaagtgtaacgacgatgccctggcctctaagggagctctgtttctcaaggtgcaggtgggaagcacacctcaggaccaaagaatcgtcgggtacatcgcctgcacacacctgcatgccccgcaagaggacagcgccatccggtgtgggcagctggacctgcttcaggactggctggctgatttccgaaaatctacctcctcgtccagcgcagccaaccccgaggagctggtggcatttgacgtcgtctgtggagatttcaactttgataactgctcctctgacgacaagctggagcagcaacactccctgttcacccactacagggacccctgccgcctggggcctggtactctgctggacacgaacggcctgtacgatgaggatgtgtgcacccccgacaacctgcagaaggtcctggagagtgaggagggccgcagggagtacctggcgtttcccaccagcaagagctcgggccagaaggggcggaaggagctgctgaagggcaacggccggcgcatcgactacatgctgcatgcagaggaggggctgtgcccagactggaaggccgaggtggaagaattcagttttatcacccagctgtccggcctgacggaccacctgccagtagccatgcgactgatggtgtcttcgggggaggaggaggcatagaccgtccggagcagcggggcctctgccagcccttgcagctgcagcccatccctgggccatgtcccctccatc

SEQ ID NO: 185858 - DNA, 627 bp, Homo sapiens
  Payload ID: 16595
  Gene Symbol: SMPD3
  Gene Name: sphingomyelin phosphodiesterase 3, neutral membrane (neutral sphingomyelinase II)
  ENST ID: ENST00000561749
  CDS Start-End: 347-627
aggctccggacccgagagccgcgagagccgccgccgctgcggccgccgccagatctgcggccgggagcccgggctgtgaggagccgggaggagcggggtgcgctgccgggcgctgaccgccctcccgcccgccgtcagagggtctgcagtaggcctccgcatggcccaccgaggtgaaccatgaccggctggccaacattcgccattgaccagccggagttgcatctcgccaggaggtgacccctcctccagctgcccccaactcgcccaccctcgcccaggaaagtgcccgcagctgccacggacaccatgtagtagggccggctgcggcgcccagtgagctgcgatggttttgtacacgaccccctttcctaacagctgtctgtccgccctgcactgtgtgtcctgggcccttatctttccatgctactggctggtggaccggctcgctgcctccttcatacccaccacctacgagaagcgccagcgggcagacgacccgtgctgcctgcagctgctctgcactgccctcttcacgcccatctacctggccctcctggtggcctcgctgccctttgcgtttctcggctttctcttctggtccccactgcagtcggcccgccggcc

SEQ ID NO: 185859 - DNA, 2073 bp, Homo sapiens
  Payload ID: 16595
  Gene Symbol: SMPD3
  Gene Name: sphingomyelin phosphodiesterase 3, neutral membrane (neutral sphingomyelinase II)
  ENST ID: ENST00000568373
  CDS Start-End: 78-1994
accctcgcccaggaaagtgcccgcagctgccacggacaccatgtagtagggccggctgcggcgcccagtgagctgcgatggttttgtacacgaccccctttcctaacagctgtctgtccgccctgcactgtgtgtcctgggcccttatctttccatgctactggctggtggaccggctcgctgcctccttcatacccaccacctacgagaagcgccagcgggcagacgacccgtgctgcctgcagctgctctgcactgccctcttcacgcccatctacctggccctcctggtggcctcgctgccctttgcgtttctcggctttctcttctggtccccactgcagtcggcccgccggccctacatctattcacggctggaagacaagggcctggccggtggggcagccctgctcagtgaatggaagggcacggggcctggcaaaagcttctgctttgccactgccaacgtctgcctcctgcccgactcactcgccagggtcaacaacctttttaacacccaagcgcgggccaaggagatcgggcagagaatccgcaatggggccgcccggccccagatcaaaatttacatcgactcccccaccaatacctccatcagcgccgctagcttcagcagcctggtgtcaccacagggcggcgatggggtggcccgggccgtccccgggagcattaagaggacagcctctgtggagtacaagggtgacggtgggcggcaccccggtgacgaggctgccaacggcccagcctctggggaccctgtcgacagcagcagcccggaggatgcctgcatcgtgcgcatcggtggcgaggagggcggccggccacctgaagctgacgaccctgtgcctgggggccaggccaggaacggagctggcgggggcccaaggggccagacgcccaaccataatcagcaggacggggattcagggagcctgggcagcccctcggcctcccgggagtccctggtgaaggggcgagctgggccagacaccagtgccagcggggagccaggtgccaacagcaagctcctgtacaaggcctcggtggtgaagaaggcggctgcacgcaggaggcggcaccccgacgaggccttcgaccatgaggtctccgccttcttccccgccaacctggacttcctgtgcctgcaggaggtgtttgacaagcgagcagccaccaaattgaaagagcagctgcacggctacttcgagtacatcctgtacgacgtcggggtctacggctgccagggctgctgcagcttcaagtgtctcaacagcggcctcctctttgccagccgctaccccatcatggacgtggcctatcactgttaccccaacaagtgtaacgacgatgccctggcctctaagggagctctgtttctcaaggtgcaggtgggaagcacacctcaggaccaaagaatcgtcgggtacatcgcctgcacacacctgcatgccccgcaagaggacagcgccatccggtgtgggcagctggacctgcttcaggactggctggctgatttccgaaaatctacctcctcgtccagcgcagccaaccccgaggagctggtggcatttgacgtcgtctgtggagatttcaactttgataactgctcctctgacgacaagctggagcagcaacactccctgttcacccactacagggacccctgccgcctggggcctggtgaggagaagccgtgggccatcggtactctgctggacacgaacggcctgtacgatgaggatgtgtgcacccccgacaacctgcagaacaagagctcgggccagaaggggcggaaggagctgctgaagggcaacggccggcgcatcgactacatgctgcatgcagaggaggggctgtgcccagactggaaggccgaggtggaagaattcagttttatcacccagctgtccggcctgacggaccacctgccagtagccatgcgactgatggtgtcttcgggggaggaggaggcatagaccgtccggagcagcggggcctctgccagcccttgcagctgcagcccatccctgggccatgtcccctccatcgagtgcc

SEQ ID NO: 185860 - DNA, 1755 bp, Homo sapiens
  Payload ID: 16595
  Gene Symbol: SMPD3
  Gene Name: sphingomyelin phosphodiesterase 3, neutral membrane (neutral sphingomyelinase II)
  ENST ID: ENST00000574662
  CDS Start-End: 1-622
ggctgccagggctgctgcagcttcaagtgtctcaacagcggcctcctctttgccagccgctaccccatcatggacgtggcctatcactgttaccccaacaagtgtaacgacgatgccctggcctctaagggagctctgtttctcaaggtgcaggtgggaagcacacctcaggaccaaagaatcgtcgggtacatcgcctgcacacacctgcatgccccgcaagaggacagcgccatccggtgtgggcagctggacctgcttcaggactggctggctgatttccgaaaatctacctcctcgtccagcgcagccaaccccgaggagctggtggcatttgacgtcgtctgtggagatttcaactttgataactgctcctctgacgacaagctggagcagcaacactccctgttcacccactacagggacccctgccgcctggggcctggtgaggagaagccgtgggccatcggtactctgctggacacgaacggcctgtacgatgaggatgtgtgcacccccgacaacctgcagaaggtcctggagagtgaggagggccgcagggagtacctggcgtttcccaccagcaagagctcgggccagaaggggcggaaggagctgctgaagggcaacggccggcgcatcgactacatgctgcatgcagaggaggggctgtgcccagactggaaggccgtgagtcaggagggcccagcagccagggccatgcaaagagagagcagggcccgggccctgcagctctcgacagccgctccctgaaaccccacgccccaggccactcttacaatgatacccatcactccctcagacccttagggccccaggtcctccaggccccatccctctgactgcaggaaggtcccagcccaccccagccccggggcctcactttggggatccccaggccgctccctgcaagatgcccttggaatctgaccaggctgtttctcccctctcccactcaccccaggaggtggaagaattcagttttatcacccagctgtccggcctgacggaccacctgccagtagccatgcgactgatggtgtcttcgggggaggaggaggcatagaccgtccggagcagcggggcctctgccagcccttgcagctgcagcccatccctgggccatgtcccctccatcgagtgcccggtgcttgggggaggagggcagggacagggagggagccacagtcagtgcccgggaacctggaagctgcgctgctctgcgcctctgggcctcactgtggacagaggagtcaggcccgccccaggagcctccagctgcctaaccagtgccattctttcacaacacgattttctacaaatctacagcacaaccgagtttgtaacccgtgggttagtatgaggaccgggttcgtgtactctctgtatctcctcttaagcttcgtccagggttctttatttttgtctgctgccaatgtcgtctcgcatgcctgcaccctcgcatgcacgctgcccgcatgccacgtgccacgctgtagccacagaccccttgctcgggcctcacccaaggccaaactccaaacacaatcagaaccagccaaagaagcacttcctgggcacggccaccagctctcccgcctccagtgtgggccggctcctgcagggtccgagggctgcatctctaccagccagcccagggctcttcccagggtctcgcattcaagggcaattacattttaaaaagaaaaacagaaaaaggttaatcacaaaacc

SEQ ID NO: 185861 - DNA, 3661 bp, Homo sapiens
  Payload ID: 16596
  Gene Symbol: SMPD4
  Gene Name: sphingomyelin phosphodiesterase 4, neutral membrane (neutral sphingomyelinase-3)
  ENST ID: ENST00000351288
  CDS Start-End: 1-2514
atgacgactttcggcgccgtggcggaatggcggcttccatctctgaggcgagcgacgctatggatcccacagtggtttgctaagaaggccattttcaactctccactggaggctgctatggcgttccctcacctgcagcagcccagctttctactggctagcctgaaagctgactctataaataagccctttgcacagcagtgccaagacttggttaaagtcattgaggactttccagcaaaggagctgcacaccatcttcccatggctggtagaaagcatttttggcagcctagatggtgtcctcgttggctggaacctccgctgcttacaggggcgcgtgaatcctgtggagtacagcatcgtgatggaatttctcgaccctggtggcccaatgatgaagttggtttataagcttcaagctgaagactataagttcgactttcctgtctcctacttgcctggtcctgtgaaggcgtccatccaggagtgcatcctccctgacagtcctctgtaccacaacaaggtccagttcacccctactgggggccttggtctgaacttggccctgaatccgttcgagtattacatattcttctttgccttgagcctcatcactcagaagccacttcctgtgtccctccacgtccgtacttcagactgtgcctatttcatcctggtggacaggtacctgtcatggttcctgcccaccgaaggcagtgtgcccccaccactctcctccagcccaggggggaccagcccctcaccacctcccaggacaccagccataccctttgcttcctatggcctccaccacactagcctcctaaagcgacacatctctcatcagacgtctgtgaatgcagaccccgcctcccacgagatctggaggtcagaaactctgctccaggtttttgttgaaatgtggcttcatcactattccttggagatgtatcaaaaaatgcagtcccctcatgccaaggagtcgttcacgcctactgaggagcatgtgttggtggtgcgcctgctgctgaagcacctgcacgcctttgccaacagcctgaagccagagcaggcctcaccctccgcccactcccacgccaccagccccctggaggagttcaaacgggctgctgtcccgaggttcgtccagcagaaactctacctcttcttgcagcattgctttggccactggcccctggacgcatcgttcagagctgtcctggagatgtggctgagctacctgcagccgtggcggtacgcgcctgacaagcaggctccgggcagcgactcccagccccggtgtgtgtcggagaaatgggcaccctttgtccaggagaacctgctgatgtacaccaagttgtttgtgggctttctgaaccgcgcgctccgcacagacctggtcagccccaagcacgcgctcatggtgttccgagtggccaaagtctttgcccagcccaacctggctgagatgattcagaaaggtgagcagctattcctggagccagagctggtcatcccccaccgccagcaccgactcttcacggcccccacattcactgggagcttcctgtcaccctggccaccagcggtcactgatgcctccttcaaggtgaagagccacgtctacagcctggagggccaggactgcaagtacaccccgatgtttgggcccgaggcccgcaccctggtcctgcgcctcgctcagctcatcacacaggccaaacacacagccaagtccatctccgaccagtgtgcggagagcccggctggccactccttcctctcatggctgggctttagctccatggacaccaatggctcctacacagccaacgacctggacgagatggggcaagacagtgtccggaagacagatgaatacctggagaaggccctggagtacctgcgccagatattccggctcagcgaagcgcagctcaggcagttcacactcgccttgggcaccacccaggatgagaatggaaaaaagcaactccccgactgcatcgtgggtgaggacggactcatccttacgcccctggggcggtaccagatcatcaatgggctgcgaaggtttgaaattgagtaccagggggacccggagctgcagcccatccggagctatgagatcgccagcttggtccgcacactctttaggctgtcgtctgccatcaaccacagatttgcaggacagatggcggctctgtgttcccgggatgacttcctcggcagcttctgtcgctaccacctcacagaacctgggctggccagcaggcacctgctgagccctgtggggcggaggcaggtggccggccacacccgcggccccaggctcagcctgcgcttcctgggcagttaccggacgctggtctcgctgctgctggccttcttcgtggcctctctgttctgcgtcgggcccctcccatgcacgctgctgctcaccctgggctatgtcctctacgcctctgccatgacactgctgaccgagcgggggaagctgcaccagccctgaaggtgtcagctgccttcagagcaggctggagggatttgccacacagccccacccttgggctgagaggacctgggaagcccctccaggagggaacacggtcatcctcgggcttctggagcggggttcctgcagccgcagaggcatctggaggaaacgcaaccaagaaaggaaggcaggtgggccccagcaaaggagtagctgccagggctcaacagctacgctctgtgacagcgcagagctcagcggcggcctttccctccctccgccaaggactcacggccaagccagctctcggggccttttttccactgcccatttggctactctgctgcaccaagcttgggagccagcctgccaacagccacctgggcctggcctccccactggctggccttgaggttggcagagtgggttgtggcgcttcctctctctgtgtgggaccaggacagtggcttaagtctccactccaggaaagaatcaaagtttctagagttgtgagaaaaccagagagtggctgtcctgattcttcactgtgaggggcgttcttcatgttctcccagctgttccaagactgggccgtagaattccatgtttcaggagcctaagaccctcccagagcccaggggcttcaccgcagaccccaagccattgagcacatcacccaaagcagtggccaacatcgcggacccctgtgccttgtcacagatgggtgctggtcctcaggcgttggggacactgctgggtcgatggggtcggattctgccagtttctgctctgcagccaaagatggtcagaagcattgtcacttcagtaacatcaagtgctcaaagacatggcaaccgttcagtggtacttaagtattcaaaatatacaactacagattctctgacagaaaccagcacggggtcttcaccttcattcaccccacaggcgacatgcgagggagaacagcatctcagtggtgatttccaaaccaagcctttgttttcggtgtggggttttgggggtttgctttaatgtttttgaaattgtaaatgttgggctttgtattttgatgtaaactgagcataatggcattttagggcctgtgaccaaaaatgaagcttgtaacgaccatggatctgaataaacatgtccttgcttctga

SEQ ID NO: 185862 - DNA, 4896 bp, Homo sapiens
  Payload ID: 16596
  Gene Symbol: SMPD4
  Gene Name: sphingomyelin phosphodiesterase 4, neutral membrane (neutral sphingomyelinase-3)
  ENST ID: ENST00000409031
  CDS Start-End: 1150-3750
gggcagagacacggccgcagggtcctggggctcgctcgctagcctctgcccggcacacatggacttgagcatctggaagacggcgaggggggccacgttcagcttcagcaggtccaccaggatcctggcggggacagacgcggggccggtgagccctctccgcccggcgcggccacctccctgaagacccgacaaggacgggggcgggggctcctcccgaccagcgggccgggcgtacccggaaagcagaggtcggggggtgtctggctagcatgcggcccccacccgccccgctcacttgaacacgtcggggtcgatagcgccgcccgccgcctgcgccagctcgtacagctccatctcctcggtgctcagcaccttcttccgccgcagcgccagcttctgccgggccgcctccagccccgggggcgccgccgaccccggcccaggccctacgccctgcgccgccatccccgcggcccgcggaaaggtgcgctccgccccgccgcgccccctagcggctgcgcccaccaccctctccctgcagcgtcaacgtctggcctcccgggctgccctggcgggaggggcgggagcgcggggacggggccgcctccgcggcgtcattgaagcccaacagttattgggcgctcacggtgtgctgagcggcgctctaggagccgggagtggcatggcggaccgcaggggtccgctgcttggcgatctgggcctccctgatagactgcattggtcgtgctcgcttaggtggcagcacccagcccagtgccaggcatacattgggcgctcggtaaatgcctctttcaagaaagcgtgcaattttctggtccgcaccggtgcaccactaggggtcgcttttcggggcgggcggggggaaggggggggcactaatcaacaatactgcttacgcgcacgcggattccttgctggggagaaagtaccttggggcgccggaggccgccacaacgcaggcgcattcagctaaggaccactccctcccccgcactcctgcctcgccatttctcttccccgcccggccggccttcgctttgcgcacgcgccttttgaggtaacggcccaaagaggtggaagcgcttttcccgcccggccgcggggcgtggctctgcgcgcagcttgatgacgactttcggcgccgtggcggaatggcggcttccatctctgaggcgagcgacgctatggatcccacagtggtttgctaagaaggccattttcaactctccactggaggctgctatggcgttccctcacctgcagcagcccagctttctactggctagcctgaaagctgactctataaataagccctttgcacagcagtgccaagacttggttaaagtcattgaggactttccagcaaaggagctgcacaccatcttcccatggctggtagaaagcatttttggcagcctagatggtgtcctcgttggctggaacctccgctgcttacaggggcgcgtgaatcctgtggagtacagcatcgtgatggaatttctcgaccctggtggcccaatgatgaagttggtttataagcttcaagctgaagactataagttcgactttcctgtctcctacttgcctggtcctgtgaaggcgtccatccaggagtgcatcctccctgacagtcctctgtaccacaacaaggtccagttcacccctactgggggccttggtctgaacttggccctgaatccgttcgagtattacatattcttctttgccttgagcctcatcactcagaagccacttcctgtgtccctccacgtccgtacttcagactgtgcctatttcatcctggtggacaggtacctgtcatggttcctgcccaccgaaggcagtgtgcccccaccactctcctccagcccaggggggaccagcccctcaccacctcccaggacaccagccataccctttgcttcctatggcctccaccacactagcctcctaaagcgacacatctctcatcagacgtctgtgaatgcagaccccgcctcccacgagatctggaggtcagaaactctgctccaggtttttgttgaaatgtggcttcatcactattccttggagatgtatcaaaaaatgcagtcccctcatgccaagctggaggttctgcactaccgactcagtgtctccagcgccctctacagccccgcccaacccagcctccaggccctccacgcctaccaagagtcgttcacgcctactgaggagcatgtgttggtggtgcgcctgctgctgaagcacctgcacgcctttgccaacagcctgaagccagagcaggcctcaccctccgcccactcccacgccaccagccccctggaggagttcaaacgggctgctgtcccgaggttcgtccagcagaaactctacctcttcttgcagcattgctttggccactggcccctggacgcatcgttcagagctgtcctggagatgtggctgagctacctgcagccgtggcggtacgcgcctgacaagcaggctccgggcagcgactcccagccccggtgtgtgtcggagaaatgggcaccctttgtccaggagaacctgctgatgtacaccaagttgtttgtgggctttctgaaccgcgcgctccgcacagacctggtcagccccaagcacgcgctcatggtgttccgagtggccaaagtctttgcccagcccaacctggctgagatgattcagaaaggtgagcagctattcctggagccagagctggtcatcccccaccgccagcaccgactcttcacggcccccacattcactgggagcttcctgtcaccctggccaccagcggtcactgatgcctccttcaaggtgaagagccacgtctacagcctggagggccaggactgcaagtacaccccgatgtttgggcccgaggcccgcaccctggtcctgcgcctcgctcagctcatcacacaggccaaacacacagccaagtccatctccgaccagtgtgcggagagcccggctggccactccttcctctcatggctgggctttagctccatggacaccaatggctcctacacagccaacgacctggacgagatggggcaagacagtgtccggaagacagatgaatacctggagaaggccctggagtacctgcgccagatattccggctcagcgaagcgcagctcaggcagttcacactcgccttgggcaccacccaggatgagaatggaaaaaagcaactccccgactgcatcgtgggtgaggacggactcatccttacgcccctggggcggtaccagatcatcaatgggctgcgaaggtttgaaattgagtaccagggggacccggagctgcagcccatccggagctatgagatcgccagcttggtccgcacactctttaggctgtcgtctgccatcaaccacagatttgcaggacagatggcggctctgtgttcccgggatgacttcctcggcagcttctgtcgctaccacctcacagaacctgggctggccagcaggcacctgctgagccctgtggggcggaggcaggtggccggccacacccgcggccccaggctcagcctgcgcttcctgggcagttaccggacgctggtctcgctgctgctggccttcttcgtggcctctctgttctgcgtcgggcccctcccatgcacgctgctgctcaccctgggctatgtcctctacgcctctgccatgacactgctgaccgagcgggggaagctgcaccagccctgaaggtgtcagctgccttcagagcaggctggagggatttgccacacagccccacccttgggctgagaggacctgggaagcccctccaggagggaacacggtcatcctcgggcttctggagcggggttcctgcagccgcagaggcatctggaggaaacgcaaccaagaaaggaaggcaggtgggccccagcaaaggagtagctgccagggctcaacagctacgctctgtgacagcgcagagctcagcggcggcctttccctccctccgccaaggactcacggccaagccagctctcggggccttttttccactgcccatttggctactctgctgcaccaagcttgggagccagcctgccaacagccacctgggcctggcctccccactggctggccttgaggttggcagagtgggttgtggcgcttcctctctctgtgtgggaccaggacagtggcttaagtctccactccaggaaagaatcaaagtttctagagttgtgagaaaaccagagagtggctgtcctgattcttcactgtgaggggcgttcttcatgttctcccagctgttccaagactgggccgtagaattccatgtttcaggagcctaagaccctcccagagcccaggggcttcaccgcagaccccaagccattgagcacatcacccaaagcagtggccaacatcgcggacccctgtgccttgtcacagatgggtgctggtcctcaggcgttggggacactgctgggtcgatggggtcggattctgccagtttctgctctgcagccaaagatggtcagaagcattgtcacttcagtaacatcaagtgctcaaagacatggcaaccgttcagtggtacttaagtattcaaaatatacaactacagattctctgacagaaaccagcacggggtcttcaccttcattcaccccacaggcgacatgcgagggagaacagcatctcagtggtgatttccaaaccaagcctttgttttcggtgtggggttttgggggtttgctttaatgtttttgaaattgtaaatgttgggctttgtattttgatgtaaactgagcataatggcattttagggcctgtgaccaaaaatgaagcttgtaacgaccatggatctgaataaacatgtccttgcttctg

SEQ ID NO: 185863 - DNA, 842 bp, Homo sapiens
  Payload ID: 16596
  Gene Symbol: SMPD4
  Gene Name: sphingomyelin phosphodiesterase 4, neutral membrane (neutral sphingomyelinase-3)
  ENST ID: ENST00000435455
  CDS Start-End: 330-596
tcttctttgccttgagcctcatcactcagaagccacttcctgtgtccctccacgtccgtacttcagactgtgcctatttcatcctggtggacaggtacctgtcatggttcctgcccaccgaaggcagtgtgcccccaccactctcctccagcccaggggggaccagcccctcaccacctcccaggacaccagccataccctttgcttcctatggcctccaccacactagcctcctaaagcgacacatctctcatcagacgtctgtgaatgcagaccccgcctcccacgagatctggaggtcagaaactctgctccaggtttttgttgaaatgtggcttcatcactattccttggagatgtatcaaaaaatgcagtcccctcatgccaaggagtcgttcacgcctactgaggagcatgtgttggtggtgcgcctgctgctgaagcacctgcacgcctttgccaacagcctgaagccagagcaggcctcaccctccgcccactcccacgccaccagccccctggaggagttcaaacgcattgctttggccactggcccctggacgcatcgttcagagctgtcctggagatgtggctgagctacctgcagccgtggcggtacgcgcctgacaagcaggctccgggcagcgactcccagccccggtgtgtgtcggagaaatgggcaccctttgtccaggagaacctgctgatgtacaccaagttgtttgtgggctttctgaaccgcgcgctccgcacagacctggtcagccccaagcacgcgctcatggtgttccgagtggccaaagtctttgcccagcccaacctggctgagatgattcagaaag

SEQ ID NO: 185864 - DNA, 940 bp, Homo sapiens
  Payload ID: 16596
  Gene Symbol: SMPD4
  Gene Name: sphingomyelin phosphodiesterase 4, neutral membrane (neutral sphingomyelinase-3)
  ENST ID: ENST00000457039
  CDS Start-End: 1-940
aaacgggctgctgtcccgaggttcgtccagcagaaactctacctcttcttgcagcattgctttggccactggcccctggacgcatcgttcagagctgtcctggagatgtggctgagctacctgcagccgtggcggtacgcgcctgacaagcaggctccgggcagcgactcccagccccggtgtgtgtcggagaaatgggcaccctttgtccaggagaacctgctgatgtacaccaagttgtttgtgggctttctgaaccgcgcgctccgcacagacctggtcagccccaagcacgcgctcatggtgttccgagtggccaaagtctttgcccagcccaacctggctgagatgattcagaaaggtgagcagctattcctggagccagagctggtcatcccccaccgccagcaccgactcttcacggcccccacattcactgggagcttcctgtcaccctggccaccagcggtcactgatgcctccttcaaggtgaagagccacgtctacagcctggagggccaggactgcaagtacaccccgatgtttgggcccgaggcccgcaccctggtcctgcgcctcgctcagctcatcacacaggccaaacacacagccaagtccatctccgaccagtgtgcggagagcccggctggccactccttcctctcatggctgggctttagctccatggacaccaatggctcctacacagccaacgacctggacgagatggggcaagacagtgtccggaagacagatgaatacctggagaaggccctggagtacctgcgccagatattccggtttgcaggacagatggcggctctgtgttcccgggatgacttcctcggcagcttctgtcgctaccacctcacagaacctgggctggccagcaggcacctgctgagccctgtggggcggaggcaggtggccggccacaccc

SEQ ID NO: 185865 - DNA, 3335 bp, Homo sapiens
  Payload ID: 16596
  Gene Symbol: SMPD4
  Gene Name: sphingomyelin phosphodiesterase 4, neutral membrane (neutral sphingomyelinase-3)
  ENST ID: ENST00000433118
  CDS Start-End: 116-286
gacgactttcggcgccgtggcggaatggcggcttccatctctgaggcgagcgacgctatggatcccacagtggtttgctaagaaggccattttcaactctccactggaggctgctatggcgttccctcacctgcagcagcccagctttctactggctagcctgaaagctgactctataaataagccctttgcacagcagtgccaagacttggttaaagtcattgaggactttccagcaaaggacaccagccataccctttgcttcctatggcctccaccacactagcctcctaaagcgacacatctctcatcagacgtctgtgaatgcagaccccgcctcccacgagatctggaggtcagaaactctgctccaggtttttgttgaaatgtggcttcatcactattccttggagatgtatcaaaaaatgcagtcccctcatgccaagctggaggttctgcactaccgactcagtgtctccagcgccctctacagccccgcccaacccagcctccaggccctccacgcctaccaaatggagtctcactccgttgcccaggctggaatgcattgacatggtctcggctcactgcaatctccacctcccagattgaagtgattcttctgcctcagcctcttgagtagctgggattacaggagtcgttcacgcctactgaggagcatgtgttggtggtgcgcctgctgctgaagcacctgcacgcctttgccaacagcctgaagccagagcaggcctcaccctccgcccactcccacgccaccagccccctggaggagttcaaacgggctgctgtcccgaggttcgtccagcagaaactctacctcttcttgcagcattgctttggccactggcccctggacgcatcgttcagagctgtcctggagatgtggctgagctacctgcagccgtggcggtacgcgcctgacaagcaggctccgggcagcgactcccagccccggtgtgtgtcggagaaatgggcaccctttgtccaggagaacctgctgatgtacaccaagttgtttgtgggctttctgaaccgcgcgctccgcacagacctggtcagccccaagcacgcgctcatggtgttccgagtggccaaagtctttgcccagcccaacctggctgagatgattcagaaaggtgagcagctattcctggagccagagctggtcatcccccaccgccagcaccgactcttcacggcccccacattcactgggagcttcctgtcaccctggccaccagcggtcactgatgcctccttcaaggtgaagagccacgtctacagcctggagggccaggactgcaagtacaccccgatgtttgggcccgaggcccgcaccctggtcctgcgcctcgctcagctcatcacacaggccaaacacacagccaagtccatctccgaccagtgtgcggagagcccggctggccactccttcctctcatggctgggctttagctccatggacaccaatggctcctacacagccaacgacctggacgagatggggcaagacagtgtccggaagacagatgaatacctggagaaggccctggagtacctgcgccagatattccggctcagcgaagcgcagctcaggcagttcacactcgccttgggcaccacccaggatgagaatggaaaaaagcaactccccgactgcatcgtgggtgaggacggactcatccttacgcccctggggcggtaccagatcatcaatgggctgcgaaggtttgaaattgagtaccagggggacccggagctgcagcccatccggagctatgagatcgccagcttggtccgcacactctttaggctgtcgtctgccatcaaccacagatttgcaggacagatggcggctctgtgttcccgggatgacttcctcggcagcttctgtcgctaccacctcacagaacctgggctggccagcaggcacctgctgagccctgtggggcggaggcaggtggccggccacacccgcggccccaggctcagcctgcgcttcctgggcagttaccggacgctggtctcgctgctgctggccttcttcgtggcctctctgttctgcgtcgggcccctcccatgcacgctgctgctcaccctgggctatgtcctctacgcctctgccatgacactgctgaccgagcgggggaagctgcaccagccctgaaggtgtcagctgccttcagagcaggctggagggatttgccacacagccccacccttgggctgagaggacctgggaagcccctccaggagggaacacggtcatcctcgggcttctggagcggggttcctgcagccgcagaggcatctggaggaaacgcaaccaagaaaggaaggcaggtgggccccagcaaaggagtagctgccagggctcaacagctacgctctgtgacagcgcagagctcagcggcggcctttccctccctccgccaaggactcacggccaagccagctctcggggccttttttccactgcccatttggctactctgctgcaccaagcttgggagccagcctgccaacagccacctgggcctggcctccccactggctggccttgaggttggcagagtgggttgtggcgcttcctctctctgtgtgggaccaggacagtggcttaagtctccactccaggaaagaatcaaagtttctagagttgtgagaaaaccagagagtggctgtcctgattcttcactgtgaggggcgttcttcatgttctcccagctgttccaagactgggccgtagaattccatgtttcaggagcctaagaccctcccagagcccaggggcttcaccgcagaccccaagccattgagcacatcacccaaagcagtggccaacatcgcggacccctgtgccttgtcacagatgggtgctggtcctcaggcgttggggacactgctgggtcgatggggtcggattctgccagtttctgctctgcagccaaagatggtcagaagcattgtcacttcagtaacatcaagtgctcaaagacatggcaaccgttcagtggtacttaagtattcaaaatatacaactacagattctctgacagaaaccagcacggggtcttcaccttcattcaccccacaggcgacatgcgagggagaacagcatctcagtggtgatttccaaaccaagcctttgttttcggtgtggggttttgggggtttgctttaatgtttttgaaattgtaaatgttgggctttgtattttgatgtaaactgagcataatggcattttagggcctgtgaccaaaaatgaagcttgtaacgaccatggatctgaataaacatgtccttgcttctga

SEQ ID NO: 185866 - DNA, 3371 bp, Homo sapiens
  Payload ID: 16596
  Gene Symbol: SMPD4
  Gene Name: sphingomyelin phosphodiesterase 4, neutral membrane (neutral sphingomyelinase-3)
  ENST ID: ENST00000439886
  CDS Start-End: 1-2225
accacaacaaggtccagttcacccctactgggggccttggtctgaacttggccctgaatccgttcgagtattacatattcttctttgccttgagcctcatcactcagaagccacttcctgtgtccctccacgtccgtacttcagactgtgcctatttcatcctggtggacaggtacctgtcatggttcctgcccaccgaaggcagtgtgcccccaccactctcctccagcccaggggggaccagcccctcaccacctcccaggacaccagccataccctttgcttcctatggcctccaccacactagcctcctaaagcgacacatctctcatcagacgtctgtgaatgcagaccccgcctcccacgagatctggaggtcagaaactctgctccaggtttttgttgaaatgtggcttcatcactattccttggagatgtatcaaaaaatgcagtcccctcatgccaagctggaggttctgcactaccgactcagtgtctccagcgccctctacagccccgcccaacccagcctccaggccctccacgcctaccaagagtcgttcacgcctactgaggagcatgtgttggtggtgcgcctgctgctgaagcacctgcacgcctttgccaacagcctgaagccagagcaggcctcaccctccgcccactcccacgccaccagccccctggaggagttcaaacgaatggggctgaacctcccggaggtgcccagtgctctcccccggcggagccaaccctcactgatgggagccctggggtcatctgtgagcagggcctccttactgggcaagcagcaggtgaccctccccatcccctgcagggctgctgtcccgaggttcgtccagcagaaactctacctcttcttgcagcattgctttggccactggcccctggacgcatcgttcagagctgtcctggagatgtggctgagctacctgcagccgtggcggtacgcgcctgacaagcaggctccgggcagcgactcccagccccggtgtgtgtcggagaaatgggcaccctttgtccaggagaacctgctgatgtacaccaagttgtttgtgggctttctgaaccgcgcgctccgcacagacctggtcagccccaagcacgcgctcatggtgttccgagtggccaaagtctttgcccagcccaacctggctgagatgattcagaaaggtgagcagctattcctggagccagagctggtcatcccccaccgccagcaccgactcttcacggcccccacattcactgggagcttcctgtcaccctggccaccagcggtcactgatgcctccttcaaggtgaagagccacgtctacagcctggagggccaggactgcaagtacaccccgatgtttgggcccgaggcccgcaccctggtcctgcgcctcgctcagctcatcacacaggccaaacacacagccaagtccatctccgaccagtgtgcggagagcccggctggccactccttcctctcatggctgggctttagctccatggacaccaatggctcctacacagccaacgacctggacgagatggggcaagacagtgtccggaagacagatgaatacctggagaaggccctggagtacctgcgccagatattccggctcagcgaagcgcagctcaggcagttcacactcgccttgggcaccacccaggatgagaatggaaaaaagcaactccccgactgcatcgtgggtgaggacggactcatccttacgcccctggggcggtaccagatcatcaatgggctgcgaaggtttgaaattgagtaccagggggacccggagctgcagcccatccggagctatgagatcgccagcttggtccgcacactctttaggctgtcgtctgccatcaaccacagatttgcaggacagatggcggctctgtgttcccgggatgacttcctcggcagcttctgtcgctaccacctcacagaacctgggctggccagcaggcacctgctgagccctgtggggcggaggcaggtggccggccacacccgcggccccaggctcagcctgcgcttcctgggcagttaccggacgctggtctcgctgctgctggccttcttcgtggcctctctgttctgcgtcgggcccctcccatgcacgctgctgctcaccctgggctatgtcctctacgcctctgccatgacactgctgaccgagcgggggaagctgcaccagccctgaaggtgtcagctgccttcagagcaggctggagggatttgccacacagccccacccttgggctgagaggacctgggaagcccctccaggagggaacacggtcatcctcgggcttctggagcggggttcctgcagccgcagaggcatctggaggaaacgcaaccaagaaaggaaggcaggtgggccccagcaaaggagtagctgccagggctcaacagctacgctctgtgacagcgcagagctcagcggcggcctttccctccctccgccaaggactcacggccaagccagctctcggggccttttttccactgcccatttggctactctgctgcaccaagcttgggagccagcctgccaacagccacctgggcctggcctccccactggctggccttgaggttggcagagtgggttgtggcgcttcctctctctgtgtgggaccaggacagtggcttaagtctccactccaggaaagaatcaaagtttctagagttgtgagaaaaccagagagtggctgtcctgattcttcactgtgaggggcgttcttcatgttctcccagctgttccaagactgggccgtagaattccatgtttcaggagcctaagaccctcccagagcccaggggcttcaccgcagaccccaagccattgagcacatcacccaaagcagtggccaacatcgcggacccctgtgccttgtcacagatgggtgctggtcctcaggcgttggggacactgctgggtcgatggggtcggattctgccagtttctgctctgcagccaaagatggtcagaagcattgtcacttcagtaacatcaagtgctcaaagacatggcaaccgttcagtggtacttaagtattcaaaatatacaactacagattctctgacagaaaccagcacggggtcttcaccttcattcaccccacaggcgacatgcgagggagaacagcatctcagtggtgatttccaaaccaagcctttgttttcggtgtggggttttgggggtttgctttaatgtttttgaaattgtaaatgttgggctttgtattttgatgtaaactgagcataatggcattttagggcctgtgaccaaaaatgaagcttgtaacgaccatggatctgaataaacatgtccttgcttctg

SEQ ID NO: 185867 - DNA, 3601 bp, Homo sapiens
  Payload ID: 16596
  Gene Symbol: SMPD4
  Gene Name: sphingomyelin phosphodiesterase 4, neutral membrane (neutral sphingomyelinase-3)
  ENST ID: ENST00000412570
  CDS Start-End: 110-283
tttcggcgccgtggcggaatggcggcttccatctctgaggcgagcgacgctatggatcccacagtggtttgctaagaaggccattttcaactctccactggaggctgctatggcgttccctcacctgcagcagcccagctttctactggctagcctgaaagctgactctataaataagccctttgcacagcagtgccaagacttggttaaagtcattgaggactttccagcaaagatggtgtcctcgttggctggaacctccgctgcttacaggggcgcgtgaatcctgtggagtacagcatcgtgatggaatttctcgaccctggtggcccaatgatgaagttggtttataagcttcaagctgaagactataagttcgactttcctgtctcctacttgcctggtcctgtgaaggcgtccatccaggagtgcatcctccctgacagtcctctgtaccacaacaaggtccagttcacccctactgggggccttggtctgaacttggccctgaatccgttcgagtattacatattcttctttgccttgagcctcatcactcagaagccacttcctgtgtccctccacgtccgtacttcagactgtgcctatttcatcctggtggacaggtacctgtcatggttcctgcccaccgaaggcagtgtgcccccaccactctcctccagcccaggggggaccagcccctcaccacctcccaggacaccagccataccctttgcttcctatggcctccaccacactagcctcctaaagcgacacatctctcatcagacgtctgtgaatgcagaccccgcctcccacgagatctggaggtcagaaactctgctccaggtttttgttgaaatgtggcttcatcactattccttggagatgtatcaaaaaatgcagtcccctcatgccaaggagtcgttcacgcctactgaggagcatgtgttggtggtgcgcctgctgctgaagcacctgcacgcctttgccaacagcctgaagccagagcaggcctcaccctccgcccactcccacgccaccagccccctggaggagttcaaacgggctgctgtcccgaggttcgtccagcagaaactctacctcttcttgcagcattgctttggccactggcccctggacgcatcgttcagagctgtcctggagatgtggctgagctacctgcagccgtggcggtacgcgcctgacaagcaggctccgggcagcgactcccagccccggtgtgtgtcggagaaatgggcaccctttgtccaggagaacctgctgatgtacaccaagttgtttgtgggctttctgaaccgcgcgctccgcacagacctggtcagccccaagcacgcgctcatggtgttccgagtggccaaagtctttgcccagcccaacctggctgagatgattcagaaaggtgagcagctattcctggagccagagctggtcatcccccaccgccagcaccgactcttcacggcccccacattcactgggagcttcctgtcaccctggccaccagcggtcactgatgcctccttcaaggtgaagagccacgtctacagcctggagggccaggactgcaagtacaccccgatgtttgggcccgaggcccgcaccctggtcctgcgcctcgctcagctcatcacacaggccaaacacacagccaagtccatctccgaccagtgtgcggagagcccggctggccactccttcctctcatggctgggctttagctccatggacaccaatggctcctacacagccaacgacctggacgagatggggcaagacagtgtccggaagacagatgaatacctggagaaggccctggagtacctgcgccagatattccggctcagcgaagcgcagctcaggcagttcacactcgccttgggcaccacccaggatgagaatggaaaaaagcaactccccgactgcatcgtgggtgaggacggactcatccttacgcccctggggcggtaccagatcatcaatgggctgcgaaggtttgaaattgagtaccagggggacccggagctgcagcccatccggagctatgagatcgccagcttggtccgcacactctttaggctgtcgtctgccatcaaccacagatttgcaggacagatggcggctctgtgttcccgggatgacttcctcggcagcttctgtcgctaccacctcacagaacctgggctggccagcaggcacctgctgagccctgtggggcggaggcaggtggccggccacacccgcggccccaggctcagcctgcgcttcctgggcagttaccggacgctggtctcgctgctgctggccttcttcgtggcctctctgttctgcgtcgggcccctcccatgcacgctgctgctcaccctgggctatgtcctctacgcctctgccatgacactgctgaccgagcgggggaagctgcaccagccctgaaggtgtcagctgccttcagagcaggctggagggatttgccacacagccccacccttgggctgagaggacctgggaagcccctccaggagggaacacggtcatcctcgggcttctggagcggggttcctgcagccgcagaggcatctggaggaaacgcaaccaagaaaggaaggcaggtgggccccagcaaaggagtagctgccagggctcaacagctacgctctgtgacagcgcagagctcagcggcggcctttccctccctccgccaaggactcacggccaagccagctctcggggccttttttccactgcccatttggctactctgctgcaccaagcttgggagccagcctgccaacagccacctgggcctggcctccccactggctggccttgaggttggcagagtgggttgtggcgcttcctctctctgtgtgggaccaggacagtggcttaagtctccactccaggaaagaatcaaagtttctagagttgtgagaaaaccagagagtggctgtcctgattcttcactgtgaggggcgttcttcatgttctcccagctgttccaagactgggccgtagaattccatgtttcaggagcctaagaccctcccagagcccaggggcttcaccgcagaccccaagccattgagcacatcacccaaagcagtggccaacatcgcggacccctgtgccttgtcacagatgggtgctggtcctcaggcgttggggacactgctgggtcgatggggtcggattctgccagtttctgctctgcagccaaagatggtcagaagcattgtcacttcagtaacatcaagtgctcaaagacatggcaaccgttcagtggtacttaagtattcaaaatatacaactacagattctctgacagaaaccagcacggggtcttcaccttcattcaccccacaggcgacatgcgagggagaacagcatctcagtggtgatttccaaaccaagcctttgttttcggtgtggggttttgggggtttgctttaatgtttttgaaattgtaaatgttgggctttgtattttgatgtaaactgagcataatggcattttagggcctgtgaccaaaaatgaagcttgtaacgaccatggatctgaataaacatgtccttgcttctga

SEQ ID NO: 185868 - DNA, 635 bp, Homo sapiens
  Payload ID: 16596
  Gene Symbol: SMPD4
  Gene Name: sphingomyelin phosphodiesterase 4, neutral membrane (neutral sphingomyelinase-3)
  ENST ID: ENST00000449159
  CDS Start-End: 1-635
gtgtcggagaaatgggcaccctttgtccaggagaacctgctgatgtacaccaagttgtttgtgggctttctgaaccgcgcgctccgcacagacctggtcagccccaagcacgcgctcatggtgttccgagtggccaaagtctttgcccagcccaacctggctgagatgattcagaaaggtgagcagctattcctggagccagagctggtcatcccccaccgccagcaccgactcttcacggcccccacattcactgggagcttcctgtcaccctggccaccagcggtcactgatgcctccttcaaggtcctgcgcctcgctcagctcatcacacaggccaaacacacagccaagtccatctccgaccagtgtgcggagagcccggctggccactccttcctctcatggctgggctttagctccatggacaccaatggctcctacacagccaacgacctggacgagatggggcaagacagtgtccggaagacagatgaatacctggagaaggccctggagtacctgcgccagatattccggctcagcgaagcgcagctcaggcagttcacactcgccttgggcaccacccaggatgagaatggaaaaaagcaactccccgactgcatcgtgggtga

SEQ ID NO: 185869 - DNA, 3614 bp, Homo sapiens
  Payload ID: 16596
  Gene Symbol: SMPD4
  Gene Name: sphingomyelin phosphodiesterase 4, neutral membrane (neutral sphingomyelinase-3)
  Uniprot ID: Q9NXE4
  ENST ID: ENST00000431183
  CDS Start-End: 157-2451
ctaaggaccactccctcccccgcactcctgcctcgccatttctcttccccgcccggccggccttcgctttgcgcacgcgccttttgaggtaacggcccaaagaggtggaagcgcttttcccgcccggccgcggggcgtggctctgcgcgcagcttgatgacgactttcggcgccgtggcggaatggcggcttccatctctgaggcgagcgacgctatggatcccacagtggtttgctaagaaggccattttcaactctccactggaggctgctatggcgttccctcacctgcagcagcccagctttctactggctagcctgaaagctgactctataaataagccctttgcacagcagtgccaagacttggttaaagtcattgaggactttccagcaaagggtcctgtgaaggcgtccatccaggagtgcatcctccctgacagtcctctgtaccacaacaaggtccagttcacccctactgggggccttggtctgaacttggccctgaatccgttcgagtattacatattcttctttgccttgagcctcatcactcagaagccacttcctgtgtccctccacgtccgtacttcagactgtgcctatttcatcctggtggacaggtacctgtcatggttcctgcccaccgaaggcagtgtgcccccaccactctcctccagcccaggggggaccagcccctcaccacctcccaggacaccagccataccctttgcttcctatggcctccaccacactagcctcctaaagcgacacatctctcatcagacgtctgtgaatgcagaccccgcctcccacgagatctggaggtcagaaactctgctccaggtttttgttgaaatgtggcttcatcactattccttggagatgtatcaaaaaatgcagtcccctcatgccaaggagtcgttcacgcctactgaggagcatgtgttggtggtgcgcctgctgctgaagcacctgcacgcctttgccaacagcctgaagccagagcaggcctcaccctccgcccactcccacgccaccagccccctggaggagttcaaacgggctgctgtcccgaggttcgtccagcagaaactctacctcttcttgcagcattgctttggccactggcccctggacgcatcgttcagagctgtcctggagatgtggctgagctacctgcagccgtggcggtacgcgcctgacaagcaggctccgggcagcgactcccagccccggtgtgtgtcggagaaatgggcaccctttgtccaggagaacctgctgatgtacaccaagttgtttgtgggctttctgaaccgcgcgctccgcacagacctggtcagccccaagcacgcgctcatggtgttccgagtggccaaagtctttgcccagcccaacctggctgagatgattcagaaaggtgagcagctattcctggagccagagctggtcatcccccaccgccagcaccgactcttcacggcccccacattcactgggagcttcctgtcaccctggccaccagcggtcactgatgcctccttcaaggtgaagagccacgtctacagcctggagggccaggactgcaagtacaccccgatgtttgggcccgaggcccgcaccctggtcctgcgcctcgctcagctcatcacacaggccaaacacacagccaagtccatctccgaccagtgtgcggagagcccggctggccactccttcctctcatggctgggctttagctccatggacaccaatggctcctacacagccaacgacctggacgagatggggcaagacagtgtccggaagacagatgaatacctggagaaggccctggagtacctgcgccagatattccggctcagcgaagcgcagctcaggcagttcacactcgccttgggcaccacccaggatgagaatggaaaaaagcaactccccgactgcatcgtgggtgaggacggactcatccttacgcccctggggcggtaccagatcatcaatgggctgcgaaggtttgaaattgagtaccagggggacccggagctgcagcccatccggagctatgagatcgccagcttggtccgcacactctttaggctgtcgtctgccatcaaccacagatttgcaggacagatggcggctctgtgttcccgggatgacttcctcggcagcttctgtcgctaccacctcacagaacctgggctggccagcaggcacctgctgagccctgtggggcggaggcaggtggccggccacacccgcggccccaggctcagcctgcgcttcctgggcagttaccggacgctggtctcgctgctgctggccttcttcgtggcctctctgttctgcgtcgggcccctcccatgcacgctgctgctcaccctgggctatgtcctctacgcctctgccatgacactgctgaccgagcgggggaagctgcaccagccctgaaggtgtcagctgccttcagagcaggctggagggatttgccacacagccccacccttgggctgagaggacctgggaagcccctccaggagggaacacggtcatcctcgggcttctggagcggggttcctgcagccgcagaggcatctggaggaaacgcaaccaagaaaggaaggcaggtgggccccagcaaaggagtagctgccagggctcaacagctacgctctgtgacagcgcagagctcagcggcggcctttccctccctccgccaaggactcacggccaagccagctctcggggccttttttccactgcccatttggctactctgctgcaccaagcttgggagccagcctgccaacagccacctgggcctggcctccccactggctggccttgaggttggcagagtgggttgtggcgcttcctctctctgtgtgggaccaggacagtggcttaagtctccactccaggaaagaatcaaagtttctagagttgtgagaaaaccagagagtggctgtcctgattcttcactgtgaggggcgttcttcatgttctcccagctgttccaagactgggccgtagaattccatgtttcaggagcctaagaccctcccagagcccaggggcttcaccgcagaccccaagccattgagcacatcacccaaagcagtggccaacatcgcggacccctgtgccttgtcacagatgggtgctggtcctcaggcgttggggacactgctgggtcgatggggtcggattctgccagtttctgctctgcagccaaagatggtcagaagcattgtcacttcagtaacatcaagtgctcaaagacatggcaaccgttcagtggtacttaagtattcaaaatatacaactacagattctctgacagaaaccagcacggggtcttcaccttcattcaccccacaggcgacatgcgagggagaacagcatctcagtggtgatttccaaaccaagcctttgttttcggtgtggggttttgggggtttgctttaatgtttttgaaattgtaaatgttgggctttgtattttgatgtaaactgagcataatggcattttagggcctgtgaccaaaaatgaagcttgtaacgaccatggatctgaataaacatgtccttgcttctgagtcttctggcacctgg

SEQ ID NO: 185870 - DNA, 796 bp, Homo sapiens
  Payload ID: 16596
  Gene Symbol: SMPD4
  Gene Name: sphingomyelin phosphodiesterase 4, neutral membrane (neutral sphingomyelinase-3)
  ENST ID: ENST00000451542
  CDS Start-End: 1-796
ttcatcctggtggacaggtacctgtcatggttcctgcccaccgaaggcagtgtgcccccaccactctcctccagcccaggggggaccagcccctcaccacctcccaggacaccagccataccctttgcttcctatggcctccaccacactagcctcctaaagcgacacatctctcatcagacgtctgtgaatgcagaccccgcctcccacgagatctggaggtcagaaactctgctccaggtttttgttgaaatgtggcttcatcactattccttggagatgtatcaaaaaatgcagtcccctcatgccaaggagtcgttcacgcctactgaggagcatgtgttggtggtgcgcctgctgctgaagcacctgcacgcctttgccaacagcctgaagccagagcaggcctcaccctccgcccactcccacgccaccagccccctggaggagttcaaacgggctgctgtcccgaggttcgtccagcagaaactctacctcttcttgcagcattgctttggccactggcccctggacgcatcgttcagagctgtcctggagatgtggctgagctacctgcagccgtggcggtacgcgcctgacaagcaggctccgggcagcgactcccagccccgggcaccctttgtccaggagaacctgctgatgtacaccaagttgtttgtgggctttctgaaccgcgcgctccgcacagacctggtcagccccaagcacgcgctcatggtgttccgagtggccaaagtctttgcccagcccaacctggctgagatgattcagaaag

SEQ ID NO: 185871 - DNA, 820 bp, Homo sapiens
  Payload ID: 16596
  Gene Symbol: SMPD4
  Gene Name: sphingomyelin phosphodiesterase 4, neutral membrane (neutral sphingomyelinase-3)
  ENST ID: ENST00000430682
  CDS Start-End: 1-820
tgtgtccctccacgtccgtacttcagactgtgcctatttcatcctggtggacaggtacctgtcatggttcctgcccaccgaaggcagtgtgcccccaccactctcctccagcccaggggggaccagcccctcaccacctcccaggacaccagccataccctttgcttcctatggcctccaccacactagcctcctaaagcgacacatctctcatcagacgtctgtgaatgcagaccccgcctcccacgagatctggaggtcagaaactctgctccaggtttttgttgaaatgtggcttcatcactattccttggagatgtatcaaaaaatgcagtcccctcatgccaaggtcctggagatgtggctgagctacctgcagccgtggcggtacgcgcctgacaagcaggctccgggcagcgactcccagccccggtgtgtgtcggagaaatgggcaccctttgtccaggagaacctgctgatgtacaccaagttgtttgtgggctttctgaaccgcgcgctccgcacagacctggtcagccccaagcacgcgctcatggtgttccgagtggccaaagtctttgcccagcccaacctggctgagatgattcagaaaggtgagcagctattcctggagccagagctggtcatcccccaccgccagcaccgactcttcacggcccccacattcactgggagcttcctgtcaccctggccaccagcggtcactgatgcctccttcaaggtgaagagccacgtctacagcctggagggccaggactgcaagtacaccccgatgtttgggcccgaggcccgcaccctg

SEQ ID NO: 185872 - DNA, 699 bp, Homo sapiens
  Payload ID: 16596
  Gene Symbol: SMPD4
  Gene Name: sphingomyelin phosphodiesterase 4, neutral membrane (neutral sphingomyelinase-3)
  ENST ID: ENST00000441135
  CDS Start-End: 293-699
atggatcccacaggtgagtggcgcgggatgcgcgcctgagacggtccggcgccctgggggcttccccgagcccctgcggaggccatctccgttcctccgcgagccccaggactcgggccggccagccggctctgcccaggcagggcaggctggggagtggagggccccggttgagtcttctgccacccctctgggccatgcctttgtgccaccttcccgcgcggctcgtacactctgtcccggtccgtggtttgctaagaaggccattttcaactctccactggaggctgctatggcgttccctcacctgcagcagcccagctttctactggctagcctgaaagctgactctataaataagccctttgcacagcagtgccaagacttggttaaagtcattgaggactttccagcaaaggagctgcacaccatcttcccatggctggtagaaagcatttttggcagcctagatggtgtcctcgttggctggaacctccgctgcttacaggggcgcgtgaatcctgtggagtacagcatcgtgatggaatttctcgaccctggtggcccaatgatgaagttggtttataagcttcaagctgaagactataagttcgactttcctgtctcctacttgcctggtcctgtgaaggcgtccatccaggagtgcatcctccctgacagtcctctgtaccacaacaa

SEQ ID NO: 185873 - DNA, 3586 bp, Homo sapiens
  Payload ID: 16596
  Gene Symbol: SMPD4
  Gene Name: sphingomyelin phosphodiesterase 4, neutral membrane (neutral sphingomyelinase-3)
  ENST ID: ENST00000454468
  CDS Start-End: 96-248
cggaatggcggcttccatctctgaggcgagcgacgctatggatcccacagtggtttgctaagaaggccattttcaactctccactggaggctgctatggcgttccctcacctgcagcagcccagctttctactggctagcctgaaagctgactctataaataagccctttgcacagcagtgccaagacttggttaaagtcattgaggactttccagcaaagtggcccaatgatgaagttggtttataagcttcaagctgaagactataagttcgactttcctgtctcctacttgcctggtcctgtgaaggcgtccatccaggagtgcatcctccctgacagtcctctgtaccacaacaaggtccagttcacccctactgggggccttggtctgaacttggccctgaatccgttcgagtattacatattcttctttgccttgagcctcatcactcagaagccacttcctgtgtccctccacgtccgtacttcagactgtgcctatttcatcctggtggacaggtacctgtcatggttcctgcccaccgaaggcagtgtgcccccaccactctcctccagcccaggggggaccagcccctcaccacctcccaggacaccagccataccctttgcttcctatggcctccaccacactagcctcctaaagcgacacatctctcatcagacgtctgtgaatgcagaccccgcctcccacgagatctggaggtcagaaactctgctccaggtttttgttgaaatgtggcttcatcactattccttggagatgtatcaaaaaatgcagtcccctcatgccaagctggaggttctgcactaccgactcagtgtctccagcgccctctacagccccgcccaacccagcctccaggccctccacgcctaccaagagtcgttcacgcctactgaggagcatgtgttggtggtgcgcctgctgctgaagcacctgcacgcctttgccaacagcctgaagccagagcaggcctcaccctccgcccactcccacgccaccagccccctggaggagttcaaacgggctgctgtcccgaggttcgtccagcagaaactctacctcttcttgcagcattgctttggccactggcccctggacgcatcgttcagagctgtcctggagatgtggctgagctacctgcagccgtggcggtacgcgcctgacaagcaggctccgggcagcgactcccagccccggtgtgtgtcggagaaatgggcaccctttgtccaggagaacctgctgatgtacaccaagttgtttgtgggctttctgaaccgcgcgctccgcacagacctggtcagccccaagcacgcgctcatggtgttccgagtggccaaagtctttgcccagcccaacctggctgagatgattcagaaaggtgagcagctattcctggagccagagctggtcatcccccaccgccagcaccgactcttcacggcccccacattcactgggagcttcctgtcaccctggccaccagcggtcactgatgcctccttcaaggtgaagagccacgtctacagcctggagggccaggactgcaagtacaccccgatgtttgggcccgaggcccgcaccctggtcctgcgcctcgctcagctcatcacacaggccaaacacacagccaagtccatctccgaccagtgtgcggagagcccggctggccactccttcctctcatggctgggctttagctccatggacaccaatggctcctacacagccaacgacctggacgagatggggcaagacagtgtccggaagacagatgaatacctggagaaggccctggagtacctgcgccagatattccggctcagcgaagcgcagctcaggcagttcacactcgccttgggcaccacccaggatgagaatggaaaaaagcaactccccgactgcatcgtgggtgaggacggactcatccttacgcccctggggcggtaccagatcatcaatgggctgcgaaggtttgaaattgagtaccagggggacccggagctgcagcccatccggagctatgagatcgccagcttggtccgcacactctttaggctgtcgtctgccatcaaccacagatttgcaggacagatggcggctctgtgttcccgggatgacttcctcggcagcttctgtcgctaccacctcacagaacctgggctggccagcaggcacctgctgagccctgtggggcggaggcaggtggccggccacacccgcggccccaggctcagcctgcgcttcctgggcagttaccggacgctggtctcgctgctgctggccttcttcgtggcctctctgttctgcgtcgggcccctcccatgcacgctgctgctcaccctgggctatgtcctctacgcctctgccatgacactgctgaccgagcgggggaagctgcaccagccctgaaggtgtcagctgccttcagagcaggctggagggatttgccacacagccccacccttgggctgagaggacctgggaagcccctccaggagggaacacggtcatcctcgggcttctggagcggggttcctgcagccgcagaggcatctggaggaaacgcaaccaagaaaggaaggcaggtgggccccagcaaaggagtagctgccagggctcaacagctacgctctgtgacagcgcagagctcagcggcggcctttccctccctccgccaaggactcacggccaagccagctctcggggccttttttccactgcccatttggctactctgctgcaccaagcttgggagccagcctgccaacagccacctgggcctggcctccccactggctggccttgaggttggcagagtgggttgtggcgcttcctctctctgtgtgggaccaggacagtggcttaagtctccactccaggaaagaatcaaagtttctagagttgtgagaaaaccagagagtggctgtcctgattcttcactgtgaggggcgttcttcatgttctcccagctgttccaagactgggccgtagaattccatgtttcaggagcctaagaccctcccagagcccaggggcttcaccgcagaccccaagccattgagcacatcacccaaagcagtggccaacatcgcggacccctgtgccttgtcacagatgggtgctggtcctcaggcgttggggacactgctgggtcgatggggtcggattctgccagtttctgctctgcagccaaagatggtcagaagcattgtcacttcagtaacatcaagtgctcaaagacatggcaaccgttcagtggtacttaagtattcaaaatatacaactacagattctctgacagaaaccagcacggggtcttcaccttcattcaccccacaggcgacatgcgagggagaacagcatctcagtggtgatttccaaaccaagcctttgttttcggtgtggggttttgggggtttgctttaatgtttttgaaattgtaaatgttgggctttgtattttgatgtaaactgagcataatggcattttagggcctgtgaccaaaaatgaagcttgtaacgaccatggatctgaataaacatgtccttgcttctgagtc

SEQ ID NO: 185874 - DNA, 566 bp, Homo sapiens
  Payload ID: 16596
  Gene Symbol: SMPD4
  Gene Name: sphingomyelin phosphodiesterase 4, neutral membrane (neutral sphingomyelinase-3)
  ENST ID: ENST00000439029
  CDS Start-End: 113-283
gactttcggcgccgtggcggaatggcggcttccatctctgaggcgagcgacgctatggatcccacagtggtttgctaagaaggccattttcaactctccactggaggctgctatggcgttccctcacctgcagcagcccagctttctactggctagcctgaaagctgactctataaataagccctttgcacagcagtgccaagacttggttaaagtcattgaggactttccagcaaaggacaccagccataccctttgcttcctatggcctccaccacactagcctcctaaagcgacacatctctcatcagacgtctgtgaatgcagaccccgcctcccacgagatctggaggtcagaaactctgctccaggtttttgttgaaatgtggcttcatcactattccttggagatgtatcaaaaaatgcagtcccctcatgccaagctggaggttctgcactaccgactcagtgtctccagcgccctctacagccccgcccaacccagcctccaggccctccacgcctaccaagagtcgttcacgcctactgaggagcatgtgttggtg

SEQ ID NO: 185875 - DNA, 1851 bp, Homo sapiens
  Payload ID: 16597
  Gene Symbol: SMPDL3A
  Gene Name: sphingomyelin phosphodiesterase, acid-like 3A
  Uniprot ID: Q92484
  ENST ID: ENST00000368440
  CDS Start-End: 178-1539
cgctaaacagcagctgaaggtcaggcgaactgactcgctgcggaatctgcctttgcacgtgatcagtcggacgtctacacccgcagccgtcttctgtctccgcctcaccctcaggcctgacggtccgagtggagctgcgggacagcccgaacctccaggtcagccccgcggccctccatggcgctggtgcgcgcactcgtctgctgcctgctgactgcctggcactgccgctccggcctcgggctgcccgtggcgcccgcaggcggcaggaatcctcctccggcgataggacagttttggcatgtgactgacttacacttagaccctacttaccacatcacagatgaccacacaaaagtgtgtgcttcatctaaaggtgcaaatgcctccaaccctggcccttttggagatgttctgtgtgattctccatatcaacttattttgtcagcatttgattttattaaaaattctggacaagaagcatctttcatgatatggacaggggatagcccacctcatgttcctgtacctgaactctcaacagacactgttataaatgtgatcactaatatgacaaccaccatccagagtctctttccaaatctccaggttttccctgcgctgggtaatcatgactattggccacaggatcaactgcctgtagtcaccagtaaagtgtacaatgcagtagcaaacctctggaaaccatggctagatgaagaagctattagtactttaaggaaaggtggtttttattcacagaaagttacaactaatccaaaccttaggatcatcagtctaaacacaaacttgtactacggcccaaatataatgacactgaacaagactgacccagccaaccagtttgaatggctagaaagtacattgaacaactctcagcagaataaggagaaggtgtatatcatagcacatgttccagtggggtatctgccatcttcacagaacatcacagcaatgagagaatactataatgagaaattgatagatatttttcaaaaatacagtgatgtcattgcaggacaattttatggacacactcacagagacagcattatggttctttcagataaaaaaggaagtccagtaaattctttgtttgtggctcctgctgttacaccagtgaagagtgttttagaaaaacagaccaacaatcctggtatcagactgtttcagtatgatcctcgtgattataaattattggatatgttgcagtattacttgaatctgacagaggcgaatctaaagggagagtccatctggaagctggagtatatcctgacccagacctacgacattgaagatttgcagccggaaagtttatatggattagctaaacaatttacaatcctagacagtaagcagtttataaaatactacaattacttctttgtgagttatgacagcagtgtaacatgtgataagacatgtaaggcctttcagatttgtgcaattatgaatcttgataatatttcctatgcagattgcctcaaacagctttatataaagcacaattactagtatttcacagtttttgctaatagaaaatgctgattctgattctgagatcaatttgtgggaattttacataaatctttgttaattactgagtgggcaagtagacttcctgtctttgctttctttttttttttctttttgatgccttaatgtagatatctttatcattctgaattgtattatatatttaaagtgctcattaatagaatgatggatgtaaattggatgtaaatattcagtttatataattatatctaatttgtacccttgttgaaattgtcatttatacaataaagcgaattctttatctctaaa

SEQ ID NO: 185876 - DNA, 1755 bp, Homo sapiens
  Payload ID: 16597
  Gene Symbol: SMPDL3A
  Gene Name: sphingomyelin phosphodiesterase, acid-like 3A
  Uniprot ID: Q92484
  ENST ID: ENST00000539041
  CDS Start-End: 478-1446
accagtatgtcagtgtttgacatcaactgcaccactgatacacgagtcggaatttgagcttctacaagtacattccttcctaggccaaacactgacgctaagaaatacgagaacagatcatcgctaaacagcagctgaaggtcaggcgaactgactcgctgcggaatctgcctttgcacgtgatcagtcggacgtctacacccgcagccgtcttctgtctccgcctcaccctcaggcctgacggtccgagtggagctgcgggacagcccgaacctccaggtcagccccgcggccctccatggcgctggtgcgcgcactcgtctgctgcctgctgactgcctggcactgccgctccggcctcgggctgcccgtggcgcccgcaggcggcaggaatcctcctccggcgatagggatagcccacctcatgttcctgtacctgaactctcaacagacactgttataaatgtgatcactaatatgacaaccaccatccagagtctctttccaaatctccaggttttccctgcgctgggtaatcatgactattggccacaggatcaactgcctgtagtcaccagtaaagtgtacaatgcagtagcaaacctctggaaaccatggctagatgaagaagctattagtactttaaggaaaggtggtttttattcacagaaagttacaactaatccaaaccttaggatcatcagtctaaacacaaacttgtactacggcccaaatataatgacactgaacaagactgacccagccaaccagtttgaatggctagaaagtacattgaacaactctcagcagaataaggagaaggtgtatatcatagcacatgttccagtggggtatctgccatcttcacagaacatcacagcaatgagagaatactataatgagaaattgatagatatttttcaaaaatacagtgatgtcattgcaggacaattttatggacacactcacagagacagcattatggttctttcagataaaaaaggaagtccagtaaattctttgtttgtggctcctgctgttacaccagtgaagagtgttttagaaaaacagaccaacaatcctggtatcagactgtttcagtatgatcctcgtgattataaattattggatatgttgcagtattacttgaatctgacagaggcgaatctaaagggagagtccatctggaagctggagtatatcctgacccagacctacgacattgaagatttgcagccggaaagtttatatggattagctaaacaatttacaatcctagacagtaagcagtttataaaatactacaattacttctttgtgagttatgacagcagtgtaacatgtgataagacatgtaaggcctttcagatttgtgcaattatgaatcttgataatatttcctatgcagattgcctcaaacagctttatataaagcacaattactagtatttcacagtttttgctaatagaaaatgctgattctgattctgagatcaatttgtgggaattttacataaatctttgttaattactgagtgggcaagtagacttcctgtctttgctttctttttttttttctttttgatgccttaatgtagatatctttatcattctgaattgtattatatatttaaagtgctcattaatagaatgatggatgtaaattggatgtaaatattcagtttatataattatatctaatttgtacccttgttgaaattgtcatttatacaataaagcgaattctttatctct

SEQ ID NO: 185877 - DNA, 1548 bp, Homo sapiens
  Payload ID: 16598
  Gene Symbol: SMPDL3B
  Gene Name: sphingomyelin phosphodiesterase, acid-like 3B
  Uniprot ID: Q92485
  ENST ID: ENST00000373888
  CDS Start-End: 146-1267
gacgccttggaggacttggaacacctgtaacaggacaaggagttctgctcaggcacgtggccacagaaaactacttaggaagcctgtggtgagaacaacaacagtgcctgagaatcccacggctctggggaagtgagccccgaggatgaggctgctcgcctggctgattttcctggctaactggggaggtgccagggctgaaccagggaagttctggcacatcgctgacctgcaccttgaccctgactacaaggtatccaaagaccccttccaggtgtgcccatcagctggatcccagccagtgcccgacgcaggcccctggggtgactacctctgtgattctccctgggccctcatcaactcctccatctatgccatgaaggagattgagccagagccagacttcattctctggactggtgatgacacgcctcatgtgcccgatgagaaactgggagaggcagctgtactggaaattgtggaacgcctgaccaagctcatcagagaggtctttccagatactaaagtctatgctgctttgggaaatcatgattttcaccccaaaaaccagttcccagctggaagtaacaacatctacaatcagatagcagaactatggaaaccctggcttagtaatgagtccatcgctctcttcaaaaaaggtgccttctactgtgagaagctgccgggtcccagcggggctgggcgaattgtggtcctcaacaccaatctgtactataccagcaatgcgctgacagcagacatggcggaccctggccagcagttccagtggctggaagatgtgctgaccgatgcatccaaagctggggacatggtgtacattgtcggccacgtgcccccggggttctttgagaagacgcaaaacaaggcatggttccgggagggcttcaatgaaaaatacctgaaggtggtccggaagcatcatcgcgtcatagcagggcagttcttcgggcaccaccacaccgacagctttcggatgctctatgatgatgcaggtgtccccataagcgccatgttcatcacacctggagtcaccccatggaaaaccacattacctggagtggtcaatggggccaacaatccagccatccgggtgttcgaatatgaccgagccacactgagcctgaaggtcaggagtcctgcggaggccagaggaggagggtgggaggggcttaaatgcatcaccaccttccctcactctcagcttatccaccttcccctgaccactgagcctcaggaaggttgagctccttccacccttctccagctcaggatcagaaccctggaggcacctgccaccgagtcagggcagtgcctcaccaagtcaccttttcccctggatgactgtcacagcttcatacctggtctccctgcctctggccctgccctgctatggcccatccgctacacaagagagaagaaactaatctcctatagcaccactttcatcttgtctccgtcctgctcaaaaaccttcagtggctccccagtgccttcaagataaagttgtgtctccttgacctagta

SEQ ID NO: 185878 - DNA, 1878 bp, Homo sapiens
  Payload ID: 16598
  Gene Symbol: SMPDL3B
  Gene Name: sphingomyelin phosphodiesterase, acid-like 3B
  Uniprot ID: Q92485
  ENST ID: ENST00000373894
  CDS Start-End: 192-1559
ccagatcataccctgctgggcaaaggaggaagagccagaggatccagacgccttggaggacttggaacacctgtaacaggacaaggagttctgctcaggcacgtggccacagaaaactacttaggaagcctgtggtgagaacaacaacagtgcctgagaatcccacggctctggggaagtgagccccgaggatgaggctgctcgcctggctgattttcctggctaactggggaggtgccagggctgaaccagggaagttctggcacatcgctgacctgcaccttgaccctgactacaaggtatccaaagaccccttccaggtgtgcccatcagctggatcccagccagtgcccgacgcaggcccctggggtgactacctctgtgattctccctgggccctcatcaactcctccatctatgccatgaaggagattgagccagagccagacttcattctctggactggtgatgacacgcctcatgtgcccgatgagaaactgggagaggcagctgtactggaaattgtggaacgcctgaccaagctcatcagagaggtctttccagatactaaagtctatgctgctttgggaaatcatgattttcaccccaaaaaccagttcccagctggaagtaacaacatctacaatcagatagcagaactatggaaaccctggcttagtaatgagtccatcgctctcttcaaaaaaggtgccttctactgtgagaagctgccgggtcccagcggggctgggcgaattgtggtcctcaacaccaatctgtactataccagcaatgcgctgacagcagacatggcggaccctggccagcagttccagtggctggaagatgtgctgaccgatgcatccaaagctggggacatggtgtacattgtcggccacgtgcccccggggttctttgagaagacgcaaaacaaggcatggttccgggagggcttcaatgaaaaatacctgaaggtggtccggaagcatcatcgcgtcatagcagggcagttcttcgggcaccaccacaccgacagctttcggatgctctatgatgatgcaggtgtccccataagcgccatgttcatcacacctggagtcaccccatggaaaaccacattacctggagtggtcaatggggccaacaatccagccatccgggtgttcgaatatgaccgagccacactgagcctgaaggacatggtgacctacttcatgaacctgagccaggcgaatgctcaggggacgccgcgctgggagctcgagtaccagctgaccgaggcctatggggtgccggacgccagcgcccactccatgcacacagtgctggaccgcatcgctggcgaccagagcacactgcagcgctactacgtctataactcagtcagctactctgctggggtctgcgacgaggcctgcagcatgcagcacgtgtgtgccatgcgccaggtggacattgacgcttacaccacctgtctgtatgcctctggcaccacgcccgtgccccagctcccgctgctgctgatggccctgctgggcctgtgcacgctcgtgctgtgacctgccaggctcaccttcttcctggtaacgggtaacgggggcagcgcccaggatcacccagagctgggccttccaccatttcctccgcgcctgaggagtgaactgaaataggacaaccgaatcaggaagcgaagccccaggagctgcagccatccgtgatcgcgccactgcactccagcctgggtgacaaagccagactctctccaaaaacaaaccagaaacagaaaagaaatgacgacccaagacccccctacaagcatacttcttttgcgtattatgtttaactcacaaaacaaagctcatcatgcgtttgattctg

SEQ ID NO: 185879 - DNA, 953 bp, Homo sapiens
  Payload ID: 16598
  Gene Symbol: SMPDL3B
  Gene Name: sphingomyelin phosphodiesterase, acid-like 3B
  ENST ID: ENST00000411604
  CDS Start-End: 146-953
gacgccttggaggacttggaacacctgtaacaggacaaggagttctgctcaggcacgtggccacagaaaactacttaggaagcctgtggtgagaacaacaacagtgcctgagaatcccacggctctggggaagtgagccccgaggatgaggctgctcgcctggctgattttcctggctaactggggaggtgccagggctgaaccagaggaagcgcaaggaccatgtgcccaagagaaaggcaaagggcctcccccaacatccatcctggccagcctggctccgggcttggaagcagggaagttctggcacatcgctgacctgcaccttgaccctgactacaaggtatccaaagaccccttccaggtgtgcccatcagctggatcccagccagtgcccgacgcaggcccctggggtgactacctctgtgattctccctgggccctcatcaactcctccatctatgccatgaaggagattgagccagagccagacttcattctctggactggtgatgacacgcctcatgtgcccgatgagaaactgggagaggcagctgtactggaaattgtggaacgcctgaccaagctcatcagagaggtctttccagatactaaagtctatgctgctttgggaaatcatgattttcaccccaaaaaccagttcccagctggaagtaacaacatctacaatcagatagcagaactatggaaaccctggcttagtaatgagtccatcgctctcttcaaaaaaggtgccttctactgtgagaagctgccgggtcccagcggggctgggcgaattgtggtcctcaacaccaatctgtactataccagcaatgcgctgacagcagacatggcggaccctggccagcagttccagtggctggaagatgtgctgaccgatgcatccaaagctggggacatggtgtacattgtcggccacgtgcccccgg

SEQ ID NO: 185880 - DNA, 1913 bp, Homo sapiens
  Payload ID: 16598
  Gene Symbol: SMPDL3B
  Gene Name: sphingomyelin phosphodiesterase, acid-like 3B
  ENST ID: ENST00000548116
  CDS Start-End: 156-464
agaggatccagacgccttggaggacttggaacacctgtaacaggacaaggagttctgctcaggcacgtggccacagaaaactacttaggaagcctgtggtgagaacaacaacagtgcctgagaatcccacggctctggggaagtgagccccgaggatgaggctgctcgcctggctgattttcctggctaactggggaggtgccagggctgaaccagggaagttctggcacatcgctgacctgcaccttgaccctgactacaaggtatccaaagaccccttccaggtgtgcccatcagctggatcccagccagtgcccgacgcaggcccctggggtgactacctctgtgattctccctgggccctcatcaactcctccatctatgccatgaaggagattgagccagagccagacttcattctctggactggagctgtcccttccttttcttctgctgcttcctgagttgcctgccccaaattggcttggtggtgttttgtagtgatgacacgcctcatgtgcccgatgagaaactgggagaggcagctgtactggaaattgtggaacgcctgaccaagctcatcagagaggtctttccagatactaaagtctatgctgctttgggaaatcatgattttcaccccaaaaaccagttcccagctggaagtaacaacatctacaatcagatagcagaactatggaaaccctggcttagtaatgagtccatcgctctcttcaaaaaaggtgccttctactgtgagaagctgccgggtcccagcggggctgggcgaattgtggtcctcaacaccaatctgtactataccagcaatgcgctgacagcagacatggcggaccctggccagcagttccagtggctggaagatgtgctgaccgatgcatccaaagctggggacatggtgtacattgtcggccacgtgcccccggggttctttgagaagacgcaaaacaaggcatggttccgggagggcttcaatgaaaaatacctgaaggtggtccggaagcatcatcgcgtcatagcagggcagttcttcgggcaccaccacaccgacagctttcggatgctctatgatgatgcaggtgtccccataagcgccatgttcatcacacctggagtcaccccatggaaaaccacattacctggagtggtcaatggggccaacaatccagccatccgggtgttcgaatatgaccgagccacactgagcctgaaggacatggtgacctacttcatgaacctgagccaggcgaatgctcaggggacgccgcgctgggagctcgagtaccagctgaccgaggcctatggggtgccggacgccagcgcccactccatgcacacagtgctggaccgcatcgctggcgaccagagcacactgcagcgctactacgtctataactcagtcagctactctgctggggtctgcgacgaggcctgcagcatgcagcacgtgtgtgccatgcgccaggtggacattgacgcttacaccacctgtctgtatgcctctggcaccacgcccgtgccccagctcccgctgctgctgatggccctgctgggcctgtgcacgctcgtgctgtgacctgccaggctcaccttcttcctggtaacgggtaacgggggcagcgcccaggatcacccagagctgggccttccaccatttcctccgcgcctgaggagtgaactgaaataggacaaccgaatcaggaagcgaagccccaggagctgcagccatccgtgatcgcgccactgcactccagcctgggtgacaaagccagactctctccaaaaacaaaccagaaacagaaaagaaatgacgacccaagacccccctacaagcatacttcttttgcgtattatgtttaactcacaaaacaaagctcatcatgcgtttgattctg

SEQ ID NO: 185881 - DNA, 1611 bp, Homo sapiens
  Payload ID: 16598
  Gene Symbol: SMPDL3B
  Gene Name: sphingomyelin phosphodiesterase, acid-like 3B
  ENST ID: ENST00000549094
  CDS Start-End: 75-1298
tacttaggaagcctgtggtgagaacaacaacagtgcctgagaatcccacggctctggggaagtgagccccgaggatgaggctgctcgcctggctgattttcctggctaactggggaggtgccagggctgaaccagggaagttctggcacatcgctgacctgcaccttgaccctgactacaaggtatccaaagaccccttccaggtgtgcccatcagctggatcccagccagtgcccgacgcaggcccctggggtgactacctctgtgattctccctgggccctcatcaactcctccatctatgccatgaaggagattgagccagagccagacttcattctctggactggtgatgacacgcctcatgtgcccgatgagaaactgggagaggcagctgtactggaaattgtggaacgcctgaccaagctcatcagagaggtctttccaggtgccttctactgtgagaagctgccgggtcccagcggggctgggcgaattgtggtcctcaacaccaatctgtactataccagcaatgcgctgacagcagacatggcggaccctggccagcagttccagtggctggaagatgtgctgaccgatgcatccaaagctggggacatggtgtacattgtcggccacgtgcccccggggttctttgagaagacgcaaaacaaggcatggttccgggagggcttcaatgaaaaatacctgaaggtggtccggaagcatcatcgcgtcatagcagggcagttcttcgggcaccaccacaccgacagctttcggatgctctatgatgatgcaggtgtccccataagcgccatgttcatcacacctggagtcaccccatggaaaaccacattacctggagtggtcaatggggccaacaatccagccatccgggtgttcgaatatgaccgagccacactgagcctgaaggacatggtgacctacttcatgaacctgagccaggcgaatgctcaggggacgccgcgctgggagctcgagtaccagctgaccgaggcctatggggtgccggacgccagcgcccactccatgcacacagtgctggaccgcatcgctggcgaccagagcacactgcagcgctactacgtctataactcagtcagctactctgctggggtctgcgacgaggcctgcagcatgcagcacgtgtgtgccatgcgccaggtggacattgacgcttacaccacctgtctgtatgcctctggcaccacgcccgtgccccagctcccgctgctgctgatggccctgctgggcctgtgcacgctcgtgctgtgacctgccaggctcaccttcttcctggtaacgggtaacgggggcagcgcccaggatcacccagagctgggccttccaccatttcctccgcgcctgaggagtgaactgaaataggacaaccgaatcaggaagcgaagccccaggagctgcagccatccgtgatcgcgccactgcactccagcctgggtgacaaagccagactctctccaaaaacaaaccagaaacagaaaagaaatgacgacccaagacccccctacaagcatacttcttttgcgtattatgtttaactcacaaaacaaagctcatcatgcgtttg

SEQ ID NO: 185882 - DNA, 3744 bp, Homo sapiens
  Payload ID: 16599
  Gene Symbol: SGMS1
  Gene Name: sphingomyelin synthase 1
  ENST ID: ENST00000361781
  CDS Start-End: 961-2202
tcgggcagcggactgggcatgctcggcagcccgggaggctcgcggtggcaagtcgaaagcgttcgcaccagcggggcagcggctgcgggcggcaggcggcgggcaggtcgggagtgagaaggaccggcctgggctgactgctctcccctcgcgcctagggagccggtcggagagcgcgattggggtgcggagccccgacgctgccctgccccggatttcattccgcggcgggggctccgcgagcggaattccggcggctgccgtgactccagtgcaacgtgacgacagcatgtacgatccctgaatgggcccgtgggcatatttagtcattcatttttgatcaggagaaagaagacagccatcatttgaaaggtaaagcttcagcgactgaaggagtgtggactttttgaatttcaagaacagtaaagttggaacacagcagagggtgtgtaataaaatacagattggaaagaagactgatgaagaaaaataacagcatgattcaggcacaccattgagttctttgggatgcccgaaagtgtctggttgggaaacatgaaatagaagacgagaacctgcctcagcaagcgtacctgagaatacttttaaaggaacctgttgataaatgcaaaacagtggctgttgcaggtgatggaactgtactggaacaatgggagaagctggtagcttataggaagccaagatgaccagaatgtttttaaataatccaaggaagaatcctgctcaaaaatgaggtgaattaatacttgggcgctcaggaaccctggacagctacatgaggtgtttaaaaactgccctgaccatcttgccaaacaagtctctgctcatgaggccccacaggatgaacgagccgaggcaggacagtgtcctgccctgtcggaacagtgactgctgacctgccaagagagagctggggactgcctgctgtctgccagtacaatgaaggaagtggtttattggtcacccaagaaggtggcagactggctgctggagaatgctatgccagaatactgtgagcctctggagcatttcacaggccaggacttgatcaacctaacccaagaggatttcaaaaaaccccccttgtgccgagtctcctctgacaatgggcagcggctcctggacatgatagaaaccctgaaaatggagcaccatttggaagcacacaagaacggccatgccaatgggcacctcaacattggcgtagacatccccacccccgacggcagcttcagcatcaagattaaacccaacgggatgccaaatgggtataggaaagagatgataaagatccccatgccagaactggagcgctctcagtaccccatggagtggggcaagacttttctggcctttctttatgcactttcctgtttcgttctcaccacagtgatgatctcggtcgtccacgaacgagtacctcctaaggaggtgcagcctccactaccggacacattttttgaccattttaaccgggtgcagtgggccttttctatttgtgaaattaatggcatgatccttgtaggactctggttaattcagtggctgctcttaaaatacaagtctattattagcagaagatttttctgcatagttggcacgctgtacctgtatcggtgtattacaatgtatgtaactacactcccagtacctggtatgcatttcaactgttctccgaagcttttcggagactgggaagcccaactgcgaagaataatgaagctcattgctggaggtggcttgtctatcactggctctcacaacatgtgtggggactatctgtacagcggccacacggtcatgctaacacttacctacttatttatcaaagagtattcccctcggcgactctggtggtatcactggatttgctggcttctcagcgtagttggaatcttctgtattctcttagcgcatgaccactacactgtggacgtggtggtggcatattacatcaccacgagactcttctggtggtatcacactatggccaatcagcaagtgctaaaggaagcttcccagatgaacctcctggccagggtgtggtggtacaggccatttcagtactttgaaaagaatgtccaaggaattgtacctcgatcttaccattggcctttcccctggccagtagtccacctcagtaggcaagttaaatacagccggctggtgaatgacacataacagctgtacaaagtggggaaaagacaaattgtccgaagtgctaagaactccatgagagaagatgccataaaataaacacctccctaatcctattatctttcaatggttaccttgacttaacctattgagttacctggtcagcactgtgatctttttttctctccaaaggacctgcgttggacaacaataaagaaaaatttaacctatcatgcactgtacacatttcctgttcataagtttgggatttacataacccgcaaccaccatgttcctttgtatatgatgcagcagcataaatgtaagcttttatatcataagttctggtctttccagtcacatctggaaataaagcgtattattttcttgggaaaacatacttttcatatctcttgccccaaagattgggctgtaagccattttctagcaaatgtctctatgaaggtttctaagtacctgaatggggtttgattctgaaatctttctacctgttgcaccgatattcaaataaaaatgatagacacagaaaggtttggtaactttgggttttgtaaaatcagcaaaggcagtgtttcaaaaagtgcaaaaaaaaagattctgttataaagtgattttctaagtatttcctaactttatttttcaaaatgatgttatgaacaccaaatttaaagatttttaacatgtcagagagaagagagttaaaatttaaaaatgcatcttgggagagaaatttgtctatgtttctagtgcctttcttgtcttgattgtatggtcagtaggcaatcttaaatgtttttatttaaaataaagtattccttgaaaatataaatatatgtatacactactaaattttgcatttatagctaaattgaatcagaagactgcttatggttttaaaattgcaatgacttaaataatgaggttgttaattagagtcagagcctgttcacatattgtgatcaggtagcaatgacatgtaccacttaaattattttatcgtcgatttggtagttcaattttaactactcaatgaaaacagccatgaatatcttttcttaaagagagttttgaaaatgatcacttacctaaaacttgaaagctatgaattagttatccatactctcatgacaattttgttggtgaacaacaaaaaagagatctatttctttaaaagatatttgtgcagaaactgcatgtaactctaagttttactcctaacatacatatgtttggggaagtattctattctatacttgccaatgtggagaacaaaatagttttttaagaatgaagaagtatatatatccattctgtattttacgtgcagcagaattatcttccgtaggatttttttgtgtattcacaaggtgatatttgtattgtaaaacaataatggtgaaggaaataaaaaggcttttaaaattttgtttgttttaaatctttgtaaagttattattccagagagtatactggtatcttacagcttacctagatcataaattaatcaaaatgcactttttaataaaaactgatacttaaaataaa

SEQ ID NO: 185883 - DNA, 1096 bp, Homo sapiens
  Payload ID: 16599
  Gene Symbol: SGMS1
  Gene Name: sphingomyelin synthase 1
  ENST ID: ENST00000361543
  CDS Start-End: 133-858
gccaaacaagtctctgctcatgaggccccacaggatgaacgagccgaggcaggacagtgtcctgccctgtcggaacagtgactgctgacctgccaagagagagctggggactgcctgctgtctgccagtacaatgaaggaagtggtttattggtcacccaagaaggtggcagactggctgctggagaatgctatgccagaatactgtgagcctctggagcatttcacaggccaggacttgatcaacctaacccaagaggatttcaaaaaaccccccttgtgccgagtctcctctgacaatgggcagcggctcctggacatgatagaaaccctgaaaatggagcaccatttggaagcacacaagaacggccatgccaatgggcacctcaacattggcgtagacatccccacccccgacggcagcttcagcatcaagattaaacccaacgggatgccaaatgggtataggaaagagatgataaagatccccatgccagaactggagcgctctcagtaccccatggagtggggcaagacttttctggcctttctttatgcactttcctgtttcgttctcaccacagtgatgatctcggtcgtccacgaacgagtacctcctaaggaggtgcagcctccactaccggacacattttttgaccattttaaccgggtgcagtgggccttttctatttgtgaaattaatggcatgatccttgtaggactctggttaattcagtggctgctcttaaaatacaaggatgtgggaaatgaaagcagagtcgtcatgatcttcctaagcatcgtccaccctgtccttctactggggtccatcgctggtttcctgtctctctccctgtgacctctcttcagtgtatctggcccaccagacaggtaggaggtaggaagaaagatacagatgacacatcaagcagtgaagatggataaactaccttttcctggctctcatagagaagaattggactttcaagccactgactaggaaaaattcctgggaaatctctgcatttgtgtcagacttcactgcaaaacaggtctattattagcagaagatttttctgcatagttggcacgctgta

SEQ ID NO: 185884 - DNA, 3634 bp, Homo sapiens
  Payload ID: 16599
  Gene Symbol: SGMS1
  Gene Name: sphingomyelin synthase 1
  ENST ID: ENST00000429490
  CDS Start-End: 955-1614
agcggactgggcatgctcggcagcccgggaggctcgcggtggcaagtcgaaagcgttcgcaccagcggggcagcggctgcgggcggcaggcggcgggcaggtcgggagtgagaaggaccggcctgggctgactgctctcccctcgcgcctagggagccggtcggagagcgcgattggggtgcggagccccgacgctgccctgccccggatttcattccgcggcgggggctccgcgagcggaattccggcggctgccgtgactccagtgcaacgtgacgacagcatgtacgatccctgaatgggcccgtgggcatatttagtcattcatttttgatcaggagaaagaagacagccatcatttgaaaggtaaagcttcagcgactgaaggagtgtggactttttgaatttcaagaacagtaaagttggaacacagcagagggtgtgtaataaaatacagattggaaagaagactgatgaagaaaaataacagcatgattcaggcacaccattgagttctttgggatgcccgaaagtgtctggttgggaaacatgaaatagaagacgagaacctgcctcagcaagcgtacctgagaatacttttaaaggaacctgttgataaatgcaaaacagtggctgttgcaggtgatggaactgtactggaacaatgggagaagctggtagcttataggaagccaagatgaccagaatgtttttaaataatccaaggaagaatcctgctcaaaaatgaggtgaattaatacttgggcgctcaggaaccctggacagctacatgaggtgtttaaaaactgccctgaccatcttgccaaacaagtctctgctcatgaggccccacaggatgaacgagccgaggcaggacagtgtcctgccctgtcggaacagtgactgctgacctgccaagagagagctggggactgcctgctgtctgccagtacaatgaaggaagtggtttattggtcacccaagaaggtggcagactggctgctggagaatgctatgccagaatactgtgagcctctggagcatttcacaggccaggacttgatcaacctaacccaagaggatttcaaaaaaccccccttgtgccgagtctcctctgacaatgggcagcggctcctggacatgatagaaaccctgaaaatggagcaccatttggaagcacacaagaacggccatgccaatgggcacctcaacattggcgtagacatccccacccccgacggcagcttcagcatcaagattaaacccaacgggatgccaaatgggtataggaaagagatgataaagatccccatgccagaactggagcgctctcagtaccccatggagtggggcaagacttttctggcctttctttatgcactttcctgtttcgttctcaccacagtgatgatctcggtcgtccacgaacgagtacctcctaaggaggtgcagcctccactaccggacacattttttgaccattttaaccgggtgcagtgggccttttctatttgtgaaattaatggcatgatccttgtaggactctggttaattcagtggctgctcttaaaatacaacttttcggagactgggaagcccaactgcgaagaataatgaagctcattgctggaggtggcttgtctatcactggctctcacaacatgtgtggggactatctgtacagcggccacacggtcatgctaacacttacctacttatttatcaaagagtattcccctcggcgactctggtggtatcactggatttgctggcttctcagcgtagttggaatcttctgtattctcttagcgcatgaccactacactgtggacgtggtggtggcatattacatcaccacgagactcttctggtggtatcacactatggccaatcagcaagtgctaaaggaagcttcccagatgaacctcctggccagggtgtggtggtacaggccatttcagtactttgaaaagaatgtccaaggaattgtacctcgatcttaccattggcctttcccctggccagtagtccacctcagtaggcaagttaaatacagccggctggtgaatgacacataacagctgtacaaagtggggaaaagacaaattgtccgaagtgctaagaactccatgagagaagatgccataaaataaacacctccctaatcctattatctttcaatggttaccttgacttaacctattgagttacctggtcagcactgtgatctttttttctctccaaaggacctgcgttggacaacaataaagaaaaatttaacctatcatgcactgtacacatttcctgttcataagtttgggatttacataacccgcaaccaccatgttcctttgtatatgatgcagcagcataaatgtaagcttttatatcataagttctggtctttccagtcacatctggaaataaagcgtattattttcttgggaaaacatacttttcatatctcttgccccaaagattgggctgtaagccattttctagcaaatgtctctatgaaggtttctaagtacctgaatggggtttgattctgaaatctttctacctgttgcaccgatattcaaataaaaatgatagacacagaaaggtttggtaactttgggttttgtaaaatcagcaaaggcagtgtttcaaaaagtgcaaaaaaaaagattctgttataaagtgattttctaagtatttcctaactttatttttcaaaatgatgttatgaacaccaaatttaaagatttttaacatgtcagagagaagagagttaaaatttaaaaatgcatcttgggagagaaatttgtctatgtttctagtgcctttcttgtcttgattgtatggtcagtaggcaatcttaaatgtttttatttaaaataaagtattccttgaaaatataaatatatgtatacactactaaattttgcatttatagctaaattgaatcagaagactgcttatggttttaaaattgcaatgacttaaataatgaggttgttaattagagtcagagcctgttcacatattgtgatcaggtagcaatgacatgtaccacttaaattattttatcgtcgatttggtagttcaattttaactactcaatgaaaacagccatgaatatcttttcttaaagagagttttgaaaatgatcacttacctaaaacttgaaagctatgaattagttatccatactctcatgacaattttgttggtgaacaacaaaaaagagatctatttctttaaaagatatttgtgcagaaactgcatgtaactctaagttttactcctaacatacatatgtttggggaagtattctattctatacttgccaatgtggagaacaaaatagttttttaagaatgaagaagtatatatatccattctgtattttacgtgcagcagaattatcttccgtaggatttttttgtgtattcacaaggtgatatttgtattgtaaaacaataatggtgaaggaaataaaaaggcttttaaaattttgtttgttttaaatctttgtaaagttattattccagagagtatactggtatcttacagcttacctagatcataaattaatcaaaatgcactttttaataaaaactgatacttaaaataaatggctgttatttct

SEQ ID NO: 185885 - DNA, 461 bp, Homo sapiens
  Payload ID: 16599
  Gene Symbol: SGMS1
  Gene Name: sphingomyelin synthase 1
  ENST ID: ENST00000602619
  CDS Start-End: 355-461
attaaacataggttttgattttttttgtacttaaatttttcctcctttcattcttaatgtctcccctgcatatctgtatgtatatatgtttatatatacgtaaatccacatgggatttccatgacctctcaaaatggaaagcaacaataatgcctgtccttgagaacttttttggtttttacaattgtaaataatgttgtctccccatttagaattggactttcaagccactgactaggaaaaattcctgggaaatctctgcatttgtgtcagacttcactgcaaaacaggtctattattagcagaagatttttctgcatagttggcacgctgtacctgtatcggtgtattacaatgtatgtaactacactcccagtacctggtatgcatttcaactgttctccgaagcttttcggagactgggaagcccaactgcgaagaataatgaagctcattgctgg

SEQ ID NO: 185886 - DNA, 1333 bp, Homo sapiens
  Payload ID: 16599
  Gene Symbol: SGMS1
  Gene Name: sphingomyelin synthase 1
  ENST ID: ENST00000602565
  CDS Start-End: 1-39
ctctggttaattcagtggctgctcttaaaatacaagtaagtcaagtaaaagctctaagattcaatgattatgggatttgcactccaaacatctacttattatttataaatgaaatttatcaacttgttgggatcaaaacatactatttttttttcttttttaaacacataccctgttggactaacttactgtctggaagctttaaaagaaaatgttgtttgttgcctgttttatgcaagattcatacaggatgatgaataagatggttagagatgatgctctgttttcacttaataagaaagaaaactctcagacatcttcagacagtacaggctattgaacaacagatcaaccacctagtcttggttggtgttactaacccattaaataaatcgacagttggcctaagcactataaattggctgcatagcttttcccacacagagtcagacatctagagccttagcaatatgtatttaaagatgtttcacacagaattcagaacacctgttccagagtggcttgggttgttgggaaaacaataccaaagggtatgcctttgggtaggtgggaagtggatggacctgaatggattcccaccttctactactactacttaaaacaatatgtgactgttgcattcaaatttctcagagttttaagtaggcaactcccacttagttccaggtgtatccaaggtggctttcatatctgaagctctaaactcaacatggaccccctcagactggctgtttactggggttgcctacattgtcccttcactgatgtttgattttctccttagttaaaggaacgccttatggtttccatgaatgagggttggaaattggtttgttaaagagctgagtttctctccagtggagtgtgtttcatgatccaccatgtggttaaatattaaggaattcatcttacagcaagaaaacaaaatgcacactgagagttcatgctgaatgttctttgacagaaatgataaggtttttcctagtatgttttataacaactcttttttttaacctgataaattatatatctacaaattgaaataaaagcagttcctgacactttcccagggatggacggtcttaactggtataaagaaagccatttaactgatcagtgtttatttacagatggtttgacagtcctagagtttaagctgaatctgaaatagaattgttggtctgggctgcatttaatttggtggaagacgtttttttctgttcctttggttttaagaggctaataaataggaataggctttagaaatacaagatacttggagtttattaaatgcattatttttgctgccaaa

SEQ ID NO: 185887 - DNA, 1680 bp, Homo sapiens
  Payload ID: 16599
  Gene Symbol: SGMS1
  Gene Name: sphingomyelin synthase 1
  ENST ID: ENST00000619438
  CDS Start-End: 955-1680
agcggactgggcatgctcggcagcccgggaggctcgcggtggcaagtcgaaagcgttcgcaccagcggggcagcggctgcgggcggcaggcggcgggcaggtcgggagtgagaaggaccggcctgggctgactgctctcccctcgcgcctagggagccggtcggagagcgcgattggggtgcggagccccgacgctgccctgccccggatttcattccgcggcgggggctccgcgagcggaattccggcggctgccgtgactccagtgcaacgtgacgacagcatgtacgatccctgaatgggcccgtgggcatatttagtcattcatttttgatcaggagaaagaagacagccatcatttgaaaggtaaagcttcagcgactgaaggagtgtggactttttgaatttcaagaacagtaaagttggaacacagcagagggtgtgtaataaaatacagattggaaagaagactgatgaagaaaaataacagcatgattcaggcacaccattgagttctttgggatgcccgaaagtgtctggttgggaaacatgaaatagaagacgagaacctgcctcagcaagcgtacctgagaatacttttaaaggaacctgttgataaatgcaaaacagtggctgttgcaggtgatggaactgtactggaacaatgggagaagctggtagcttataggaagccaagatgaccagaatgtttttaaataatccaaggaagaatcctgctcaaaaatgaggtgaattaatacttgggcgctcaggaaccctggacagctacatgaggtgtttaaaaactgccctgaccatcttgccaaacaagtctctgctcatgaggccccacaggatgaacgagccgaggcaggacagtgtcctgccctgtcggaacagtgactgctgacctgccaagagagagctggggactgcctgctgtctgccagtacaatgaaggaagtggtttattggtcacccaagaaggtggcagactggctgctggagaatgctatgccagaatactgtgagcctctggagcatttcacaggccaggacttgatcaacctaacccaagaggatttcaaaaaaccccccttgtgccgagtctcctctgacaatgggcagcggctcctggacatgatagaaaccctgaaaatggagcaccatttggaagcacacaagaacggccatgccaatgggcacctcaacattggcgtagacatccccacccccgacggcagcttcagcatcaagattaaacccaacgggatgccaaatgggtataggaaagagatgataaagatccccatgccagaactggagcgctctcagtaccccatggagtggggcaagacttttctggcctttctttatgcactttcctgtttcgttctcaccacagtgatgatctcggtcgtccacgaacgagtacctcctaaggaggtgcagcctccactaccggacacattttttgaccattttaaccgggtgcagtgggccttttctatttgtgaaattaatggcatgatccttgtaggactctggttaattcagtggctgctcttaaaatacaaggatgtgggaaatgaaagcagagtcgtcatgatcttcctaagcatcgtccaccctgtccttctactggggtccatcgctggtttcctgtctctctccctgtga

SEQ ID NO: 185888 - DNA, 1013 bp, Homo sapiens
  Payload ID: 16599
  Gene Symbol: SGMS1
  Gene Name: sphingomyelin synthase 1
  ENST ID: ENST00000626236
  CDS Start-End: 133-858
gccaaacaagtctctgctcatgaggccccacaggatgaacgagccgaggcaggacagtgtcctgccctgtcggaacagtgactgctgacctgccaagagagagctggggactgcctgctgtctgccagtacaatgaaggaagtggtttattggtcacccaagaaggtggcagactggctgctggagaatgctatgccagaatactgtgagcctctggagcatttcacaggccaggacttgatcaacctaacccaagaggatttcaaaaaaccccccttgtgccgagtctcctctgacaatgggcagcggctcctggacatgatagaaaccctgaaaatggagcaccatttggaagcacacaagaacggccatgccaatgggcacctcaacattggcgtagacatccccacccccgacggcagcttcagcatcaagattaaacccaacgggatgccaaatgggtataggaaagagatgataaagatccccatgccagaactggagcgctctcagtaccccatggagtggggcaagacttttctggcctttctttatgcactttcctgtttcgttctcaccacagtgatgatctcggtcgtccacgaacgagtacctcctaaggaggtgcagcctccactaccggacacattttttgaccattttaaccgggtgcagtgggccttttctatttgtgaaattaatggcatgatccttgtaggactctggttaattcagtggctgctcttaaaatacaaggatgtgggaaatgaaagcagagtcgtcatgatcttcctaagcatcgtccaccctgtccttctactggggtccatcgctggtttcctgtctctctccctgtgacctctcttcagtgtatctggcccaccagacagaattggactttcaagccactgactaggaaaaattcctgggaaatctctgcatttgtgtcagacttcactgcaaaacaggtctattattagcagaagatttttctgcatagttggcacgctgta

SEQ ID NO: 185889 - DNA, 1887 bp, Homo sapiens
  Payload ID: 16600
  Gene Symbol: SGMS2
  Gene Name: sphingomyelin synthase 2
  Uniprot ID: Q8NHU3
  ENST ID: ENST00000359079
  CDS Start-End: 390-1487
agctaccttataaagaccatctgtacatccactgtgaaatggagtttcaaaatcacaagcttctttcccacatgaacataagactaggagcacatatggaagagtaaagttgaagggaatttggatgatgatttggcaagatgctgtgggatagtaacatctttttgagggaagaattggcttcctttcttgaaagtggtgaaggtacagcatatagctgcatggaagaaacagtaatcggatggctaccttctacattttgtattaggaaacaaagtccattgtaagagtccatgttgatcttggaaatagaaggattgaaaaaagctaaatttccacaaagaacaagaacttgaccatctcctttttgatctgaagactaggggacaatggatatcatagagacagcaaaacttgaagaacatttggaaaatcaacccagtgatcctacgaacacttatgcaagacccgctgaacctgttgaagaagaaaacaaaaatggcaatggtaaacccaagagcttatccagtgggctgcgaaaaggcaccaaaaagtacccggactatatccaaattgctatgcccactgaatcaaggaacaaatttccactagagtggtggaaaacgggcattgccttcatatatgcagttttcaacctcgtcttgacaaccgtcatgatcacagttgtacatgagagggtccctcccaaggagcttagccctccactcccagacaagttttttgattacattgatagggtgaaatgggcattttctgtatcagaaataaatgggattatattagttggattatggatcacccagtggctgtttctgagatacaagtcaatagtgggacgcagattctgttttattattggaactttatacctgtatcgctgcattacaatgtatgttactactctacctgtgcctggaatgcatttccagtgtgctccaaagctcaatggagactctcaggcaaaagttcaacggattctacgattgatttctggtggtggattgtccataactggatcacatatcttatgtggagacttcctcttcagcggtcacacggttacgctgacactgacttatttgttcatcaaagaatattcgcctcgtcacttctggtggtatcatttaatctgctggctgctgagtgctgccgggatcatctgcattcttgtagcacacgaacactacactatcgatgtgatcattgcttattatatcacaacacgactgttttggtggtaccattcaatggccaatgaaaagaacttgaaggtctcttcacagactaatttcttatctcgagcatggtggttccccatcttttatttttttgagaaaaatgtacaaggctcaattccttgctgcttctcctggccgctgtcttggcctcctggctgcttcaaatcatcatgcaaaaagtattcacgggttcagaagattggtgaagacaatgagaaatcgacctgaggagcaaaacaaaggcatcagctcttacaccaaaagagttaacgctgtaaccaaaggtatagttttgttttttattttaggagaactgactggtaaatgaagaaatggaccaaattttgtgtaaacgattagaaagatgaacaaagtattgccctttgactggttttcttcttcatcctgagaaagatacattctcttgcagctcttcattcattggtgacaagcccccaccccgggactttactaatgagcttgttaaagaggtgccaaagaacatattcctcctttctttattctttctccaccaaaaccctctacttcagaattttttcaggatatttttcagcccaaggtcagaagaatgtgttaatattttaaataaaatatctggacatctaca

SEQ ID NO: 185890 - DNA, 6149 bp, Homo sapiens
  Payload ID: 16600
  Gene Symbol: SGMS2
  Gene Name: sphingomyelin synthase 2
  Uniprot ID: Q8NHU3
  ENST ID: ENST00000394684
  CDS Start-End: 558-1655
agattgatctctgttgccgctcagggaggtcagctccaggccctcagcctttcggccgggagccaaactgccctgcctgccaagcccctccttctctgcaccttaaacagccgcgaggggagagtcggctgggattttcttcttaagaagtcgcgcaggtttttcgagctccactctgcgccaggagagccacggcagcaggaacgggcactgctgccaccgggccgacggagctgcatcctgtggccctataacactcttctccaaaaggacctgccagagactgggagtgttgactgctgcaaggaccaaggtgggatagtaacatctttttgagggaagaattggcttcctttcttgaaagtggtgaaggtacagcatatagctgcatggaagaaacagtaatcggatggctaccttctacattttgtattaggaaacaaagtccattgtaagagtccatgttgatcttggaaatagaaggattgaaaaaagctaaatttccacaaagaacaagaacttgaccatctcctttttgatctgaagactaggggacaatggatatcatagagacagcaaaacttgaagaacatttggaaaatcaacccagtgatcctacgaacacttatgcaagacccgctgaacctgttgaagaagaaaacaaaaatggcaatggtaaacccaagagcttatccagtgggctgcgaaaaggcaccaaaaagtacccggactatatccaaattgctatgcccactgaatcaaggaacaaatttccactagagtggtggaaaacgggcattgccttcatatatgcagttttcaacctcgtcttgacaaccgtcatgatcacagttgtacatgagagggtccctcccaaggagcttagccctccactcccagacaagttttttgattacattgatagggtgaaatgggcattttctgtatcagaaataaatgggattatattagttggattatggatcacccagtggctgtttctgagatacaagtcaatagtgggacgcagattctgttttattattggaactttatacctgtatcgctgcattacaatgtatgttactactctacctgtgcctggaatgcatttccagtgtgctccaaagctcaatggagactctcaggcaaaagttcaacggattctacgattgatttctggtggtggattgtccataactggatcacatatcttatgtggagacttcctcttcagcggtcacacggttacgctgacactgacttatttgttcatcaaagaatattcgcctcgtcacttctggtggtatcatttaatctgctggctgctgagtgctgccgggatcatctgcattcttgtagcacacgaacactacactatcgatgtgatcattgcttattatatcacaacacgactgttttggtggtaccattcaatggccaatgaaaagaacttgaaggtctcttcacagactaatttcttatctcgagcatggtggttccccatcttttatttttttgagaaaaatgtacaaggctcaattccttgctgcttctcctggccgctgtcttggcctcctggctgcttcaaatcatcatgcaaaaagtattcacgggttcagaagattggtgaagacaatgagaaatcgacctgaggagcaaaacaaaggcatcagctcttacaccaaaagagttaacgctgtaaccaaaggtatagttttgttttttattttaggagaactgactggtaaatgaagaaatggaccaaattttgtgtaaacgattagaaagatgaacaaagtattgccctttgactggttttcttcttcatcctgagaaagatacattctcttgcagctcttcattcattggtgacaagcccccaccccgggactttactaatgagcttgttaaagaggtgccaaagaacatattcctcctttctttattctttctccaccaaaaccctctacttcagaattttttcaggatatttttcagcccaaggtcagaagaatgtgttaatattttaaataaaatatctggacatctacagccactgtgtaaatagaactgcctaatgttgagagtggtttttagcattaggtttagcaagggggagatccgtgggttgtgcgtcagctttgggtgaattttgtttctaccctgtcacggggaaagttcgggttgagtccaggagtgcacactgctgctgccacccaatgcgctacatatcacttttttttgttttgttttgttttgtttttaaaagatcattttatcttaaaaaggaaagctgatccaagtaaacacgaaagtatttgacacaccccacagattttacatgtgtgtaaatgtttcactttaaaatctctatgacagatacacaggaaacatgagatggtttctgctaatgagtggcccttgagtacacacttagatgctgtctgccctgtaaatttggatctggtgccccagggcagtcaactcttctagcacaggctgaaaacacgtgtgtgtcaactgaggttcacaccacttggggaatgagcctgttttctttccaggtcaggccctggtgtgagatcaattttagggctcctaattggagcacagaaatgtatttggtcaaatttcattgaaggtgatttcttcctttttctgttgtactttatggaaaaaccaagatggaacctgaaagttaatgtatccttgcttttagcaagagactcagtttcttataactagtcctaaggacatatgccgcaattgagtaattttacttttaccctatgaaaataacatggtgctgcactataatatactctcggaatcagtgtgttagttacagctatacagtgaagggggataactgtttctaaatttctttaaggtgatgccaaaaaatggattaaaaaatctgatcagatttaatgttaccagatttagtgcattatttaatgctattggatcttttggataattcttggcttaatttcttagctacttgaaggttaatttgcaagacttttaaaaccttagaaaagttttaaggttgcaaagttatcaacactggggcagagggtggagaggccaatgcgggtagaaggaggcagttatgtttatattgaaggtgaaatttttctttcatttagaatggaaaacatccccaaatgtatcattataaactagtcagccttgactacacaaaattgacctttaagttgcttgagaaaaacacaatgcaaatcgttcagaagggtcaacatcctttggtgctaaaatcttgtgtatgttttcagaatggctttttctgtatgttatagaataatcactaaaggaaaggtagttgaatttaaagtcatgaagcaagactctttaattcagttattttaaacaagaattaaaaccccaaacatccttggcaggctttgaagcacacagaattttctagtatttcttattaaatacaccaataataaacatatacttagtttacctgatgagtttagacataattctatataatgttcgcttatattcatttattaactagcaacacttgtgcaagaacaaggtattctgcttgaaaacactgatttttaagttcctgttgcccgattgtaaagaaaatcatctgacacagaagcctggattttgctctcctaacactggtgttttccttgagcctctaattcaaataaaacaaactgatacaccttacagccttattcatctgtgtctggataactcacttttcatctattgaataagaaaaagtgtttaaacttaataaaataaaaaattgtgcaccaattactacagatccttgaaacagtaagccttggattttagtcaagtaatccagtttttttttaatttaaaaaaaaccatcaccttttaaagaactttaaaaacacctgtgatgccaatgtggacattgccgctgccatgtctttacacgcatgtgtcgtatagctctgtcatcgagttgaggaagtccatggtttgcaaataagggtgggggaatcaaaatttcaagatggaaaaataaaacaaatagtaaaacccatttacatgtaggaaagaaaagttgagcttcaacccaatgtgccactttgatataaaacaagtatgatatatatataaactgaagatataaaacaagtatgatcttgcctttgaaatcataaatgtttggggtacctgttctttgccagttaagatacatatcttattatctttgtttttttcaagtctatgctcctgtttgaagcttttcctgtaatttaggttgtctgtgaaatacctataacatataattcctatagagtatgccacattttttttctaactcatttcaaatgaaattctctcagattctagtttttgagcttgtccactagatctgaaaataaagcatcctttcctgagtccacttgaactaattgtgaatttgttacttaatttactggcatcttgggaaacaagttttgctgtggcaggaaggctgttttgagagtgagcgttgagtctactctggtttgtggatgacattgcattagggttatttcctgtattaccagtgcccccttgtggcaatatactttatgacttggaatgcaaacaccacttttaaaagcctgttttcaagtttttgaaaggcatttgttttctgttgtttgccaataatctgaaagtatcatgtgaaaggaattattttaaaagcattttaaacctttcccaaaggtaaaatgtgctcagattataggcacttgtaattctaaccttgtatccatttgatcaaagaaaatttgtagaacatttttacctctcatgatcacaatcattagtgtctccctttataacgacctatgttttgtttactttgaaacaccaaatttgttgtcttggttttttttacatgacagaactcatgcagtttcttttttagttgaaagttcacatcttgccccttgaatagtttgaacatttctttcttaattcttttttgtttttgttttgcactgtaaaactgatgaaaactttaagccaatcttaatgcactagcctctgtagtgtaaggaagtgtgagaaggagtttcttaatgagtttacacgtttaaatcaagcatattataagttatatgccatgtgttgaaggcttttctatttatatatataaagatttttagtatttgtttttagtgtccttgtgttgcaataatttaactcctttgactcagttgctgaaaatatttcttctattaagaagtgctcttgacttcaacacccaaacactgaaaatcatgtcaatgttacccaaagataagtttttatacagatacacaccttataagttctgatttattttcttactcattatgctgtgttctaaataaatcatgaatgagaagagtgctttattgtgaaattatttaaaactgtcctttaaaagaaaaagaggaaacgatgaacaaaaactaatctaattgccaagttagaattcattatttaatttacctcctatgcaatgattaatgctgcaaaatgtatggttatgttaccgtatattcacaaaagaaatattattacaaggtttcagaggtagccaattgcattcttttggaaatttactgtactgtttcaatgtgttaagtgccttgttgtaaagtaaaattttaagtctagattcattattttcctgacatatatttttcattatgatatctactgtatgctattgtgatagttttatgaaatgcttacattttaatcaaatatgtaaatttcagaagctcttttttcctacccaccagtaccttaatcattggtttatcacattggattcaaattcaggttccttttttgataaagaggaaatttgttttccatgcttgtgattttgtgtttgtaaacatttcaggaggaatttaggagtgtaactatagtttatacttctataatgttgtcttacatttacatttttaagtgcctaattgttaaaactgatttatgtttctcttctaaagaggatatgtgtacttggtttctaatctctttggttttgctttttaaaaaatgcaagagcctatactttgtatttacctaataaaccacagtgacatcaacagtcttttcaaaattaa

SEQ ID NO: 185891 - DNA, 2127 bp, Homo sapiens
  Payload ID: 16600
  Gene Symbol: SGMS2
  Gene Name: sphingomyelin synthase 2
  Uniprot ID: Q8NHU3
  ENST ID: ENST00000394686
  CDS Start-End: 630-1727
aaatggagtttcaaaatcacaagcttctttcccacatgaacataagactaggagcacatatggaagagtaaagttgaagggaatttggatgatgatttggcaagatgctgtaagtggattaggcaaggctgctaaagagagacaggaaatggctgtgttagtgcttcggacctccgttagaagtagcagttcatggtgttgaaggtttgttgttgaaaataccttcctgaggcacctcttcattgtgcttattcttcccacaacattgtgccaagacactgtcaagcctgggcctgtcaaagcctgggatgtcaaaggcctgggtctttctcatcctgctgtaatgtattgatagctgggggctctgcagaaggacaagggaaaggtgggatagtaacatctttttgagggaagaattggcttcctttcttgaaagtggtgaaggtacagcatatagctgcatggaagaaacagtaatcggatggctaccttctacattttgtattaggaaacaaagtccattgtaagagtccatgttgatcttggaaatagaaggattgaaaaaagctaaatttccacaaagaacaagaacttgaccatctcctttttgatctgaagactaggggacaatggatatcatagagacagcaaaacttgaagaacatttggaaaatcaacccagtgatcctacgaacacttatgcaagacccgctgaacctgttgaagaagaaaacaaaaatggcaatggtaaacccaagagcttatccagtgggctgcgaaaaggcaccaaaaagtacccggactatatccaaattgctatgcccactgaatcaaggaacaaatttccactagagtggtggaaaacgggcattgccttcatatatgcagttttcaacctcgtcttgacaaccgtcatgatcacagttgtacatgagagggtccctcccaaggagcttagccctccactcccagacaagttttttgattacattgatagggtgaaatgggcattttctgtatcagaaataaatgggattatattagttggattatggatcacccagtggctgtttctgagatacaagtcaatagtgggacgcagattctgttttattattggaactttatacctgtatcgctgcattacaatgtatgttactactctacctgtgcctggaatgcatttccagtgtgctccaaagctcaatggagactctcaggcaaaagttcaacggattctacgattgatttctggtggtggattgtccataactggatcacatatcttatgtggagacttcctcttcagcggtcacacggttacgctgacactgacttatttgttcatcaaagaatattcgcctcgtcacttctggtggtatcatttaatctgctggctgctgagtgctgccgggatcatctgcattcttgtagcacacgaacactacactatcgatgtgatcattgcttattatatcacaacacgactgttttggtggtaccattcaatggccaatgaaaagaacttgaaggtctcttcacagactaatttcttatctcgagcatggtggttccccatcttttatttttttgagaaaaatgtacaaggctcaattccttgctgcttctcctggccgctgtcttggcctcctggctgcttcaaatcatcatgcaaaaagtattcacgggttcagaagattggtgaagacaatgagaaatcgacctgaggagcaaaacaaaggcatcagctcttacaccaaaagagttaacgctgtaaccaaaggtatagttttgttttttattttaggagaactgactggtaaatgaagaaatggaccaaattttgtgtaaacgattagaaagatgaacaaagtattgccctttgactggttttcttcttcatcctgagaaagatacattctcttgcagctcttcattcattggtgacaagcccccaccccgggactttactaatgagcttgttaaagaggtgccaaagaacatattcctcctttctttattctttctccaccaaaaccctctacttcagaattttttcaggatatttttcagcccaaggtcagaagaatgtgttaatattttaaataaaatatctggacatctaca

SEQ ID NO: 185892 - DNA, 567 bp, Homo sapiens
  Payload ID: 16600
  Gene Symbol: SGMS2
  Gene Name: sphingomyelin synthase 2
  ENST ID: ENST00000503862
  CDS Start-End: 193-567
gcaagtgccttcagctgggagtgtctggagccctggccaccagcggagctgcatcctgtggccctataacactcttctccaaaaggacctgccagagactgggagtgttgactgctgcaaggaccaaggtcaatagtgggacgcagattctgttttattattggaactttatacctgtatcgctgcattacaatgtatgttactactctacctgtgcctggaatgcatttccagtgtgctccaaagctcaatggagactctcaggcaaaagttcaacggattctacgattgatttctggtggtggattgtccataactggatcacatatcttatgtggagacttcctcttcagcggtcacacggttacgctgacactgacttatttgttcatcaaagaatattcgcctcgtcacttctggtggtatcatttaatctgctggctgctgagtgctgccgggatcatctgcattcttgtagcacacgaacactacactatcgatgtgatcattgcttattatatcacaacacgactgttttggtggtaccattcaatggccaatgaaaag

SEQ ID NO: 185893 - DNA, 570 bp, Homo sapiens
  Payload ID: 16600
  Gene Symbol: SGMS2
  Gene Name: sphingomyelin synthase 2
  ENST ID: ENST00000506993
  CDS Start-End: 467-570
atctgtacatccactgtgaaatggagtttcaaaatcacaagcttctttcccacatgaacataagactaggagcacatatggaagagtaaagttgaagggaatttggatgatgatttggcaagatgctgtaagtggattaggcaaggctgctaaagagagacaggaaatggctgtgttagtgcttcggacctccgttagaagtagcagttcatggtgttgaaggtgggatagtaacatctttttgagggaagaattggcttcctttcttgaaagtggtgaaggtacagcatatagctgcatggaagaaacagtaatcggatggctaccttctacattttgtattaggaaacaaagtccattgtaagagtccatgttgatcttggaaatagaaggattgaaaaaagctaaatttccacaaagaacaagaacttgaccatctcctttttgatctgaagactaggggacaatggatatcatagagacagcaaaacttgaagaacatttggaaaatcaacccagtgatcctacgaacacttatgcaagacccgctgaacctgttgaagaagaaaa

SEQ ID NO: 185894 - DNA, 581 bp, Homo sapiens
  Payload ID: 16600
  Gene Symbol: SGMS2
  Gene Name: sphingomyelin synthase 2
  ENST ID: ENST00000503385
  CDS Start-End: 448-581
gagcagtgtatccagggagaggactaattacgaggtttgaaaacctcatcaggtggctggtttctgtagcaggactaaaagactgctctcctaaattgagaacagctggggctgtgtgctagcaagtataaaagaggtggcagtggtgccccgtgtccgaaagaagtgtgtgctctctggagcctgtggagctgaagccaaaggtgggatagtaacatctttttgagggaagaattggcttcctttcttgaaagtggtgaaggtacagcatatagctgcatggaagaaacagtaatcggatggctaccttctacattttgtattaggaaacaaagtccattgtaagagtccatgttgatcttggaaatagaaggattgaaaaaagctaaatttccacaaagaacaagaacttgaccatctcctttttgatctgaagactaggggacaatggatatcatagagacagcaaaacttgaagaacatttggaaaatcaacccagtgatcctacgaacacttatgcaagacccgctgaacctgttgaagaagaaaacaaaaatggcaatggtaaacccaagagctt

SEQ ID NO: 185895 - DNA, 2138 bp, Homo sapiens
  Payload ID: 16601
  Gene Symbol: SPHK1
  Gene Name: sphingosine kinase 1
  Uniprot ID: Q9NYA1
  ENST ID: ENST00000323374
  CDS Start-End: 457-1869
gaaaagtttgaggccggagggagcgaggccggggagtccgctccagcggggcgctccagtccctcagacgtgggctgagcttgggacgagctgcgttccgccccaggccactgtagggaacggcggtggcgcctccccagcaaaccggaccgactgggtagggccgcccaccctgccttcgcgccgctcgtggctcctgtgcggcccgccctcgcggggccccgggaactgggccacttgtcgcttgggcgagagcaggcggcagctggtggcccggttcgggcttggctttggcgcgacccgggagcggctcccacgagcgccgcgcgcgtcgcaacggagcggggccctgagaagcgcgcgccgcggctcccaccgctctggagctccgggcaggggacacggcaacctggatggctggggcagggatcctctcccagaacttcgtgcccagcaatgtccgctcaagttctgggatttttacgcagctggactcccctccccctggcagccccgaggggtccagccgccgcagggaatgacgccggtgctcctgcagccacggctccgggcggggaaggcgagccccacagccggccctgcgacgcccgcctgggcagcaccgataaggagctgaaggcaggagccgccgccacgggcagcgcccccacagcgccagggaccccctggcagcgggagccgcgggtcgaggttatggatccagcgggcggcccccggggcgtgctcccgcggccctgccgcgtgctggtgctgctgaacccgcgcggcggcaagggcaaggccttgcagctcttccggagtcacgtgcagccccttttggctgaggctgaaatctccttcacgctgatgctcactgagcggcggaaccacgcgcgggagctggtgcggtcggaggagctgggccgctgggacgctctggtggtcatgtctggagacgggctgatgcacgaggtggtgaacgggctcatggagcggcctgactgggagaccgccatccagaagcccctgtgtagcctcccagcaggctctggcaacgcgctggcagcttccttgaaccattatgctggctatgagcaggtcaccaatgaagacctcctgaccaactgcacgctattgctgtgccgccggctgctgtcacccatgaacctgctgtctctgcacacggcttcggggctgcgcctcttctctgtgctcagcctggcctggggcttcattgctgatgtggacctagagagtgagaagtatcggcgtctgggggagatgcgcttcactctgggcaccttcctgcgtctggcagccctgcgcacctaccgcggccgactggcctacctccctgtaggaagagtgggttccaagacacctgcctcccccgttgtggtccagcagggcccggtagatgcacaccttgtgccactggaggagccagtgccctctcactggacagtggtgcccgacgaggactttgtgctagtcctggcactgctgcactcgcacctgggcagtgagatgtttgctgcacccatgggccgctgtgcagctggcgtcatgcatctgttctacgtgcgggcgggagtgtctcgtgccatgctgctgcgcctcttcctggccatggagaagggcaggcatatggagtatgaatgcccctacttggtatatgtgcccgtggtcgccttccgcttggagcccaaggatgggaaaggtgtgtttgcagtggatggggaattgatggttagcgaggccgtgcagggccaggtgcacccaaactacttctggatggtcagcggttgcgtggagcccccgcccagctggaagccccagcagatgccaccgccagaagagcccttatgacccctgggccgcgctgtgccttagtgtctacttgcaggacccttcctccttccctagggctgcagggcctgtccacagctcctgtgggggtggaggagactcctctggagaagggtgagaaggtggaggctatgctttggggggacaggccagaatgaagtcctgggtcaggagcccagctggctgggcccagctgcctatgtaaggccttctagtttgttctgagacccccaccccacgaaccaaatccaaataaagtgacattccca

SEQ ID NO: 185896 - DNA, 1779 bp, Homo sapiens
  Payload ID: 16601
  Gene Symbol: SPHK1
  Gene Name: sphingosine kinase 1
  Uniprot ID: Q9NYA1
  ENST ID: ENST00000392496
  CDS Start-End: 354-1508
agtcacacggcgggggcgccctcggaggcaccggacctcagctctctggacttcccgggaacctggctccccgcgcgtggtcccgggatttagtcgggcgctccccacctctggcagctgcggccccggactccgccagcgctgtcttctctccctcaggtccagccgccgcagggaatgacgccggtgctcctgcagccacggctccgggcggggaaggcgagccccacagccggccctgcgacgcccgcctgggcagcaccgataaggagctgaaggcaggagccgccgccacgggcagcgcccccacagcgccagggaccccctggcagcgggagccgcgggtcgaggttatggatccagcgggcggcccccggggcgtgctcccgcggccctgccgcgtgctggtgctgctgaacccgcgcggcggcaagggcaaggccttgcagctcttccggagtcacgtgcagccccttttggctgaggctgaaatctccttcacgctgatgctcactgagcggcggaaccacgcgcgggagctggtgcggtcggaggagctgggccgctgggacgctctggtggtcatgtctggagacgggctgatgcacgaggtggtgaacgggctcatggagcggcctgactgggagaccgccatccagaagcccctgtgtagcctcccagcaggctctggcaacgcgctggcagcttccttgaaccattatgctggctatgagcaggtcaccaatgaagacctcctgaccaactgcacgctattgctgtgccgccggctgctgtcacccatgaacctgctgtctctgcacacggcttcggggctgcgcctcttctctgtgctcagcctggcctggggcttcattgctgatgtggacctagagagtgagaagtatcggcgtctgggggagatgcgcttcactctgggcaccttcctgcgtctggcagccctgcgcacctaccgcggccgactggcctacctccctgtaggaagagtgggttccaagacacctgcctcccccgttgtggtccagcagggcccggtagatgcacaccttgtgccactggaggagccagtgccctctcactggacagtggtgcccgacgaggactttgtgctagtcctggcactgctgcactcgcacctgggcagtgagatgtttgctgcacccatgggccgctgtgcagctggcgtcatgcatctgttctacgtgcgggcgggagtgtctcgtgccatgctgctgcgcctcttcctggccatggagaagggcaggcatatggagtatgaatgcccctacttggtatatgtgcccgtggtcgccttccgcttggagcccaaggatgggaaaggtgtgtttgcagtggatggggaattgatggttagcgaggccgtgcagggccaggtgcacccaaactacttctggatggtcagcggttgcgtggagcccccgcccagctggaagccccagcagatgccaccgccagaagagcccttatgacccctgggccgcgctgtgccttagtgtctacttgcaggacccttcctccttccctagggctgcagggcctgtccacagctcctgtgggggtggaggagactcctctggagaagggtgagaaggtggaggctatgctttggggggacaggccagaatgaagtcctgggtcaggagcccagctggctgggcccagctgcctatgtaaggccttctagtttgttctgagacccccaccccacgaaccaaatccaaataaagtgacattcccagc

SEQ ID NO: 185897 - DNA, 2238 bp, Homo sapiens
  Payload ID: 16601
  Gene Symbol: SPHK1
  Gene Name: sphingosine kinase 1
  Uniprot ID: Q9NYA1
  ENST ID: ENST00000545180
  CDS Start-End: 810-1964
aatgcagctctgccttcctgctccctgtgcagaggtgccggctcctgcttcctggttcccagctttccttttgggaactgcctgaggtggtttgacacacagctgttgggcttctcttcccttgaggtctctgaaccagggcacccatgcagggagagggccctctgaaggtgaaggcagagacggggacgacgcagcagcaagacacggatgaccaaaggctgtcggcaaaccaccaggacacaggcctgggacagagtcacagcctcagaaggaaccaaccctgccaacaccgtgatcgtagacttcccaacctccaaaactgtgagacagtcaatttctgttgtctacgccaccaggacactaatacaaatgcctatagatgctgggcaggcagctgagacaaatggagtgggtagggctgcagctcgccaccttgagagggctctgaagagaatcaccctgaattgcagccacagtcagcagcctggagatggagtttcgccctgtcacccaggctggagtgcaatgggacgatctcagctcaccacaacctctgcctcctgggtgcaagcaattctcctgcctcagcctcccaagtagctgggactacaggtccagccgccgcagggaatgacgccggtgctcctgcagccacggctccgggcggggaaggcgagccccacagccggccctgcgacgcccgcctgggcagcaccgataaggagctgaaggcaggagccgccgccacgggcagcgcccccacagcgccagggaccccctggcagcgggagccgcgggtcgaggttatggatccagcgggcggcccccggggcgtgctcccgcggccctgccgcgtgctggtgctgctgaacccgcgcggcggcaagggcaaggccttgcagctcttccggagtcacgtgcagccccttttggctgaggctgaaatctccttcacgctgatgctcactgagcggcggaaccacgcgcgggagctggtgcggtcggaggagctgggccgctgggacgctctggtggtcatgtctggagacgggctgatgcacgaggtggtgaacgggctcatggagcggcctgactgggagaccgccatccagaagcccctgtgtagcctcccagcaggctctggcaacgcgctggcagcttccttgaaccattatgctggctatgagcaggtcaccaatgaagacctcctgaccaactgcacgctattgctgtgccgccggctgctgtcacccatgaacctgctgtctctgcacacggcttcggggctgcgcctcttctctgtgctcagcctggcctggggcttcattgctgatgtggacctagagagtgagaagtatcggcgtctgggggagatgcgcttcactctgggcaccttcctgcgtctggcagccctgcgcacctaccgcggccgactggcctacctccctgtaggaagagtgggttccaagacacctgcctcccccgttgtggtccagcagggcccggtagatgcacaccttgtgccactggaggagccagtgccctctcactggacagtggtgcccgacgaggactttgtgctagtcctggcactgctgcactcgcacctgggcagtgagatgtttgctgcacccatgggccgctgtgcagctggcgtcatgcatctgttctacgtgcgggcgggagtgtctcgtgccatgctgctgcgcctcttcctggccatggagaagggcaggcatatggagtatgaatgcccctacttggtatatgtgcccgtggtcgccttccgcttggagcccaaggatgggaaaggtgtgtttgcagtggatggggaattgatggttagcgaggccgtgcagggccaggtgcacccaaactacttctggatggtcagcggttgcgtggagcccccgcccagctggaagccccagcagatgccaccgccagaagagcccttatgacccctgggccgcgctgtgccttagtgtctacttgcaggacccttcctccttccctagggctgcagggcctgtccacagctcctgtgggggtggaggagactcctctggagaagggtgagaaggtggaggctatgctttggggggacaggccagaatgaagtcctgggtcaggagcccagctggctgggcccagctgcctatgtaaggccttctagtttgttctgagacccccaccccacgaaccaaatccaaataaagtgacattcccagcctg

SEQ ID NO: 185898 - DNA, 588 bp, Homo sapiens
  Payload ID: 16601
  Gene Symbol: SPHK1
  Gene Name: sphingosine kinase 1
  ENST ID: ENST00000590379
  CDS Start-End: 254-588
gagcccccggcctgtcgcctgctctacccgggacagcgcgctaggcggcctcaggctcggtccagccgccgcagggaatgacgccggtgctcctgcagccacggctccgggcggggaaggcgagccccacagccggccctgcgacgcccgcctgggcagcaccgataaggagctgaaggcaggagccgccgccacgggcagcgcccccacagcgccagggaccccctggcagcgggagccgcgggtcgaggttatggatccagcgggcggcccccggggcgtgctcccgcggccctgccgcgtgctggtgctgctgaacccgcgcggcggcaagggcaaggccttgcagctcttccggagtcacgtgcagccccttttggctgaggctgaaatctccttcacgctgatgctcactgagcggcggaaccacgcgcgggagctggtgcggtcggaggagctgggccgctgggacgctctggtggtcatgtctggagacgggctgatgcacgaggtggtgaacgggctcatggagcggcctgactgggagaccgccatccagaagcccctgtgtagcctcccagcaggctc

SEQ ID NO: 185899 - DNA, 1821 bp, Homo sapiens
  Payload ID: 16601
  Gene Symbol: SPHK1
  Gene Name: sphingosine kinase 1
  Uniprot ID: Q9NYA1
  ENST ID: ENST00000592299
  CDS Start-End: 393-1547
agtgccctccccgctccgcggcgccggctgcgaagttgagcgaaaagtttgaggccggagggagcgaggccggggagtccgctccagcggggcgctccagtccctcagacgtgggctgagcttgggacgagctgcgttccgccccaggccactgtagggaacggcggtggcgcctccccagcaaaccggaccgactgggtccagccgccgcagggaatgacgccggtgctcctgcagccacggctccgggcggggaaggcgagccccacagccggccctgcgacgcccgcctgggcagcaccgataaggagctgaaggcaggagccgccgccacgggcagcgcccccacagcgccagggaccccctggcagcgggagccgcgggtcgaggttatggatccagcgggcggcccccggggcgtgctcccgcggccctgccgcgtgctggtgctgctgaacccgcgcggcggcaagggcaaggccttgcagctcttccggagtcacgtgcagccccttttggctgaggctgaaatctccttcacgctgatgctcactgagcggcggaaccacgcgcgggagctggtgcggtcggaggagctgggccgctgggacgctctggtggtcatgtctggagacgggctgatgcacgaggtggtgaacgggctcatggagcggcctgactgggagaccgccatccagaagcccctgtgtagcctcccagcaggctctggcaacgcgctggcagcttccttgaaccattatgctggctatgagcaggtcaccaatgaagacctcctgaccaactgcacgctattgctgtgccgccggctgctgtcacccatgaacctgctgtctctgcacacggcttcggggctgcgcctcttctctgtgctcagcctggcctggggcttcattgctgatgtggacctagagagtgagaagtatcggcgtctgggggagatgcgcttcactctgggcaccttcctgcgtctggcagccctgcgcacctaccgcggccgactggcctacctccctgtaggaagagtgggttccaagacacctgcctcccccgttgtggtccagcagggcccggtagatgcacaccttgtgccactggaggagccagtgccctctcactggacagtggtgcccgacgaggactttgtgctagtcctggcactgctgcactcgcacctgggcagtgagatgtttgctgcacccatgggccgctgtgcagctggcgtcatgcatctgttctacgtgcgggcgggagtgtctcgtgccatgctgctgcgcctcttcctggccatggagaagggcaggcatatggagtatgaatgcccctacttggtatatgtgcccgtggtcgccttccgcttggagcccaaggatgggaaaggtgtgtttgcagtggatggggaattgatggttagcgaggccgtgcagggccaggtgcacccaaactacttctggatggtcagcggttgcgtggagcccccgcccagctggaagccccagcagatgccaccgccagaagagcccttatgacccctgggccgcgctgtgccttagtgtctacttgcaggacccttcctccttccctagggctgcagggcctgtccacagctcctgtgggggtggaggagactcctctggagaagggtgagaaggtggaggctatgctttggggggacaggccagaatgaagtcctgggtcaggagcccagctggctgggcccagctgcctatgtaaggccttctagtttgttctgagacccccaccccacgaaccaaatccaaataaagtgacattcccagcctg

SEQ ID NO: 185900 - DNA, 858 bp, Homo sapiens
  Payload ID: 16601
  Gene Symbol: SPHK1
  Gene Name: sphingosine kinase 1
  ENST ID: ENST00000588682
  CDS Start-End: 403-858
aagtgctaggattacaggagtgagccactgcgcccggcctgctgcttcctcctcctcagggagacgccacagctctgcggcaagcaatccaccaggcaccagatccccagatacctgcccttcagggagaaatagcctgggatacagagaggcccagaggggagctctggctggacttggcttctcagcgtggggtctgggttcacaggtccagccgccgcagggaatgacgccggtgctcctgcagccacggctccgggcggggaaggcgagccccacagccggccctgcgacgcccgcctgggcagcaccgataaggagctgaaggcaggagccgccgccacgggcagcgcccccacagcgccagggaccccctggcagcgggagccgcgggtcgaggttatggatccagcgggcggcccccggggcgtgctcccgcggccctgccgcgtgctggtgctgctgaacccgcgcggcggcaagggcaaggccttgcagctcttccggagtcacgtgcagccccttttggctgaggctgaaatctccttcacgctgatgctcactgagcggcggaaccacgcgcgggagctggtgcggtcggaggagctgggccgctgggacgctctggtggtcatgtctggagacgggctgatgcacgaggtggtgaacgggctcatggagcggcctgactgggagaccgccatccagaagcccctgtgtagcctcccagcaggctctggcaacgcgctggcagcttccttgaaccattatgctggctatgagcaggtcaccaatgaagacctcctgaccaactgcacgctattgctgtgccgccggctgctgtcacccatgaacctg

SEQ ID NO: 185901 - DNA, 541 bp, Homo sapiens
  Payload ID: 16601
  Gene Symbol: SPHK1
  Gene Name: sphingosine kinase 1
  ENST ID: ENST00000591651
  CDS Start-End: 525-541
aaaacaaaaagcccctggaaaactgtgcacacacccatcccctcagcctgatgctccagcttggctgctaggagatcaatgcagctctgccttcctgctccctgtgcagaggtgccggctcctgcttcctggttcccagctttccttttgggaactgcctgaggtggtttgacacacagctgttgggcttctcttcccttgaggtctctgaaccagggcacccatgcaggggcttctgctggataaaccaaccaccacaaagtctacagaaacatgtctccaccccagcctcactccacaaatgcttctttggtggaaggctggttcctggtccagccgccgcagggaatgacgccggtgctcctgcagccacggctccgggcggggaaggcgagccccacagccggccctgcgacgcccgcctgggcagcaccgataaggagctgaaggcaggagccgccgccacgggcagcgcccccacagcgccagggaccccctggcagcgggagccgcgggtcgaggttatggatccagcgggcgg

SEQ ID NO: 185902 - DNA, 1851 bp, Homo sapiens
  Payload ID: 16601
  Gene Symbol: SPHK1
  Gene Name: sphingosine kinase 1
  Uniprot ID: Q9NYA1
  ENST ID: ENST00000590959
  CDS Start-End: 381-1577
gctccgcggcgccggctgcgaagttgagcgaaaagtttgaggccggagggagcgaggccggggagtccgctccagcggggcgctccagtccctcagacgtgggctgagcttgggacgagctgcgttccgccccaggccactgtagggaacggcggtggcgcctccccagcaaaccggaccgactgggtccagccgccgcagggaatgacgccggtgctcctgcagccacggctccgggcggggaaggcgagccccacagccggccctgcgacgcccgcctgggcagcaccgataaggagctgaaggcaggagccgccgccacgggcagcgcccccacagcgccagggaccccctggcagcgggagccgcgggtcgaggttatggatccagtggtcggttgcggacgtggcctctttggttttgttttctcagcgggcggcccccggggcgtgctcccgcggccctgccgcgtgctggtgctgctgaacccgcgcggcggcaagggcaaggccttgcagctcttccggagtcacgtgcagccccttttggctgaggctgaaatctccttcacgctgatgctcactgagcggcggaaccacgcgcgggagctggtgcggtcggaggagctgggccgctgggacgctctggtggtcatgtctggagacgggctgatgcacgaggtggtgaacgggctcatggagcggcctgactgggagaccgccatccagaagcccctgtgtagcctcccagcaggctctggcaacgcgctggcagcttccttgaaccattatgctggctatgagcaggtcaccaatgaagacctcctgaccaactgcacgctattgctgtgccgccggctgctgtcacccatgaacctgctgtctctgcacacggcttcggggctgcgcctcttctctgtgctcagcctggcctggggcttcattgctgatgtggacctagagagtgagaagtatcggcgtctgggggagatgcgcttcactctgggcaccttcctgcgtctggcagccctgcgcacctaccgcggccgactggcctacctccctgtaggaagagtgggttccaagacacctgcctcccccgttgtggtccagcagggcccggtagatgcacaccttgtgccactggaggagccagtgccctctcactggacagtggtgcccgacgaggactttgtgctagtcctggcactgctgcactcgcacctgggcagtgagatgtttgctgcacccatgggccgctgtgcagctggcgtcatgcatctgttctacgtgcgggcgggagtgtctcgtgccatgctgctgcgcctcttcctggccatggagaagggcaggcatatggagtatgaatgcccctacttggtatatgtgcccgtggtcgccttccgcttggagcccaaggatgggaaaggtgtgtttgcagtggatggggaattgatggttagcgaggccgtgcagggccaggtgcacccaaactacttctggatggtcagcggttgcgtggagcccccgcccagctggaagccccagcagatgccaccgccagaagagcccttatgacccctgggccgcgctgtgccttagtgtctacttgcaggacccttcctccttccctagggctgcagggcctgtccacagctcctgtgggggtggaggagactcctctggagaagggtgagaaggtggaggctatgctttggggggacaggccagaatgaagtcctgggtcaggagcccagctggctgggcccagctgcctatgtaaggccttctagtttgttctgagacccccaccccacgaaccaaatccaaataaagtgacattcccagcctg

SEQ ID NO: 185903 - DNA, 2963 bp, Homo sapiens
  Payload ID: 16602
  Gene Symbol: SPHK2
  Gene Name: sphingosine kinase 2
  Uniprot ID: Q9NRA0
  ENST ID: ENST00000245222
  CDS Start-End: 367-2331
cgactgactagccgggcgataacggcagagagcatagagcgcaggaacaagcgcaacgtccaagagggaagggccagcacgtcgggggcctctctggccctacccaggccgtgttctcgatagctttccggaagaaagggatctgggagcgagatgcgtgtagctagcacgatgcgtcgcgcggtgacgctctggcccgacgccgacggcctctcagtggctcccggaggacccggcgggcccagtgttggagagctgaaggtcaggccaggacagtgagacctgactccttgctcctaccagcctactatggcttaagacccagggccagggtcccgttgatgtaacagagcagaggaccagcagatgaatggacaccttgaagcagaggagcagcaggaccagaggccagaccaggagctgaccgggagctggggccacgggcctaggagcaccctggtcagggctaaggccatggccccgcccccaccgccactggctgccagcaccccgctcctccatggcgagtttggctcctacccagcccgaggcccacgctttgccctcacccttacatcgcaggccctgcacatacagcggctgcgccccaaacctgaagccaggccccggggtggcctggtcccgttggccgaggtctcaggctgctgcaccctgcgaagccgcagcccctcagactcagcggcctacttctgcatctacacctaccctcggggccggcgcggggcccggcgcagagccactcgcaccttccgggcagatggggccgccacctacgaagagaaccgtgccgaggcccagcgctgggccactgccctcacctgtctgctccgaggactgccactgcccggggatggggagatcacccctgacctgctacctcggccgccccggttgcttctattggtcaatccctttgggggtcggggcctggcctggcagtggtgtaagaaccacgtgcttcccatgatctctgaagctgggctgtccttcaacctcatccagacagaacgacagaaccacgcccgggagctggtccaggggctgagcctgagtgagtgggatggcatcgtcacggtctcgggagacgggctgctccatgaggtgctgaacgggctcctagatcgccctgactgggaggaagctgtgaagatgcctgtgggcatcctcccctgcggctcgggcaacgcgctggccggagcagtgaaccagcacgggggatttgagccagccctgggcctcgacctgttgctcaactgctcactgttgctgtgccggggtggtggccacccactggacctgctctccgtgacgctggcctcgggctcccgctgtttctccttcctgtctgtggcctggggcttcgtgtcagatgtggatatccagagcgagcgcttcagggccttgggcagtgcccgcttcacactgggcacggtgctgggcctcgccacactgcacacctaccgcggacgcctctcctacctccccgccactgtggaacctgcctcgcccacccctgcccatagcctgcctcgtgccaagtcggagctgaccctaaccccagacccagccccgcccatggcccactcacccctgcatcgttctgtgtctgacctgcctcttcccctgccccagcctgccctggcctctcctggctcgccagaacccctgcccatcctgtccctcaacggtgggggcccagagctggctggggactggggtggggctggggatgctccgctgtccccggacccactgctgtcttcacctcctggctctcccaaggcagctctacactcacccgtctccgaaggggcccccgtaattcccccatcctctgggctcccacttcccacccctgatgcccgggtaggggcctccacctgcggcccgcccgaccacctgctgcctccgctgggcaccccgctgcccccagactgggtgacgctggagggggactttgtgctcatgttggccatctcgcccagccacctaggcgctgacctggtggcagctccgcatgcgcgcttcgacgacggcctggtgcacctgtgctgggtgcgtagcggcatctcgcgggctgcgctgctgcgccttttcttggccatggagcgtggtagccacttcagcctgggctgtccgcagctgggctacgccgcggcccgtgccttccgcctagagccgctcacaccacgcggcgtgctcacagtggacggggagcaggtggagtatgggccgctacaggcacagatgcaccctggcatcggtacactgctcactgggcctcctggctgcccggggcgggagccctgaaactaaacaagcttggtacccgccgggggcggggcctacattccaatggggcggagcctgagctagggggtgtggcctggctgctagagttgtggtggcaggggccctggccccgtctcaggattgcgctcgctttcatgggaccagacgtgatgctggaaggtgggcgtcgtcacggttaaagagaaatgggctcgtcccgagggtagtgcctgatcaatgagggcggggcctggcgtctgatctggggccgcccttacggggcagggctcagtcctgacgcttgccacctgctcctacccggccaggatggctgagggcggagtctattttacgcgtcgcccaatgacaggacctggaatgtactggctggggtaggcctcagtgagtcggccggtcagggcccgcagcctcgccccatccactccggtgcctccatttagctggccaatcagcccaggaggggcaggttccccggggccggcgctaggatttgcactaatgttcctctccccgcgggtgggggcggggaaattcatatcccctgttcgtctcatgcgcgtcctccgtccccaatctaaaaagcaattgaaaaggtctatgcaataaaggcagtcgcttcattcctctca

SEQ ID NO: 185904 - DNA, 2492 bp, Homo sapiens
  Payload ID: 16602
  Gene Symbol: SPHK2
  Gene Name: sphingosine kinase 2
  ENST ID: ENST00000340932
  CDS Start-End: 513-1859
cgactgactagccgggcgataacggcagagagcatagagcgcaggaacaagcgcaacgtccaagagggaagggccagcacgtcgggggcctctctggccctacccaggccgtgttctcgatagctttccggaagaaagggatctgggagcgagatgcgtgtagctagcacgatgcgtcgcgcggtgacgctctggcccgacgccgacggcctctcagtggctcccggaggacccggcgggcccagtgttggagagctgaaggtcaggccaggacagtgagacctgactccttgctcctaccagcctactatggcttaagacccagggccagggtcccgttgatgtaacagagcagaggaccagcagatgaatggacaccttgaagcagaggagcagcaggaccagagatcacccctgacctgctacctcggccgccccggttgcttctattggtcaatccctttgggggtcggggcctggcctggcagtggtgtaagaaccacgtgcttcccatgatctctgaagctgggctgtccttcaacctcatccagacagaacgacagaaccacgcccgggagctggtccaggggctgagcctgagtgagtgggatggcatcgtcacggtctcgggagacgggctgctccatgaggtgctgaacgggctcctagatcgccctgactgggaggaagctgtgaagatgcctgtgggcatcctcccctgcggctcgggcaacgcgctggccggagcagtgaaccagcacgggggatttgagccagccctgggcctcgacctgttgctcaactgctcactgttgctgtgccggggtggtggccacccactggacctgctctccgtgacgctggcctcgggctcccgctgtttctccttcctgtctgtggcctggggcttcgtgtcagatgtggatatccagagcgagcgcttcagggccttgggcagtgcccgcttcacactgggcacggtgctgggcctcgccacactgcacacctaccgcggacgcctctcctacctccccgccactgtggaacctgcctcgcccacccctgcccatagcctgcctcgtgccaagtcggagctgaccctaaccccagacccagccccgcccatggcccactcacccctgcatcgttctgtgtctgacctgcctcttcccctgccccagcctgccctggcctctcctggctcgccagaacccctgcccatcctgtccctcaacggtgggggcccagagctggctggggactggggtggggctggggatgctccgctgtccccggacccactgctgtcttcacctcctggctctcccaaggcagctctacactcacccgtctccgaaggggcccccgtaattcccccatcctctgggctcccacttcccacccctgatgcccgggtaggggcctccacctgcggcccgcccgaccacctgctgcctccgctgggcaccccgctgcccccagactgggtgacgctggagggggactttgtgctcatgttggccatctcgcccagccacctaggcgctgacctggtggcagctccgcatgcgcgcttcgacgacggcctggtgcacctgtgctgggtgcgtagcggcatctcgcgggctgcgctgctgcgccttttcttggccatggagcgtggtagccacttcagcctgggctgtccgcagctgggctacgccgcggcccgtgccttccgcctagagccgctcacaccacgcggcgtgctcacagtggacggggagcaggtggagtatgggccgctacaggcacagatgcaccctggcatcggtacactgctcactgggcctcctggctgcccggggcgggagccctgaaactaaacaagcttggtacccgccgggggcggggcctacattccaatggggcggagcctgagctagggggtgtggcctggctgctagagttgtggtggcaggggccctggccccgtctcaggattgcgctcgctttcatgggaccagacgtgatgctggaaggtgggcgtcgtcacggttaaagagaaatgggctcgtcccgagggtagtgcctgatcaatgagggcggggcctggcgtctgatctggggccgcccttacggggcagggctcagtcctgacgcttgccacctgctcctacccggccaggatggctgagggcggagtctattttacgcgtcgcccaatgacaggacctggaatgtactggctggggtaggcctcagtgagtcggccggtcagggcccgcagcctcgccccatccactccggtgcctccatttagctggccaatcagcccaggaggggcaggttccccggggccggcgctaggatttgcactaatgttcctctccccgcgggtgggggcggggaaattcatatcccctgttcgtctcatgcgcgtcctccgtccccaatctaaaaagcaattgaaaaggtctatgcaataaaggcagtcgcttcattcctctcag

SEQ ID NO: 185905 - DNA, 1493 bp, Homo sapiens
  Payload ID: 16602
  Gene Symbol: SPHK2
  Gene Name: sphingosine kinase 2
  ENST ID: ENST00000426514
  CDS Start-End: 1-150
atgaatggacaccttgaagcagaggagcagcaggaccagagatcacccctgacctgctacctcggccgccccggttgcttctattggtcaatccctttgggggtcggggcctggcctggcagtggtgtaagaaccacgtgcttcccatgatctctgaagctgggctgtccttcaacctcatccagacagaacgacagaaccacgcccgggagctggtccaggggctgagcctgagtgagtgggatggcatcgtcacggtctcgggagacgggctgctccatgaggtgctgaacgggctcctagatcgccctgactgggaggaagctgtgaagatgcctgtgggcatcctcccctgcggctcgggcaacgcgctggccggagcagtgaaccagcacgggggatttgagccagccctgggcctcgacctgttgctcaactgctcactgttgctgtgccggggtggtggccacccactggacctgctctccgtgacgctggcctcgggctcccgctgtttctccttcctgtctgtggcctggggcttcgtgtcagatgtggatatccagagcgagcgcttcagggccttgggcagtgcccgcttcacactgggcacggtgctgggcctcgccacactgcacacctaccgcggacgcctctcctacctccccgccactgtggaacctgcctcgcccacccctgcccatagcctgcctcgtgccaagtcggagctgaccctaaccccagacccagccccgcccatggcccactcacccctgcatcgttctgtgtctgacctgcctcttcccctgccccagcctgccctggcctctcctggctcgccagaacccctgcccatcctgtccctcaacggtgggggcccagagctggctggggactggggtggggctggggatgctccgctgtccccggacccactgctgtcttcacctcctggctctcccaaggcagctctacactcacccgtctccgaaggggcccccgtaattcccccatcctctgggctcccacttcccacccctgatgcccgggtaggggcctccacctgcggcccgcccgaccacctgctgcctccgctgggcaccccgctgcccccagactgggtgacgctggagggggactttgtgctcatgttggccatctcgcccagccacctaggcgctgacctggtggcagctccgcatgcgcgcttcgacgacggcctggtgcacctgtgctgggtgcgtagcggcatctcgcgggctgcgctgctgcgccttttcttggccatggagcgtggtagccacttcagcctgggctgtccgcagctgggctacgccgcggcccgtgccttccgcctagagccgctcacaccacgcggcgtgctcacagtggacggggagcaggtggagtatgggccgctacaggcacagatgcaccctggcatcggtacactgctcactgggcctcctggctgcccggggcgggagccctga

SEQ ID NO: 185906 - DNA, 2866 bp, Homo sapiens
  Payload ID: 16602
  Gene Symbol: SPHK2
  Gene Name: sphingosine kinase 2
  Uniprot ID: Q9NRA0
  ENST ID: ENST00000598088
  CDS Start-End: 270-2234
agtgttggaggtgaggaggcggggctggcagggctagtcggggcatctggaaatttccgaccccacgcttcgggcgtttccttatcaggttcaccgctccctgatctcgcgctgcacttcgtaggcgcagccgctgcttgggaagtcctacttaagagctgaaggtcaggccaggacagtgagacctgactccttgctcctaccagcctactatggcttaagacccagggccagggtcccgttgatgtaacagagcagaggaccagcagatgaatggacaccttgaagcagaggagcagcaggaccagaggccagaccaggagctgaccgggagctggggccacgggcctaggagcaccctggtcagggctaaggccatggccccgcccccaccgccactggctgccagcaccccgctcctccatggcgagtttggctcctacccagcccgaggcccacgctttgccctcacccttacatcgcaggccctgcacatacagcggctgcgccccaaacctgaagccaggccccggggtggcctggtcccgttggccgaggtctcaggctgctgcaccctgcgaagccgcagcccctcagactcagcggcctacttctgcatctacacctaccctcggggccggcgcggggcccggcgcagagccactcgcaccttccgggcagatggggccgccacctacgaagagaaccgtgccgaggcccagcgctgggccactgccctcacctgtctgctccgaggactgccactgcccggggatggggagatcacccctgacctgctacctcggccgccccggttgcttctattggtcaatccctttgggggtcggggcctggcctggcagtggtgtaagaaccacgtgcttcccatgatctctgaagctgggctgtccttcaacctcatccagacagaacgacagaaccacgcccgggagctggtccaggggctgagcctgagtgagtgggatggcatcgtcacggtctcgggagacgggctgctccatgaggtgctgaacgggctcctagatcgccctgactgggaggaagctgtgaagatgcctgtgggcatcctcccctgcggctcgggcaacgcgctggccggagcagtgaaccagcacgggggatttgagccagccctgggcctcgacctgttgctcaactgctcactgttgctgtgccggggtggtggccacccactggacctgctctccgtgacgctggcctcgggctcccgctgtttctccttcctgtctgtggcctggggcttcgtgtcagatgtggatatccagagcgagcgcttcagggccttgggcagtgcccgcttcacactgggcacggtgctgggcctcgccacactgcacacctaccgcggacgcctctcctacctccccgccactgtggaacctgcctcgcccacccctgcccatagcctgcctcgtgccaagtcggagctgaccctaaccccagacccagccccgcccatggcccactcacccctgcatcgttctgtgtctgacctgcctcttcccctgccccagcctgccctggcctctcctggctcgccagaacccctgcccatcctgtccctcaacggtgggggcccagagctggctggggactggggtggggctggggatgctccgctgtccccggacccactgctgtcttcacctcctggctctcccaaggcagctctacactcacccgtctccgaaggggcccccgtaattcccccatcctctgggctcccacttcccacccctgatgcccgggtaggggcctccacctgcggcccgcccgaccacctgctgcctccgctgggcaccccgctgcccccagactgggtgacgctggagggggactttgtgctcatgttggccatctcgcccagccacctaggcgctgacctggtggcagctccgcatgcgcgcttcgacgacggcctggtgcacctgtgctgggtgcgtagcggcatctcgcgggctgcgctgctgcgccttttcttggccatggagcgtggtagccacttcagcctgggctgtccgcagctgggctacgccgcggcccgtgccttccgcctagagccgctcacaccacgcggcgtgctcacagtggacggggagcaggtggagtatgggccgctacaggcacagatgcaccctggcatcggtacactgctcactgggcctcctggctgcccggggcgggagccctgaaactaaacaagcttggtacccgccgggggcggggcctacattccaatggggcggagcctgagctagggggtgtggcctggctgctagagttgtggtggcaggggccctggccccgtctcaggattgcgctcgctttcatgggaccagacgtgatgctggaaggtgggcgtcgtcacggttaaagagaaatgggctcgtcccgagggtagtgcctgatcaatgagggcggggcctggcgtctgatctggggccgcccttacggggcagggctcagtcctgacgcttgccacctgctcctacccggccaggatggctgagggcggagtctattttacgcgtcgcccaatgacaggacctggaatgtactggctggggtaggcctcagtgagtcggccggtcagggcccgcagcctcgccccatccactccggtgcctccatttagctggccaatcagcccaggaggggcaggttccccggggccggcgctaggatttgcactaatgttcctctccccgcgggtgggggcggggaaattcatatcccctgttcgtctcatgcgcgtcctccgtccccaatctaaaaagcaattgaaaaggtctatgcaataaaggcagtcgcttcattcctctca

SEQ ID NO: 185907 - DNA, 565 bp, Homo sapiens
  Payload ID: 16602
  Gene Symbol: SPHK2
  Gene Name: sphingosine kinase 2
  ENST ID: ENST00000601704
  CDS Start-End: 167-565
gagcggatgcacaccctccccccacccctaggtctgatgggggctgttggtgctgacttgcgggaccgcctggaggaggacccggcgtgtgaggaggaggccagaccaggagctgaccgggagctggggccacgggcctaggagcaccctggtcagggctaaggccatggccccgcccccaccgccactggctgccagcaccccgctcctccatggcgagtttggctcctacccagcccgaggcccacgctttgccctcacccttacatcgcaggccctgcacatacagcggctgcgccccaaacctgaagccaggccccggggtggcctggtcccgttggccgaggtctcaggctgctgcaccctgcgaagccgcagcccctcagactcagcggcctacttctgcatctacacctaccctcggggccggcgcggggcccggcgcagagccactcgcaccttccgggcagatggggccgccacctacgaagagaaccgtgccgaggcccagcgctgggccactgccctcacctgtctgctccgaggactgccactgcccggggat

SEQ ID NO: 185908 - DNA, 2136 bp, Homo sapiens
  Payload ID: 16602
  Gene Symbol: SPHK2
  Gene Name: sphingosine kinase 2
  Uniprot ID: Q9NRA0
  ENST ID: ENST00000600537
  CDS Start-End: 206-1993
agctagcacgatgcgtcgcgcggtgacgctctggcccgacgccgacggcctctcagtggctcccggaggacccggcgggcccagtgttggagagctgaaggtcaggccaggacagtgagacctgactccttgctcctaccagcctactatggcttaagacccagggccagggtcccgttgatgtaacagagcagaggaccagcagatgaatggacaccttgaagcagaggagcagcaggaccaggccctgcacatacagcggctgcgccccaaacctgaagccaggccccggggtggcctggtcccgttggccgaggtctcaggctgctgcaccctgcgaagccgcagcccctcagactcagcggcctacttctgcatctacacctaccctcggggccggcgcggggcccggcgcagagccactcgcaccttccgggcagatggggccgccacctacgaagagaaccgtgccgaggcccagcgctgggccactgccctcacctgtctgctccgaggactgccactgcccggggatggggagatcacccctgacctgctacctcggccgccccggttgcttctattggtcaatccctttgggggtcggggcctggcctggcagtggtgtaagaaccacgtgcttcccatgatctctgaagctgggctgtccttcaacctcatccagacagaacgacagaaccacgcccgggagctggtccaggggctgagcctgagtgagtgggatggcatcgtcacggtctcgggagacgggctgctccatgaggtgctgaacgggctcctagatcgccctgactgggaggaagctgtgaagatgcctgtgggcatcctcccctgcggctcgggcaacgcgctggccggagcagtgaaccagcacgggggatttgagccagccctgggcctcgacctgttgctcaactgctcactgttgctgtgccggggtggtggccacccactggacctgctctccgtgacgctggcctcgggctcccgctgtttctccttcctgtctgtggcctggggcttcgtgtcagatgtggatatccagagcgagcgcttcagggccttgggcagtgcccgcttcacactgggcacggtgctgggcctcgccacactgcacacctaccgcggacgcctctcctacctccccgccactgtggaacctgcctcgcccacccctgcccatagcctgcctcgtgccaagtcggagctgaccctaaccccagacccagccccgcccatggcccactcacccctgcatcgttctgtgtctgacctgcctcttcccctgccccagcctgccctggcctctcctggctcgccagaacccctgcccatcctgtccctcaacggtgggggcccagagctggctggggactggggtggggctggggatgctccgctgtccccggacccactgctgtcttcacctcctggctctcccaaggcagctctacactcacccgtctccgaaggggcccccgtaattcccccatcctctgggctcccacttcccacccctgatgcccgggtaggggcctccacctgcggcccgcccgaccacctgctgcctccgctgggcaccccgctgcccccagactgggtgacgctggagggggactttgtgctcatgttggccatctcgcccagccacctaggcgctgacctggtggcagctccgcatgcgcgcttcgacgacggcctggtgcacctgtgctgggtgcgtagcggcatctcgcgggctgcgctgctgcgccttttcttggccatggagcgtggtagccacttcagcctgggctgtccgcagctgggctacgccgcggcccgtgccttccgcctagagccgctcacaccacgcggcgtgctcacagtggacggggagcaggtggagtatgggccgctacaggcacagatgcaccctggcatcggtacactgctcactgggcctcctggctgcccggggcgggagccctgaaactaaacaagcttggtacccgccgggggcggggcctacattccaatggggcggagcctgagctagggggtgtggcctggctgctagagttgtggtggcaggggccctggccccgtctcaggattgcgctcgctttcatggga

SEQ ID NO: 185909 - DNA, 713 bp, Homo sapiens
  Payload ID: 16602
  Gene Symbol: SPHK2
  Gene Name: sphingosine kinase 2
  ENST ID: ENST00000593308
  CDS Start-End: 498-713
cgtgtgaggagggtgcgggggtcggggcagggaccggagtctaggggactgagggaccaagaggaacagagactcaggcccgggactggggcaccggggtgggagatggaaatggaaaacctgggccaggactgaacccagccaggcctgggactgggttctggaaataagagtgcggatggcggtttgggggcccagggccagacacgcaggcctatggattggggaccaatggatggagacccaggtccaggtctcggggacccagggacagagacccaggcccaagactggaggacatctagggctctgtgcttgaacctgatttgaggttcccataatggggccagggcaggtttgggggtgaagcagacgtcctggacccgagagagccgctggggataggggggcagatgtagttcctaaggaggccagaccaggagctgaccgggagctggggccacgggcctaggagcaccctggtcagggctaaggccatggccccgcccccaccgccactggctgccagcaccccgctcctccatggcgagtttggctcctacccagcccgaggcccacgctttgccctcacccttacatcgcaggccctgcacatacagcggctgcgccccaaacctgaagccaggccccggggtggcctggtcccgttggccgaggtctcaggctgctgcaccctgcgaagccgcagcccc

SEQ ID NO: 185910 - DNA, 1542 bp, Homo sapiens
  Payload ID: 16602
  Gene Symbol: SPHK2
  Gene Name: sphingosine kinase 2
  ENST ID: ENST00000597434
  CDS Start-End: 495-1542
atctctgggcctttgttacgcgtgttagagtctctgtctttgcagctaaagacctcctccctcacgccccttttcttttgtgaattcaatggatgagacaggcccactctcccttaacaaagatggcgacaacggcgctgtctatggggccgcgacgtcgtctccgctgcgcgtcggccctcacccacgatggcggccagtctcccgaagcgcgaggccccgcccagctctcggcctctcccgcggccggtccctgcaccaagctcgcgagctgactggctccaccccccgcgccctcgtattggtgcggcccaggccggctgcacggccattggctgagcggatgcacaccctccccccacccctaggtctgatgggggctgttggtgctgacttgcgggaccgcctggaggaggacccggcgtaggccagaccaggagctgaccgggagctggggccacgggcctaggagcaccctggtcagggctaaggccatggccccgcccccaccgccactggctgccagcaccccgctcctccatggcgagtttggctcctacccagcccgaggcccacgctttgccctcacccttacatcgcaggccctgcacatacagcggctgcgccccaaacctgaagccaggccccggggtggcctggtcccgttggccgaggtctcaggctgctgcaccctgcgaagccgcagcccctcagactcagcggcctacttctgcatctacacctaccctcggggccggcgcggggcccggcgcagagccactcgcaccttccgggcagatggggccgccacctacgaagagaaccgtgccgaggcccagcgctgggccactgccctcacctgtctgctccgaggactgccactgcccggggatggggagatcacccctgacctgctacctcggccgccccggttgcttctattggtcaatccctttgggggtcggggcctggcctggcagtggtgtaagaaccacgtgcttcccatgatctctgaagctgggctgtccttcaacctcatccagacagaacgacagaaccacgcccgggagctggtccaggggctgagcctgagtgagtgggatggcatcgtcacggtctcgggagacgggctgctccatgaggtgctgaacgggctcctagatcgccctgactgggaggaagctgtgaagatgcctgtgggcatcctcccctgcggctcgggcaacgcgctggccggagcagtgaaccagcacgggggcccgcgggaggactcagactccagcacttccagcagcgcctgccctctatggacgacagcccggagctgcccacgggctgcagccagtatgccagggagctgccctcttcttccacaacagctggctctggggttctcaagatttattcaggatcgtgttaacggaggcggtgggaggatagggtccctgacgtgccggggacacacacagagaaccctccccgcccccgcaagggaggggggaggctcgctttttcttaaaaatataaatgtatttatctgca

SEQ ID NO: 185911 - DNA, 1394 bp, Homo sapiens
  Payload ID: 16602
  Gene Symbol: SPHK2
  Gene Name: sphingosine kinase 2
  ENST ID: ENST00000601712
  CDS Start-End: 257-1024
gtagctagcacgatgcgtcgcgcggtgacgctctggcccgacgccgacggcctctcagtggctcccggaggacccggcgggcccagtgttggagagctgaaggtcaggccaggacagtgagacctgactccttgctcctaccagcctactatggcttaagacccagggccagggtcccgttgatgtaacagagcagaggaccagcagatgaatggacaccttgaagcagaggagcagcaggaccagggctaaggccatggccccgcccccaccgccactggctgccagcaccccgctcctccatggcgagtttggctcctacccagcccgaggcccacgctttgccctcacccttacatcgcaggccctgcacatacagcggctgcgccccaaacctgaagccaggccccggggtggcctggtcccgttggccgaggtctcaggctgctgcaccctgcgaagccgcagcccctcagactcagcggcctacttctgcatctacacctaccctcggggccggcgcggggcccggcgcagagccactcgcaccttccgggcagatggggccgccacctacgaagagaaccgtgccgaggcccagcgctgggccactgccctcacctgtctgctccgaggactgccactgcccggggatggggagatcacccctgacctgctacctcggccgccccggttgcttctattggtcaatccctttgggggtcggggcctggcctggcagtggtgtaagaaccacgtgcttcccatgatctctgaagctgggctgtccttcaacctcatccagacagaacgacagaaccacgcccgggagctggtccaggggctgagcctgagtgagtgggatggcatcgtcacggtctcgggagacgggctgctccatgaggtgctgaacgggctcctagatcgccctgactgggaggaagctgtgaagatgcctgtgggcatcctcccctgcggctcgggcaacgcgctggccggagcagtgaaccagcacggggggtaggttgaggataccacgaagggagggatgagcccctcctggggtgatagggacccctatatctcccactcagccaaacccacagtcagtcaagtaaatcagcctgcctgtgggatgctcacccccagctcctggacatttttgcctgcctgcttcccagctgtatcccgagcgcccagaactctgcctggcatgggaggcactcagtgaattgtagggagcaaatgaaagatgaccaggaacctggccccgtaaggagtcgcctggaggtggccccacggctgtggtgggcctgggccatggccttcgtggtctcattgccagctgctttcctacctgtctctttccccaacccctgtttgctccttccttc

SEQ ID NO: 185912 - DNA, 2683 bp, Homo sapiens
  Payload ID: 16602
  Gene Symbol: SPHK2
  Gene Name: sphingosine kinase 2
  Uniprot ID: Q9NRA0
  ENST ID: ENST00000599748
  CDS Start-End: 195-2051
ggggaacaaaggtgagcgaaaggaggaggcagaatccgggcagagggcagggagagggcctgtggggaagggacctcagtcctgctcccacccgctccctggagagcaggcggccagacacccagaggccagaccaggagctgaccgggagctggggccacgggcctaggagcaccctggtcagggctaaggccatggccccgcccccaccgccactggctgccagcaccccgctcctccatggcgagtttggctcctacccagcccgaggcccacgctttgccctcacccttacatcgcaggccctgcacatacagcggctgcgccccaaacctgaagccaggccccggggtggcctggtcccgttggccgaggtctcaggctgctgcaccctgcgaagccgcagcccctcagactcagcggcctacttctgcatctacacctaccctcggggccggcgcggggcccggcgcagagccactcgcaccttccgggcagatggggccgccacctacgaagagaaccgtgccgaggcccagcgctgggccactgccctcacctgtctgctccgaggactgccactgcccggggatggggagatcacccctgacctgctacctcggccgccccggttgcttctattggtcaatccctttgggggtcggggcctggcctggcagtggtgtaagaaccacgtgcttcccatgatctctgaagctgggctgtccttcaacctcatccagacagaacgacagaaccacgcccgggagctggtccaggggctgagcctgagtgagtgggatggcatcgtcacggtctcgggagacgggctgctccatgaggtgctgaacgggctcctagatcgccctgactgggaggaagctgtgaagatgcctgtgggcatcctcccctgcggctcgggcaacgcgctggccggagcagtgaaccagcacgggggatttgagccagccctgggcctcgacctgttgctcaactgctcactgttgctgtgccggggtggtggccacccactggacctgctctccgtgacgctggcctcgggctcccgctgtttctccttcctgtctgtggcctggggcttcgtgtcagatgtggatatccagagcgagcgcttcagggccttgggcagtgcccgcttcacactgggcacggtgctgggcctcgccacactgcacacctaccgcggacgcctctcctacctccccgccactgtggaacctgcctcgcccacccctgcccatagcctgcctcgtgccaagtcggagctgaccctaaccccagacccagccccgcccatggcccactcacccctgcatcgttctgtgtctgacctgcctcttcccctgccccagcctgccctggcctctcctggctcgccagaacccctgcccatcctgtccctcaacggtgggggcccagagctggctggggactggggtggggctggggatgctccgctgtccccggacccactgctgtcttcacctcctggctctcccaaggcagctctacactcacccgtctccgaaggggcccccgtaattcccccatcctctgggctcccacttcccacccctgatgcccgggtaggggcctccacctgcggcccgcccgaccacctgctgcctccgctgggcaccccgctgcccccagactgggtgacgctggagggggactttgtgctcatgttggccatctcgcccagccacctaggcgctgacctggtggcagctccgcatgcgcgcttcgacgacggcctggtgcacctgtgctgggtgcgtagcggcatctcgcgggctgcgctgctgcgccttttcttggccatggagcgtggtagccacttcagcctgggctgtccgcagctgggctacgccgcggcccgtgccttccgcctagagccgctcacaccacgcggcgtgctcacagtggacggggagcaggtggagtatgggccgctacaggcacagatgcaccctggcatcggtacactgctcactgggcctcctggctgcccggggcgggagccctgaaactaaacaagcttggtacccgccgggggcggggcctacattccaatggggcggagcctgagctagggggtgtggcctggctgctagagttgtggtggcaggggccctggccccgtctcaggattgcgctcgctttcatgggaccagacgtgatgctggaaggtgggcgtcgtcacggttaaagagaaatgggctcgtcccgagggtagtgcctgatcaatgagggcggggcctggcgtctgatctggggccgcccttacggggcagggctcagtcctgacgcttgccacctgctcctacccggccaggatggctgagggcggagtctattttacgcgtcgcccaatgacaggacctggaatgtactggctggggtaggcctcagtgagtcggccggtcagggcccgcagcctcgccccatccactccggtgcctccatttagctggccaatcagcccaggaggggcaggttccccggggccggcgctaggatttgcactaatgttcctctccccgcgggtgggggcggggaaattcatatcccctgttcgtctcatgcgcgtcctccgtccccaatctaaaaagcaattgaaaaggtctatgcaataaaggcagtcgcttcattcctctca

SEQ ID NO: 185913 - DNA, 3085 bp, Homo sapiens
  Payload ID: 16602
  Gene Symbol: SPHK2
  Gene Name: sphingosine kinase 2
  ENST ID: ENST00000599029
  CDS Start-End: 992-2983
gaaaggaggaggcagaatccgggcagagggcagggagagggcctgtggggaagggacctcagtcctgctcccacccgctccctggagagcaggcggccagacacccaggtcagtgctcagggaccagctcttggcccctgccccttgcaggcgctcgcatgtggctcctctcggaccccgtagtccctgtcatatcccttctctccagctgtctccatgcctgcctcgtacccctcctatttgctctcccttccactctgtcttgcctttctcgttggggtgaaaaagtcttactctcttaagtatctttcatcgcctgagtttcacctcattgaccctgtttgtctcctctcagtgtttctctggctctcagaccctatctctattgcgtttgtgattgttttgctgttttacccactgcaccgtatggggggtgggggtgtcggggaggtgtgtctttcagtctttgcatgtctgtttctgcatatccaatcccactatccattccccttcctgtgccttcttttcccccaaagcccgttatcatcacccaaccacctgtatatttcaatcctttctcttgtttatctattcctatgaaggcaaggatttggggctattttgtctcctgctgtgtttgctaggcctagcaccgtgattggcacataaagggtactgaatacttactggggaataaatgattggatgtttgcatgcccgggtctccggccccctctgggatgctggcctctgtcccgcatcctcaaggtctgcccacacctgtctgagcctgtctgtctctgatgctcctgtctcacctgccactgcccctcattgtctcctcctgtccacagcccctgcccctccctgcccctgccatggggtcctgaattctcaccccttctctcctcccttcccacagaggccagaccaggagctgaccgggagctggggccacgggcctaggagcaccctggtcagggctaaggccatggccccgcccccaccgccactggctgccagcaccccgctcctccatggcgagtttggctcctacccagcccgaggcccacgctttgccctcacccttacatcgcaggccctgcacatacagcggctgcgccccaaacctgaagccaggccccggggtggcctggtcccgttggccgaggtctcaggctgctgcaccctgcgaagccgcagcccctcagactcagcggcctacttctgcatctacacctaccctcggggccggcgcggggcccggcgcagagccactcgcaccttccgggcagatggggccgccacctacgaagagaaccgtgccgaggcccagcgctgggccactgccctcacctgtctgctccgaggactgccactgcccggggatggggagatcacccctgacctgctacctcggccgccccggttgcttctattggtcaatccctttgggggtcggggcctggcctggcagtggtgtaagaaccacgtgcttcccatgatctctgaagctgggctgtccttcaacctcatccagacagaacgacagaaccacgcccgggagctggtccaggggctgagcctgagtgagtgggatggcatcgtcacggtctcgggagacgggctgctccatgaggtgctgaacgggctcctagatcgccctgactgggaggaagctgtgaagatgcctgtgggcatcctcccctgcggctcgggcaacgcgctggccggagcagtgaaccagcacgggggatttgagccagccctgggcctcgacctgttgctcaactgctcactgttgctgtgccggggtggtggccacccactggacctgctctccgtgacgctggcctcgggctcccgctgtttctccttcctgtctgtggcctggggcttcgtgtcagatgtggatatccagagcgagcgcttcagggccttgggcagtgcccgcttcacactgggcacggtgctgggcctcgccacactgcacacctaccgcggacgcctctcctacctccccgccactgtggaacctgcctcgcccacccctgcccatagcctgcctcgtgccaagtcggagctgaccctaaccccagacccagccccgcccatggcccactcacccctgcatcgttctgtgtctgacctgcctcttcccctgccccagcctgccctggcctctcctggctcgccagaacccctgcccatcctgtccctcaacggtgggggcccagagctggctggggactggggtggggctggggatgctccgctgtccccggacccactgctgtcttcacctcctggctctcccaaggcagctctacactcacccgtctccgaaggggcccccgtaattcccccatcctctgggctcccacttcccacccctgatgcccgggtaggggcctccacctgcggcccgcccgaccacctgctgcctccgctgggcaccccgctgcccccagactgggtgacgctggagggggactttgtgctcatgttggccatctcgcccagccacctaggcgctgacctggtggcagctccgcatgcgcgcttcgacgacggcctggtgcacctgtgctgggtgcgtagcggcatctcgcgggctgcgctgctgcgccttttcttggccatggagcgtggtagccacttcagcctgggctgtccgcagctgggctacgccgcggcccgtgccttccgcctagagccgctcacaccacgcggcgtgctcacagtggacggggagcaggtggagtatgggccgctacaggcacagatgcaccctggcatcgcccgcgggaggactcagactccagcacttccagcagcgcctgccctctatggacgacagcccggagctgcccacgggctgcagccagtatgccagggagctgccctcttcttccacaacagctggctctggggttctcaagatttattcaggatcgtgttaacggaggcggtgggaggatagggtccctgacgtgccggggacacacacagagaaccctccccgcccccgcaagggaggggggaggctcgctttttcttaaaaatataaatgtatttatctgca

SEQ ID NO: 185914 - DNA, 658 bp, Homo sapiens
  Payload ID: 16603
  Gene Symbol: SGPL1
  Gene Name: sphingosine-1-phosphate lyase 1
  ENST ID: ENST00000299297
  CDS Start-End: 1-609
attttggaagtatactccacaaaagccaagaattatgtaaatggacattgcaccaagtatgagccctggcagctaattgcatggagtgtcgtgtggaccctgctgatagtctggggatatgagtttgtcttccagccagagagtttatggtcaaggtttaaaaagaaatgttttaagctcaccaggaagatgcccattattggtcgtaagattcaagacaagttgaacaagaccaaggatgatattagcaagaacatgtcattcctgaaagtggacaaagagtatgtgaaagctttaccctcccagggtctgagctcatctgctgttttggagaaacttaaggagtacagctctatggacgccttctggcaagaggggagagcctctggaacagtgtacagtggggaggagaagctcactgagctccttgtgaaggcttatggagattttgcatggagtaaccccctgcatccagatatcttcccaggactacgcaagatagaggcagaaatcgtgaggatagcttgttccctgttcaatgggggaccagattcgtgtggatgtgaagcattgtttttgttttgtttttctaatatgttggcgccatgaaaatcatcatgttcaaatattagtagtaataaaggtgatatgcctggca

SEQ ID NO: 185915 - DNA, 5745 bp, Homo sapiens
  Payload ID: 16603
  Gene Symbol: SGPL1
  Gene Name: sphingosine-1-phosphate lyase 1
  Uniprot ID: O95470
  ENST ID: ENST00000373202
  CDS Start-End: 201-1907
gcggctgccgggcctccaatctcggcggcggcggcggcaacaggggagcctgggtctcgcggcctgcgagtccgtcgcgtgctgagggagacgcaggaggtggagccggccgggtgctcgagggaaggagactggaagctggttccggcgtgaggagagtctgaaaaaggggagcgcggagaggaggctggaagaggaagatgcctagcacagaccttctgatgttgaaggcctttgagccctacttagagattttggaagtatactccacaaaagccaagaattatgtaaatggacattgcaccaagtatgagccctggcagctaattgcatggagtgtcgtgtggaccctgctgatagtctggggatatgagtttgtcttccagccagagagtttatggtcaaggtttaaaaagaaatgttttaagctcaccaggaagatgcccattattggtcgtaagattcaagacaagttgaacaagaccaaggatgatattagcaagaacatgtcattcctgaaagtggacaaagagtatgtgaaagctttaccctcccagggtctgagctcatctgctgttttggagaaacttaaggagtacagctctatggacgccttctggcaagaggggagagcctctggaacagtgtacagtggggaggagaagctcactgagctccttgtgaaggcttatggagattttgcatggagtaaccccctgcatccagatatcttcccaggactacgcaagatagaggcagaaatcgtgaggatagcttgttccctgttcaatgggggaccagattcgtgtggatgtgtgacttctgggggaacagaaagcatactgatggcctgcaaagcatatcgggatctggcctttgagaaggggatcaaaactccagaaattgtggctccccaaagtgcccatgctgcatttaacaaagcagccagttactttgggatgaagattgtgcgggtcccattgacgaagatgatggaggtggatgtgcgggcaatgagaagagctatctccaggaacactgccatgctcgtctgttctaccccacagtttcctcatggtgtaatagatcctgtccctgaagtggccaagctggctgtcaaatacaaaataccccttcatgtcgacgcttgtctgggaggcttcctcatcgtctttatggagaaagcaggatacccactggagcacccatttgatttccgggtgaaaggtgtaaccagcatttcagctgacacccataagtatggctatgccccaaaaggctcatcattggtgttgtatagtgacaagaagtacaggaactatcagttcttcgtcgatacagattggcagggtggcatctatgcttccccaaccatcgcaggctcacggcctggtggcattagcgcagcctgttgggctgccttgatgcacttcggtgagaacggctatgttgaagctaccaaacagatcatcaaaactgctcgcttcctcaagtcagaactggaaaatatcaaaggcatctttgtttttgggaatccccaattgtcagtcattgctctgggatcccgtgattttgacatctaccgactatcaaacctgatgactgctaaggggtggaacttgaaccagttgcagttcccacccagtattcatttctgcatcacattactacacgcccggaaacgagtagctatacaattcctaaaggacattcgagaatctgtcactcaaatcatgaagaatcctaaagcgaagaccacaggaatgggtgccatctatggcatggcccagacaactgttgacaggaatatggttgcagaattgtcctcagtcttcttggacagcttgtacagcaccgacactgtcacccagggcagccagatgaatggttctccaaaaccccactgaacttggaccctttctagtctcaaggggattccagccttcagaaggttcttgggatatggaacaggccgtgcacaactttgacatctggtcttgctccatagagcacaactcaagatagaccatgagacagcttgagcctcaggattcttgttcttcctcttatcttccttttgtggtttttaatttgaagaccccagagaattccattacataatgattttgcccttgttataaatgttaccctaggaattgttttaaccatttccttttctaaactctctagctttcaactttacttaaacattgtgtggtagctctgacctgtcctgattctttagagaagctggggtacagtttatgagatagctagagcttctttgttatctcaggcaggaggcgtttacataacagatgtttcctcagctgggtgtgaggtatactctaagcaggaggctttttcagccttctctctcttttttttttttttttttttttttgagatggaattttgctcttttgcccagtctggagtgcagtggcatgatctcagctcactgcaacctccacccactgggttcaagcgattcttctgcctcagcctcccgagtagctgggattaccggcacccaccaccacgcctggctaatttttcaattttctttttcagtagagacgggttcaccgtgttggccaggctggtcttgaactcctgacctcaggtgatacccgcccccccgcctcagcctcccaaagtgctgggattacaggcgtgagccaccgtgcctggccctgtctctcttaagagtaggttcattgtctgtcttagagtcacttctattgcaactcattttctttttccagggcacagatcgaccaagctgccgttccctattctgcaggacaggactattctagcatacctgcttcgtccacccaggcagggtttggggtggtctcttctgtgcctgcagtccccatttgacacttggttgccaccatctttggagattattgtttggaatgatgcttccattggctttttcttgttaccatggactaggaagaaaacatggtttccaaataatctgggagcttttggccatggtgccgccttcctgaattggcagtggtcagagcacacctgaaccctatcctgggctggtgatgagcagaaatcagacctttttctatgcttttttgaatatcagagtaggatgaacacccagattcaaatatgtcaccaaagttggtggtggtccttccctgcacccttgcgttaagccattatgtaatgaaaatgtgtttgcttgaaggaacagctcaaagcaccttcacaagttgccttgacttaccctaggtgggtgtgaaagagcacccgtagcaaggaaaattttctctattagtgtgttcttctgcctcttcccccttgattcagctttcagaggtactatggcagttttgcctcaggtgctgaacatttctcagccctggctaaaagggagcagcacagggagagaaacaggataggaaagcagaatggcgagcagcctatggcccagggcctgtaatcccttcccaagactagctgctcagggtggtgcagggacaggaccagaccctgcgcctatttcctgccttctttcccctatagggaactctgtaggctgagccactgtcctgctcttatgacattatatcttgtgcctttctcctcagcagtgagcagtgagctactcctggcccaggccctaggggaaatggatcagtctttgaggtttctatttggggaggggagtacttaagatgagtcaaaagacactttcctctgttccattccccatctcagggactcctgaatattcagcctctccaggctggtgtcttctagtttcccccactgggaatgctggctgggagagccatgactaccagacttttcctcaggctccttggcatgttagtctgaattgttcttgagcactgtactactgacccaacaactgtgactagctggccacgccattcagggctggtgtggcatttatgtgtgtgtgtgtgtgtgtgtgtgtttttcctgtttgcccagcagtgcattgtgggttccaagagtgggtagtgtgtgtatgtgtgtgtgtcagagggagacctggcaggcacctctttgagagtagctgtggtcagagctgtttggtcagtgcattatgttgaatgaggtccaggaacccagagccacccagcagacaccactgtggcttgccagctgccaagatggagaagcatgtgcccctgtagagcgtctccccagaaccagaccccgagccactcgcttcctctgtgctgtgacaacattggtgccaggggagatggtgtttttcaaagggacctactgtagccactttaatttacaattaagagccttagtttgacttaacacttttgtaggcttttcattgtgtatttttgtgtatgtgtgcatatagcagctactctgtagcagaggtgggtagagacacttaatagtatcatgtcgcatgcagatgtcacatcggcctctgcaaaaactgtactgtcttgtttctgcattagacttaagtagtcatgtgaatatactgctatgtcacttttaatattacgagttttatacttggaaaatggtacttgcttcttttaaatctctgtcttctctaacctcccccttcccatttcaatgctcccttcctaatttcagcaataatctcaaaaagcaattaaatagttaaatgaccctaattgtaattactgtggatggttgcattcatttgattacttgggcacacacgagatgacaaatggggcagtggccatgcttgaatgggctcctggtgagagattgccccctggtggtgaaacaatcgtgtgtgcccactgataccaagaccaatgaaagagacacagttaagcagcaatccatctcatttccaggcacttcaataggtcgctgattggtccttgcaccagcagtggtagtcgtacctatttcagagaggtctgaaattcaggttcttagtttgccagggacaggccctatcttatatttttttccatcttcatcatccacttctgcttacagtttgctgcttacaataacttaatgatggattgagttatctgggtggtctctagccatctgggcagtgtggttctgtctaaccaaagggcattggcctcaaaccctgcatttggtttaggggctaacagagctcctcagataatcttcacacacatgtaactgctggagatcttattctattatgaataagaaacgagaagtttttccaaagtgttagtcaggatctgaaggctgtcattcagataacccagcttttccttttggcttttagcccattcagactttgccagagtcaagccaaggattgcttttttgctacagttttctgccaaatggcctagttcctgagtacctggaaaccagagagaaagaggatccaggatgtacttggatgaggaggcctggcttatctaggaagtcgtgtctggggtgcttattgctgctccatacagctgtacgtcagccccttggccttctctgtaggttcttggcagcaatgagcagctttcactcagtgacacaagtaattactgagtcctaatttgatagccaccaactgtacctgggtaggcaaagtcagatttttgagaacctttttcctgatttgaagttttaattaccttattttcttttatgctttcctctgtcttgtaatcttttctcttcttaatatccttccctataatttcaattatttggattaattttagaataaacctatttatttct

SEQ ID NO: 185916 - DNA, 462 bp, Homo sapiens
  Payload ID: 16603
  Gene Symbol: SGPL1
  Gene Name: sphingosine-1-phosphate lyase 1
  ENST ID: ENST00000409118
  CDS Start-End: 1-407
agattcaagacaagttgaacaagaccaaggatgatattagcaagaacatgtcattcctgaaagtggacaaagagtatgtgaaagctttaccctcccagggtctgagctcatctgctgttttggagaaacttaaggagtacagctctatggacgccttctggcaagaggggagagcctctggaacagtgtacagtggggaggagaagctcactgagctccttgtgaaggcttatggagattttgcatggagtaaccccctgcatccagatatcttcccaggactacgcaagatagaggcagaaatcgtgaggatagcttgttccctgttcaatgggggaccagattcgtgtggatgtgtaagtatatgcaaggggcatccaatagccttattttttaggttaaaatagaagagtttttaataaatattaattatattttaaaaaataaaaaatattaaaaata

SEQ ID NO: 185917 - DNA, 3312 bp, Homo sapiens
  Payload ID: 16604
  Gene Symbol: SGPP1
  Gene Name: sphingosine-1-phosphate phosphatase 1
  Uniprot ID: Q9BX95
  ENST ID: ENST00000247225
  CDS Start-End: 96-1421
agcgctgtgccggttccgctgccgctggccaggagcgcggggacagttcggggctgcgccggaggccggcccgccttcccgggggttccgttatcatgtcgctgaggcagcgcctggcccagctggttggccgtctgcaggacccgcagaaagtggcccgtttccagcggctgtgcggggtggaagcgccgccgcgccgctcagcagaccggagggaggatgagaaagcggaggcgcctctcgccggagaccctcgactgcgagggcggcagccaggggcgcctggaggcccccagcctcccgggagcgaccgcaatcagtgcccggccaagccggacggcggcggcgcccccaacggcgtgcggaacgggctggcggccgagctgggcccggcctcgccgcggcgcgcgggcgctctgcgccgcaactcgctgacgggcgaggagggccagctggcccgcgtgagcaactggccgctctactgcctgttctgcttcggcacggagctgggcaacgaactcttctacatcctgttcttccccttctggatctggaacctggaccctctggtgggccggaggctcgtggtcatctgggtgctggtcatgtacctgggccagtgcaccaaggacatcatccgctggccgaggcccgcctcgccgcccgtggtcaagttggaggtcttctacaactctgagtacagcatgccctccacccatgccatgtccggcaccgccatccccatttctatggtcctcctcacctatggccgctggcagtaccctcttatatatggactgattcttattccctgctggtgttctctagtttgcctaagtagaatttacatgggaatgcactctattctggatattattgctggattcctatataccattttaatcttagctgtcttctatccatttgtggacctgattgacaacttcaaccaaactcacaaatatgctccattcatcatcatcgggcttcatttagctttggggatcttttctttcactcttgacacctggagcacatcccgaggagacacagccgagatactaggaagtggtgctggaattgcatgtggatctcatgttacttataacatgggtctagtattagatccttctctagatacattacctttagctgggccccccattactgtgactctgtttggaaaagccatattgcggatcctcatagggatggtatttgtactaataatcagagatgtaatgaaaaagatcaccattcctttagcctgcaaaatcttcaatataccgtgtgatgatattcgaaaagcaagacagcacatggaagttgaacttccttatcggtatattacctatggaatggttggtttctccatcacattttttgttccttacatatttttctttattggtatctcttgatggagaagtattgtttatgataagaaaggagggtatcagttactgatacccaaaaatatattccaggtaaagccaggtcagaattaggcttttgcaggaatttaacttaaataattatttaagtaaattcataagagtcagtgcattttatcattgcacatccagatactgttttaggtgagctgagctatttcgttactgagaaaatgataagtatccatttagaatgttcatgtaatgtttggagagttttgtattatggattcaacttatatataatatatataaggtacataatatgcaattatatatctgatatatattatatataaaataatatacctaagtgtttttttaaactatgggagtgtattataaaatcaataataatatgcaaacagttgtgcctgtgtatttgaactacatacaggtatgttgttattaacagatatatttaacatttatttactatgggagccatttcctaattgaattgcgtaattactagaccagaatgcatatgctactatacattgatttactgcctgtttttacactgccattacctttcatgttatccatgatgttgaacatgggaggcatttttaatggaccaaatttttagaaaaattagtttttggatttttttttaagttctgtatactgttttgaatgaactttatttgcagctattctggatgtcagtttaataattcaggtactgaattttattgcttgctaattgtgcctttccgttgctaaattaagaaatgctatgtgtactgtgatgtaaaaataagacattaactttatcttaagttacatataatcaagcaaatattttaaaaaatgtatgtcagggtgacaggcataaaagtaaattacccttaactctttagcctttatttagaaagaaatgtggaatgggctaaactttctcaccaatttattagaaagctaaatggataaatacttccctttttgtagatatttttctgtgcattgtaagttataggagcaggacatattttttgtacattgtcttgattgtttatactgcaggtaggtatttccagtgaatggaaacgttgaaatttatagatgggacaatgcacatacttcatatgtaaacaaagcatttttctaaataatttggaaaggattggatttagcaccgttaacttttaatacccatttattggctatttaaggtaaattataaaacctaaaattagtatcagtattttagatcctattattttttcaactttctattattttcacagtggaaaatttgcgtatagtattaaactattcttttttctgtctacctttatattttgaagtgtggttgtacttacgttaatagtaagtgtatttgtagaaagtttttcataaagaagagattaactttccatataaataaataccaggtatgaaattactgattttagtgcaatatctgtatgattatccagaactatcacttcagatgtttctattttgggcaccataactatttgagctcatatttttataattctgattgagaatttaggggcatggtaatttttaccaaaactgaagctggtaattttaagtaaagcaactaaatttaccctttacttattagttaaaaggaaaccaaggcatgtaggaaaatattggtacgttggaaaatgtgaaaagagctttactttcaaaatgtatgtttaatgaattgaattttagggaccgtttcccataatttgggcctatgctatcctgttgatttttatgtctagcttaaaaggtatttgaaaatgttccatttgtgttttattattttctgtcctatgacagttctatgctaaatgtattttaaaataaaagccaaattgaagattaaaga

SEQ ID NO: 185918 - DNA, 3336 bp, Homo sapiens
  Payload ID: 16605
  Gene Symbol: SGPP2
  Gene Name: sphingosine-1-phosphate phosphatase 2
  Uniprot ID: Q8IWX5
  ENST ID: ENST00000321276
  CDS Start-End: 87-1286
ggcgggggcgaggcgggagtggcggtgccagcggagggcaccggcccggcgtggcagcggcggcggagcgcggccccgggcacaccatggccgagctgctgcggagcctgcaggattcccagctcgtcgcccgcttccagcgccgctgcgggctcttccccgctccggatgaaggcccccgggagaacggcgcggaccccacggagcgcgcggcgcgggtccccggggtcgagcatctccccgcagccaacggcaagggcggcgaggctccggccaacgggctgcgcagagccgcggcgccggaggcttatgtacagaagtacgtcgtgaagaattatttctactattacctattccaattttcagctgctttgggccaagaagtgttctacatcacgtttcttccattcactcactggaatattgacccttatttatccagaagattgatcatcatatgggttttggtgatgtatattggccaagtggccaaggatgtcttgaagtggccccgtccctcctcccctccagttgtaaaactggaaaagagactgatcgctgaatatggaatgccatccacccacgccatggcggccactgccattgccttcaccctccttatctctactatggacagataccagtatccatttgtgttgggactggtgatggccgtggtgttttccaccttggtgtgtctcagcaggctctacactgggatgcatacggtcctggatgtgctgggtggcgtcctgatcaccgcactcctcatcgtcctcacctaccctgcctggaccttcatcgactgcctggactcggccagccccctcttccccgtgtgtgtcatagttgtgccattcttcctgtgttacaattaccctgtttctgattactacagcccaacccgggcggacaccaccaccattctggctgccggggctggagtgaccataggattctggatcaaccatttcttccagcttgtatccaagcccgctgaatctctccctgttattcagaacatcccaccactcaccacctacatgttagttttgggtctgaccaaatttgcagtgggaattgtgttgatcctcttggttcgtcagcttgtacaaaatctctcactgcaagtattatactcatggttcaaggtggtcaccaggaacaaggaggccaggcggagactggagattgaagtgccttacaagtttgttacctacacatctgttggcatctgcgctacaacctttgtgccgatgcttcacaggtttctgggattaccctgagtctcaaacagttggaaactagcccactggacatgaaagccaagacataggaaagttattggtaggcaaatcttgacaacttatttttctttaacaacaacaaaaagtcatacggctgtcttgctactaccagataaatgatgctgctgtgtgaaaggaagaactgtctcatagcggtcattggtcgtccgtggtggttggttgtgctacagttgaacccaggctaaagaccataatccggatctttaaaggcacacaccgcgccccccccccccccgcccggcccctgctcctctcgctgttgcacgggctttggatctagtcatgggctggcaggaattgtggcctggcttaggaatagctatgagccccactgggttctggagagccagtagagatggggtgatctgggaggctggaggtagagcctttcttttccgttacaaccttgcctagcatggagttatttctaaaatgggaactttggtctaggagaaggggtggcaccatatgaaacggcattccttggacagggtgacttccttatcgtttatttggtgattttttgttttgttttgtttgagacaggatcttgctctgtttcccaggctgtattacagtggcacaatctcagctcactgcaaactctgcctcccgggctcaagcaatcctcctgcctgagccaactgagtagctgggactgtaagcatagaccaccatgtgcccagctaatttttgtagagacagggtttctccatgttgcccaggtacgtctgaaactcctgggcttaagtgatccacccacctcagcctcccaaagtgctgggattataggcatgagccactgtgcccggcctcctccttgttatgatcaaattagactgtgcctggttgggtggtaagatcactctgaaagaaagctcactgtgaagagatgaaaggtggaggcagagctgtgaggtcatggggaaaagcctgctttccttataagtcctgctgttcatgttggaataaggatctgctcttccttgtttccatgcattttgcaggattccaggtaccattaccacactcttctgacccatgaaaccaactggctgctcacacatcaccaaacaggttgggggttagccttcagcacaggtggatacatctgggattcactgagattcctgccctctcctgcttcctagtggtttgggacaggccctctgcccatcgtcagcagttttttgctttcatacaaacctggaaggcactggcatctgcctaggaaagtggatctgtgaagaacagatgaactcaatcctttctggagtctgacaaagaagggataggcttccttgacattgcctgtcctgacaaggcctccctgacattactcctccaatttcacagttaccttctgtaaatctattttctcatctactgaatagaatcaggcgccctttttgtcttcccacctcttatctcttggcaattttaaggggaattaatgcaagaacaactttagtgtctcttgggaaaacaagccaaccaaatacaaaacccattaagcctactagggtgagtcctcttaacatgggaaggcgatgattatgcaaacaccggagttccctcctcttcagttcctaagaataaagaacaggtatcaagaactttctttaaagttagtgtaactatagttaacaaagtatccattgaagtttagtgcctgtaggactgagccagtgctttatcaacccaacacatcatcaccatgtgcatactctagaaaaaaaaatagcttccttaaaagttacagaggctcttaacgtgttaaaaccgaaaaatcacatttttcttgatttcaaatatgttctacggccttactgttgggatgatatttagtatgtaacttagcattccaatttctcaagaatttttaggccgggtgcggtggctcatgcctgtaatcccagcactttgggaggccgaggtgggcggaccacgaggtcaggagatcgagaccatcctggctaacacggtaccccgtctctactgaaaatac

SEQ ID NO: 185919 - DNA, 2909 bp, Homo sapiens
  Payload ID: 16606
  Gene Symbol: S1PR1
  Gene Name: sphingosine-1-phosphate receptor 1
  Uniprot ID: P21453
  ENST ID: ENST00000305352
  CDS Start-End: 376-1524
ggcgcggcgctgggtgacttcgcgtagcaggcagggaactggccgcggcgagcgggactggccattggagtgctccgctgcggagggaggggaccccgactcgagtaagtttgcgagagcactacgcagtcagtcgggggcagcagcaagatgcgaagcgagccgtacagatcccgggctctccgaacgcaacttcgccctgcttgagcgaggctgcggtttccgaggccctctccagccaaggaaaagctacacaaaaagcctggatcactcatcgaaccacccctgaagccagtgaaggctctctcgcctcgccctctagcgttcgtctggagtagcgccaccccggcttcctggggacacagggttggcaccatggggcccaccagcgtcccgctggtcaaggcccaccgcagctcggtctctgactacgtcaactatgatatcatcgtccggcattacaactacacgggaaagctgaatatcagcgcggacaaggagaacagcattaaactgacctcggtggtgttcattctcatctgctgctttatcatcctggagaacatctttgtcttgctgaccatttggaaaaccaagaaattccaccgacccatgtactattttattggcaatctggccctctcagacctgttggcaggagtagcctacacagctaacctgctcttgtctggggccaccacctacaagctcactcccgcccagtggtttctgcgggaagggagtatgtttgtggccctgtcagcctccgtgttcagtctcctcgccatcgccattgagcgctatatcacaatgctgaaaatgaaactccacaacgggagcaataacttccgcctcttcctgctaatcagcgcctgctgggtcatctccctcatcctgggtggcctgcctatcatgggctggaactgcatcagtgcgctgtccagctgctccaccgtgctgccgctctaccacaagcactatatcctcttctgcaccacggtcttcactctgcttctgctctccatcgtcattctgtactgcagaatctactccttggtcaggactcggagccgccgcctgacgttccgcaagaacatttccaaggccagccgcagctctgagaagtcgctggcgctgctcaagaccgtaattatcgtcctgagcgtcttcatcgcctgctgggcaccgctcttcatcctgctcctgctggatgtgggctgcaaggtgaagacctgtgacatcctcttcagagcggagtacttcctggtgttagctgtgctcaactccggcaccaaccccatcatttacactctgaccaacaaggagatgcgtcgggccttcatccggatcatgtcctgctgcaagtgcccgagcggagactctgctggcaaattcaagcgacccatcatcgccggcatggaattcagccgcagcaaatcggacaattcctcccacccccagaaagacgaaggggacaacccagagaccattatgtcttctggaaacgtcaactcttcttcctagaactggaagctgtccacccaccggaagcgctctttacttggtcgctggccaccccagtgtttggaaaaaaatctctgggcttcgactgctgccagggaggagctgctgcaagccagagggaggaagggggagaatacgaacagcctggtggtgtcgggtgttggtgggtagagttagttcctgtgaacaatgcactgggaagggtggagatcaggtcccggcctggaatatattttctacccccctggagctttgattttgcactgagccaaaggtctagcattgtcaagctcctaaagggttcatttggcccctcctcaaagactaatgtccccatgtgaaagcgtctctttgtctggagctttgaggagatgttttccttcactttagtttcaaacccaagtgagtgtgtgcacttctgcttctttagggatgccctgtacatcccacaccccaccctcccttcccttcatacccctcctcaacgttcttttactttatactttaactacctgagagttatcagagctggggttgtggaatgatcgatcatctatagcaaataggctatgttgagtacgtaggctgtgggaagatgaagatggtttggaggtgtaaaacaatgtccttcgctgaggccaaagtttccatgtaagcgggatccgttttttggaatttggttgaagtcactttgatttctttaaaaaacatcttttcaatgaaatgtgttaccatttcatatccattgaagccgaaatctgcataaggaagcccactttatctaaatgatattagccaggatccttggtgtcctaggagaaacagacaagcaaaacaaagtgaaaaccgaatggattaacttttgcaaaccaagggagatttcttagcaaatgagtctaacaaatatgacatctgtctttggcacttttgttgatgtttatttcagaatgttgtgtgattcatttcaagcaacaacatggttgtattttgttgtgttaaaagtacttttcttgatttttgaatgtatttgtttcagcagaagtcattttattggatttttctaacccgtgttaacaccattgaatgtgtatttcttaagaaaataccaccctcttgtgcccttaaaagcattactttaactggtagggaacgccagaaacttttcagtccagctattcattagatagtaattgaagatatgtataaatattacaaagaataaaaatatattactgtctctttagtatggttttcagtgcaattaaaccgagagatgtcttgtttttttaaaaagaatagtatttaataggtttctgacttttgtggatcattttgcacatagctttatcaacttttaaacattaataaactgatttttttaaaga

SEQ ID NO: 185920 - DNA, 3582 bp, Homo sapiens
  Payload ID: 16607
  Gene Symbol: S1PR2
  Gene Name: sphingosine-1-phosphate receptor 2
  Uniprot ID: O95136
  ENST ID: ENST00000590320
  CDS Start-End: 112-1173
cggccgccctggggacgcagacgccaaggcccctccggccagggccgggagccgggccggcctagccagttctgaaagccccatggccccagcaggcctctgagccccaccatgggcagcttgtactcggagtacctgaaccccaacaaggtccaggaacactataattataccaaggagacgctggaaacgcaggagacgacctcccgccaggtggcctcggccttcatcgtcatcctctgttgcgccattgtggtggaaaaccttctggtgctcattgcggtggcccgaaacagcaagttccactcggcaatgtacctgtttctgggcaacctggccgcctccgatctactggcaggcgtggccttcgtagccaataccttgctctctggctctgtcacgctgaggctgacgcctgtgcagtggtttgcccgggagggctctgccttcatcacgctctcggcctctgtcttcagcctcctggccatcgccattgagcgccacgtggccattgccaaggtcaagctgtatggcagcgacaagagctgccgcatgcttctgctcatcggggcctcgtggctcatctcgctggtcctcggtggcctgcccatccttggctggaactgcctgggccacctcgaggcctgctccactgtcctgcctctctacgccaagcattatgtgctgtgcgtggtgaccatcttctccatcatcctgttggccatcgtggccctgtacgtgcgcatctactgcgtggtccgctcaagccacgctgacatggccgccccgcagacgctagccctgctcaagacggtcaccatcgtgctaggcgtctttatcgtctgctggctgcccgccttcagcatcctccttctggactatgcctgtcccgtccactcctgcccgatcctctacaaagcccactactttttcgccgtctccaccctgaattccctgctcaaccccgtcatctacacgtggcgcagccgggacctgcggcgggaggtgcttcggccgctgcagtgctggaggccgggggtgggggtgcaaggacggaggcggggcgggaccccgggccaccacctcctgccactccgcagctccagctccctggagaggggcatgcacatgcccacgtcacccacgtttctggagggcaacacggtggtctgagggtgggggtggaccaacaaccaggccagggcagaggggttcatggagaggccactgggtgaccccagatagagacttggggctactgagccagatgcccccgccccacagacctgggtgatgttgcaaatatttcacacctggaaaggccagataaggcactgactagtcacatagcagtgttgcagtgcggtcctgagggccagtccagtggctagtgtgacccctttagaactggatcctggggaggccagggcaggggacctgtgaagagccagggtgagggcaggcagcatttaaggggagctcagggcaggagcactttaccacctggtacaaaggatttttttttttttttgagacggaatcttgcactgctgcccaggctggagtgcagtggcgtgatctcggctcaccgcaagctccgcctcctgggttcatgtcgttctcctgcctcagcctcccaagtagctgggactataggcgcctgccaccacacctggctaattttttgtacctttagtagagatggggtttcaccgtgttagccaggatggtcttgatctcctgacctcgtgatccgcccgcctcggcctcccaaagtgctgggattacaggcgtgagccaccgtgcccggctttttttttttttttttttttttttttttttttttttgagatgaagtctcgctctgttgcccaggctggagagtgcagtggtacggtctcagctcactgcaacctccacctcccaggttcaagcgattctccagcctgagcctcctgagtagctgggattacaggtgcctaccaccacgcccaggtaattttttttttttttgtatttttagtagagacggggtttcaccatgttggccaggctggtctcgaactcctgacctcatgatccgcccgtgttggcctcccaaagtgtgggattacaggcgtaagccacctcacctggcggtacaaagaatttctgcattttcttccctggcccctagtcctgcaccgatttctccttttcgaatgtattcctcctgccaccttctctgggcaacttcgtgcgactacagaaccactgtcctgaggagctagaggcctcctctctgaccatccagagcccaaatccacagcttccccaaatttcatcagctgccacttgacgacttctccccgtctctctgaggcccggaaaccacggctggaggtggggaggggatggcggctgaggtccattcctcattctcagacctcattgctcagttgcactatttggggcacagaataatcaccaaaagtgagaaaaacgagtttgggtggctggggaggactttgggactcttgatgcaaggcgcaacttgagaaaattctgggtgtgatatttgcacagacaccctcctttcaaaaacagccaccccccaagctattctcagctccacacctgcagccccagctaaggtaccaggtctcctgagcaaggcagagagaagccttgagccttctctgtgtcttctttcaagaaccccgctgtgtcttctttcaagattttttttttgagacagtttcaagatttttgttttgtttttgagatggagtctcactgtgtcacccaggctgaggtggcagtggttcaatctccgttcactgccacctccacctcccgggttcaagcgattctcctgcttcagcctctcgagtagctgggactacaggcacctgccaccatgtctggctaatttttgtatttttagtagagacagggtttcactacgttggccaggctggtctcaaactcctgacctcaagtgatccgcccgcctcggcctccccaattgctgggattacaggcgtgagccactgtgcccggccttcttctttcaagttatatagaatggagcatgggggtggcagtggctagggacatttcctggggacactctcccctaaccccccagaaggacttcacaaaaacctgtggataatggaagggatgttacggtacaaacgtatatttatgtgtgtgtgtgtgtatgtgtgtgcgcgcgcgcgtgtgcacataggcgtgatgtctgtgaccctcctctcctcgtcacatttcccccagaatgaatgctgtcctgtctgctcatgtttgtgttgaagctgccaaagtcggggagctctggtcctgcccagacccctttggaattgctggcccatcctcccactggagagctggggtgcagctcaccttggggaaggaaacctcatgcctcagagtaatttcttgtgaatgcaaagcctgggggagcgggtctttggggggcaaggagccagtcaggggcttgtttcccctcatagagctccccagacgtgcctccgcaatgcctgaaacccagacctaggctaataaacggttcaatttctg

SEQ ID NO: 185921 - DNA, 4206 bp, Homo sapiens
  Payload ID: 16608
  Gene Symbol: S1PR3
  Gene Name: sphingosine-1-phosphate receptor 3
  Uniprot ID: Q99500
  ENST ID: ENST00000358157
  CDS Start-End: 397-1533
tagtctctgactcgctcgggcagaggccgaggaagccggttccggggacgggcaacagggactcagggaccagaaggcggctgcaggacgcgaccgagcaggaccccaggcccgggaacgacgtcgcgagcgctgagactgccgggcctcccagcccatctggcattcgagcgcaggaccgggcgccccggcaccgccgcgcgccacccgctaggatgccggtggccccagcgccctcagccgacggaggagccctttttcaacgccctcgctggagtctggcctgcacgccttgctgaatgaagccggaacctcagccccgcttccctttgaaatgaatgttcctggggcgccctctcgtggattttggagctaatcgtctgtgaatgccaagtgatggcaactgccctcccgccgcgtctccagccggtgcgggggaacgagaccctgcgggagcattaccagtacgtggggaagttggcgggcaggctgaaggaggcctccgagggcagcacgctcaccaccgtgctcttcttggtcatctgcagcttcatcgtcttggagaacctgatggttttgattgccatctggaaaaacaataaatttcacaaccgcatgtactttttcattggcaacctggctctctgcgacctgctggccggcatcgcttacaaggtcaacattctgatgtctggcaagaagacgttcagcctgtctcccacggtctggttcctcagggagggcagtatgttcgtggcccttggggcgtccacctgcagcttactggccatcgccatcgagcggcacttgacaatgatcaaaatgaggccttacgacgccaacaagaggcaccgcgtcttcctcctgatcgggatgtgctggctcattgccttcacgctgggcgccctgcccattctgggctggaactgcctgcacaatctccctgactgctctaccatcctgcccctctactccaagaagtacattgccttctgcatcagcatcttcacggccatcctggtgaccatcgtgatcctctacgcacgcatctacttcctggtgaagtccagcagccgtaaggtggccaaccacaacaactcggagcggtccatggcactgctgcggaccgtggtgattgtggtgagcgtgttcatcgcctgctggtccccactcttcatcctcttcctcattgatgtggcctgcagggtgcaggcgtgccccatcctcttcaaggctcagtggttcatcgtgttggctgtgctcaactccgccatgaacccggtcatctacacgctggccagcaaggagatgcggcgggccttcttccgtctggtctgcaactgcctggtcaggggacggggggcccgcgcctcacccatccagcctgcgctcgacccaagcagaagtaaatcaagcagcagcaacaatagcagccactctccgaaggtcaaggaagacctgccccacacagccccctcatcctgcatcatggacaagaacgcagcacttcagaatgggatcttctgcaactgatcgtctccatgcgccctgctctgcggctgtgttcttatttattgcatgcgtcgcttccacaggggcccctcaagagctgtgactcgggagagctaccttactttgaccaacagcctgcccagtgtggatgtctcttacagagggggcccaaggaatcaccaccccgcttcagtgtaaacaacgtgccttgtccactttgggctccagagtctttcagatgtactaagctgctgacatcatccactgccttctgctgcatcctagacaccctccctgttgttcacagagagggaaggtcgtgggccacacaatgctgtgtgaccctctccgtgtgcctctgaatggtgttttgatgattttacactacatttcctgtgcgtagaatggatgcttgtatattcgtacatctctatgttacacagaatttgtgttgcaggtgtttgccatgtggtacctacatagaatctccatacaacacacaggtaacaggttatacaagtggattcagactgaacccccagtacaaggacattgttttgaactaggtggacatgccatccctggtctccttagactgacatgattctcatgttaaccaagttttaaaagttcaaattccccaaaaaggcttgtccaaggctggccccagatgtgtgggtctgacccacaccagccctgtgtcctgtcctttcagtcatttgtccctgcgtaattttaatcgtattccaaagcccaattatgtgatggttttcaggtttctgcaaattacagaagagccagccaagatcacccaggagcttgtgcccccagatgggccaaagaaagagcctatgaaggagaagcagaagcagacggctggcctggctcaccttcccacgccagtggggcaggggtctgcttcaggaaatggaagctgtccaggaaatgagcagagattcacaagacagcactttgattctatgttgagtttgtttctatattagaaaagcagcaagtcagtaatcccccgtggcatcacagctaagtagctgtggccaccggcagtttcacagcatcctgaaagctggcactgatcgtgactatcagtgaaagaagtttaattttcaggttagaaaatgtgatctggcagtttatgcattcttcagagtaatgtaataatacctatgtgatgctgtaattttacttttcaacataagttgaacccgtagcagtctgtttaccttgtaaagggattacttagaagacatttttgtacatgctcttccccaaggattgtacgtattatacaaatagatggaaagaaaagtgaacacgtttgtagaactttcataagcacacagttgctgtgttgagttctctttaaaaacaaggacaaaaccaaccagcgttcaaaggaacctcccatcagagtcccctaaagtattttaggttcagtgagcatttgcctgaataaaacctaaaagagtagtcttaacacattactaactttttctaagagaaattgattcctgttttgtcatctgatgcaatttgctcttataaagagacattttcataggttcagagtaactcacctccatgggctgaccaaaggcttttctaatttttgttactgatgagatgaaacctatttgtaaggagatcttccccaggagcatttctgttgccttcttgacatcaatgaaaagtagcatattctcttatgaaatagcatgagaaaacacagggcatttctaggacagtaaaacgttaaagtactggattaagaaaacaacaacaggctgggcgcagtggctcacacctgtaatcccagcactttgggaggctgaggcgggtggatcacctgaggtcaggagtttgtgaccagcctggccaacatagtgaaatcctgtttctactaaaaatacaaaaattagctggatgcgatagcacgtgcctgtagtcccagctactcgggaggctgaggctggagagttgctcaaacccgggaggcggagattgcagtgagccaagatcgcaccgctgcactccagcctgggtgacagagcgaccctctgtctcaaaaaataataataataataaataaaacaacaacaaaatgcatcagagagccaaaacattcagtattgcattttcacataggtgatgaaatgactttggaactttatctgtgttatagttatgagttgctttgggagacttggagctctctgtagctattgttcataacactttgctccataaccctgatgtccgcagtatctaagtatctcagccttcatccattaactctactagggagcccacagccaccatttccactaggaggtatcaatatttgtggtatgacataaggctcccttgaaataacaagacttttgagcaatctgaattaaaaatacatcaaaaaagtaatagcgctcatttgctaaatgcaaaaaataatcacctttgataccaatgtgcaccaatatgcctaactagctagccagctggagataatttaccagggaatgtttcaaagccctaaccttgaagtttggaaacaggtggtcttctatgctgcagagaaactatgcattaggtctcttttcaattagaaacctttactatttccaatgtatgtttgttaaaaataataataataaaaccaaaagcctttgtggaaaccca

SEQ ID NO: 185922 - DNA, 8505 bp, Homo sapiens
  Payload ID: 16608
  Gene Symbol: S1PR3
  Gene Name: sphingosine-1-phosphate receptor 3
  Uniprot ID: Q99500
  ENST ID: ENST00000375846
  CDS Start-End: 4696-5832
catggggagaggaaagcaatggacacaattgtatcctgtagggtttcattcacgtgaaggtcagaagcaggctaaactcacctaggggagagtcctatcccaggtagtggtcatgcttggggacaggtggtgactaggaggggcacaaggaaggctgcagggtccggcccatcttgttgctggcctgggtgctggtctcactgatctctgtgtggtggggcaggtcagcctcccaggcctgctggtgcctgcagtgcccagcactcctgccgtgcctggcagtgttagtaccaatccgccagagtgactgactcccctcttgccctgagtagggcttgctgactccaggagcctcagggcggggtgggctttgagctttcttctagcaaacttgaggtctgtggctggtacccctcaggagcggaggggaactcttgtccatgagatgcttttaaccgtgcgcaataatgtgtagacgcatccaaaatcaatctggcctttagcccagcacttaactcttgggatgaggcctgctttgtaaatgttgataatccagagaaaatgagcttttagattccaaagacagccagatatcttccacttatgcaaaatgcagagaatcatatttaacaaaagatgttctggacaaatatgcttcttgagggatgaatatttaattataagggaaatgataaatcaaacattaatgggaaaatatgtttgccctcaagattcatgattttgatgggtctctggcaaatcttatactatgtttattggggttattttattgctggttattagtttttaattgtttgcttgttttctgctctgatcaatttttgtataagccgtgggtctattcaccctcttctctccattcccgggagcaagtccacatctggctgttggatgcatggcaaaagcaaaggtgtggagaaggttcagaggagacaggacatgtataaaatggtagggtcaggttgtcatgggggaaactgaggcacaggaggcaagctgagttagtacaagaacagtctgaatcataacgacatgccagtattacctaaaaggatgaggaacatggagctgtacttgaatccctacgtgagctggggaaaaggggcctcaggaatcactgacattggaaccaaggtttgtctgcagcttgtcggtttctgggacagaaacccaacatactggagtgggtatcccagcaatctgtaggataaaccaggacactgtggtgtcatggatagctggctgtctgccaggtgatggcccctctggttgcaatgtgagccgggcaggtcatccatttggcagcatggtgagggctctggccccagttgctatgggagggaggatgctggcacagggcactgttcacagactgcctttgctccatgccttttccatgagcatgagtggctgttcgtgtgggaaacggcagagccctcgcggtccccatcagcactgtgcagtggtaccggaggtggcaggagacagcctgatggcccaggttgtcttcatacccggcttcatgccagggtgcatgccgggcatagcacatgtgtccctgagaggcccctgatcaggggtggaaacccagcaaagtgaaaatcagaaatagtgattctccagttcctgttcacagataaagaaagaaagaaataataagcaatactaggcctggtgtggtagttcacacctgtaatcccagcactttgggaggccaaggcaggcaatcacttgaggtcaggagttcaagaccagcctggccaacatggtgaaaccccgtctctactaaaaatacaaatattagccgggcatggtggcgggcgcctgtagtcccagctactcaggaggctgaggcagaagaatcgcttgaaccggggaggcggagggtgtggtgagccgggatcgcaccgctgcactccagcctgggtgacagaatgagactccatcccaaaaacaaaacaaaacaaaacaaaaaacaaacaaaaacaactaaaaggacagtatctttttagcacccatcagtgtacaggatgctggggagggtactgtgaacttacccatggtgaaagtccctgtgttaatggataagctcaatgctcagaaaatgctgctgactgtggtattgccccatttaaagagacagtttgcagtacgttttcagaagtggcatgcagcctcagagaaaagtcaccaggggctggcatgattccagaaaatgttacagagcaagtggaatttgacttgaggcttgaaggatgggcaagatttaaataaaattcagaaacggtagagagggaggggctggggggaaggctgcccactggactgtcctgtttgcctccaggagaacctacaggcaagacatggtctcttctcaggtgaatgggaagccaagtagggctggcatgggtgagccacagctcgaggaggcaggccccgggccctgcgctgcctgtcatggctcatgagtgatgggagagatctgggcaggcaacctcctctcatcctgcatcatcagcctggacttggaacttggctgctttttctttctgcagttagcagagggccttggccaacacataagcctttctgccagcacttggcattccagctgacctcgacccaaggcctctgtgacttcaggaggcggcagctgggaagggtcagggcagttccaggcagagcacagacgtcagctcagacatcctaccccccgccaaccccccgcccccggggtttccagagcaaccaacaccaccaagctccaggacactggaaaaaaaatctttgcaaagaagcaaggggccatctcagaaaatccaggtcccccaaattgatgtagggagaggagggctttgacagcattcagcactccagagggtcacgaggatacagaaaccatttggagccacctctgcttctcagccccacccaggcaagccctggatcttcaagggactgatttgtacctgggaataaactcatgcatggatgagattcagagtcaatcacaccctaaaatgcagagcccatagtattggtgagttgttcatgtgtctctgaagcaaatttagggctgtggttcaaacatcgtaaaagttaaaaaaaattcactggatacacacagtaggctcttttaaattagcctcatttgaacttaattacatatttaaatactcaaataataaatgatggctgggtgcggtgtctcatgcctgtaatcccagcactttgggaggctgaggcaggctgatcacttgaggtcaggagttcgagcccagcctggccaacatggtgaaaccccgtctctactaaaaatacaaaaattagccatgcatggtggcgggtgcctgtaatcccagctacttgggaggctgaggcagcagaagcacttgaacccaggaggcagtggttgcaatgagccgagatcgcaccactgcattccagcctgggtgacagagcaacactgtgtctcaaaagaaaattttttttaataaaaataaaaaataaaataaaataagtgagtccactgaaagcggtttctaccttgatagttgggtgtgtggcgtcatcaacatcacagaaggctgatcgatattaccaggtgtggttgagtgcaagtgtttgaggtctcgtgggggaagagtttggaattcagaatccattgaggccttcactcaccactttccctctctcgctgtgttcccaaatgtgccacttttctgttggctcacatgcacccatgctctatttgatattcagggctctgaatttcaagccagactcagtcagtgtgattgtcactgctttcctgtccttcctttatcatctgtagacttgggtcccgtttttgcaggttgatgttctgtcttcgctgggctctggactcactgctcacgagtgcggtgtctgcatgggcactgcccagacatgcactgttggtccctcgatggctgcatggtcaggcctcagggctctctgccaggccgacctacagcccatacagacctgatttctgggcctggatccaggggatgccatctgggaagtgcgggatcttcccacgatgtcactgtaaaactcaccagggaggttttagaaattgaaccggcatcattcagattccatcctgctttttggtcctgagaaaatcctgcttttccctgagtaactgggataatgggtcaccagctcccatgccctagatgaggactagttagcattttctagtgcctggagatttccagatggaagctgtacttgggtctgtgtatctttgttacaggattcaataattcatgcactgaatttcccttcccggcaactccagacaccaaatcgcttcccatggtgtcccccaatcacttaggaatttagcctgtgtctaaagaccctctctgcagcctgacgtggctagccatcccagtacttccacgtttttcatgcctttctccaacagcgttgccgtggccccttaggcggcgatcgttttatcaatggtcgctccctctttttatctgttggcaggagccctttttcaacgccctcgctggagtctggcctgcacgccttgctgaatgaagccggaacctcagccccgcttccctttgaaatgaatgttcctggggcgccctctcgtggattttggagctaatcgtctgtgaatgccaagtgatggcaactgccctcccgccgcgtctccagccggtgcgggggaacgagaccctgcgggagcattaccagtacgtggggaagttggcgggcaggctgaaggaggcctccgagggcagcacgctcaccaccgtgctcttcttggtcatctgcagcttcatcgtcttggagaacctgatggttttgattgccatctggaaaaacaataaatttcacaaccgcatgtactttttcattggcaacctggctctctgcgacctgctggccggcatcgcttacaaggtcaacattctgatgtctggcaagaagacgttcagcctgtctcccacggtctggttcctcagggagggcagtatgttcgtggcccttggggcgtccacctgcagcttactggccatcgccatcgagcggcacttgacaatgatcaaaatgaggccttacgacgccaacaagaggcaccgcgtcttcctcctgatcgggatgtgctggctcattgccttcacgctgggcgccctgcccattctgggctggaactgcctgcacaatctccctgactgctctaccatcctgcccctctactccaagaagtacattgccttctgcatcagcatcttcacggccatcctggtgaccatcgtgatcctctacgcacgcatctacttcctggtgaagtccagcagccgtaaggtggccaaccacaacaactcggagcggtccatggcactgctgcggaccgtggtgattgtggtgagcgtgttcatcgcctgctggtccccactcttcatcctcttcctcattgatgtggcctgcagggtgcaggcgtgccccatcctcttcaaggctcagtggttcatcgtgttggctgtgctcaactccgccatgaacccggtcatctacacgctggccagcaaggagatgcggcgggccttcttccgtctggtctgcaactgcctggtcaggggacggggggcccgcgcctcacccatccagcctgcgctcgacccaagcagaagtaaatcaagcagcagcaacaatagcagccactctccgaaggtcaaggaagacctgccccacacagccccctcatcctgcatcatggacaagaacgcagcacttcagaatgggatcttctgcaactgatcgtctccatgcgccctgctctgcggctgtgttcttatttattgcatgcgtcgcttccacaggggcccctcaagagctgtgactcgggagagctaccttactttgaccaacagcctgcccagtgtggatgtctcttacagagggggcccaaggaatcaccaccccgcttcagtgtaaacaacgtgccttgtccactttgggctccagagtctttcagatgtactaagctgctgacatcatccactgccttctgctgcatcctagacaccctccctgttgttcacagagagggaaggtcgtgggccacacaatgctgtgtgaccctctccgtgtgcctctgaatggtgttttgatgattttacactacatttcctgtgcgtagaatggatgcttgtatattcgtacatctctatgttacacagaatttgtgttgcaggtgtttgccatgtggtacctacatagaatctccatacaacacacaggtaacaggttatacaagtggattcagactgaacccccagtacaaggacattgttttgaactaggtggacatgccatccctggtctccttagactgacatgattctcatgttaaccaagttttaaaagttcaaattccccaaaaaggcttgtccaaggctggccccagatgtgtgggtctgacccacaccagccctgtgtcctgtcctttcagtcatttgtccctgcgtaattttaatcgtattccaaagcccaattatgtgatggttttcaggtttctgcaaattacagaagagccagccaagatcacccaggagcttgtgcccccagatgggccaaagaaagagcctatgaaggagaagcagaagcagacggctggcctggctcaccttcccacgccagtggggcaggggtctgcttcaggaaatggaagctgtccaggaaatgagcagagattcacaagacagcactttgattctatgttgagtttgtttctatattagaaaagcagcaagtcagtaatcccccgtggcatcacagctaagtagctgtggccaccggcagtttcacagcatcctgaaagctggcactgatcgtgactatcagtgaaagaagtttaattttcaggttagaaaatgtgatctggcagtttatgcattcttcagagtaatgtaataatacctatgtgatgctgtaattttacttttcaacataagttgaacccgtagcagtctgtttaccttgtaaagggattacttagaagacatttttgtacatgctcttccccaaggattgtacgtattatacaaatagatggaaagaaaagtgaacacgtttgtagaactttcataagcacacagttgctgtgttgagttctctttaaaaacaaggacaaaaccaaccagcgttcaaaggaacctcccatcagagtcccctaaagtattttaggttcagtgagcatttgcctgaataaaacctaaaagagtagtcttaacacattactaactttttctaagagaaattgattcctgttttgtcatctgatgcaatttgctcttataaagagacattttcataggttcagagtaactcacctccatgggctgaccaaaggcttttctaatttttgttactgatgagatgaaacctatttgtaaggagatcttccccaggagcatttctgttgccttcttgacatcaatgaaaagtagcatattctcttatgaaatagcatgagaaaacacagggcatttctaggacagtaaaacgttaaagtactggattaagaaaacaacaacaggctgggcgcagtggctcacacctgtaatcccagcactttgggaggctgaggcgggtggatcacctgaggtcaggagtttgtgaccagcctggccaacatagtgaaatcctgtttctactaaaaatacaaaaattagctggatgcgatagcacgtgcctgtagtcccagctactcgggaggctgaggctggagagttgctcaaacccgggaggcggagattgcagtgagccaagatcgcaccgctgcactccagcctgggtgacagagcgaccctctgtctcaaaaaataataataataataaataaaacaacaacaaaatgcatcagagagccaaaacattcagtattgcattttcacataggtgatgaaatgactttggaactttatctgtgttatagttatgagttgctttgggagacttggagctctctgtagctattgttcataacactttgctccataaccctgatgtccgcagtatctaagtatctcagccttcatccattaactctactagggagcccacagccaccatttccactaggaggtatcaatatttgtggtatgacataaggctcccttgaaataacaagacttttgagcaatctgaattaaaaatacatcaaaaaagtaatagcgctcatttgctaaatgcaaaaaataatcacctttgataccaatgtgcaccaatatgcctaactagctagccagctggagataatttaccagggaatgtttcaaagccctaaccttgaagtttggaaacaggtggtcttctatgctgcagagaaactatgcattaggtctcttttcaattagaaacctttactatttccaatgtatgtttgttaaaaataataataataaaaccaaaagcctttgtggaaaccca

SEQ ID NO: 185923 - DNA, 1565 bp, Homo sapiens
  Payload ID: 16609
  Gene Symbol: S1PR4
  Gene Name: sphingosine-1-phosphate receptor 4
  Uniprot ID: O95977
  ENST ID: ENST00000246115
  CDS Start-End: 26-1180
cctcagtcagcccccgggggaggccatgaacgccacggggaccccggtggcccccgagtcctgccaacagctggcggccggcgggcacagccggctcattgttctgcactacaaccactcgggccggctggccgggcgcggggggccggaggatggcggcctgggggccctgcgggggctgtcggtggccgccagctgcctggtggtgctggagaacttgctggtgctggcggccatcaccagccacatgcggtcgcgacgctgggtctactattgcctggtgaacatcacgctgagtgacctgctcacgggcgcggcctacctggccaacgtgctgctgtcgggggcccgcaccttccgtctggcgcccgcccagtggttcctacgggagggcctgctcttcaccgccctggccgcctccaccttcagcctgctcttcactgcaggggagcgctttgccaccatggtgcggccggtggccgagagcggggccaccaagaccagccgcgtctacggcttcatcggcctctgctggctgctggccgcgctgctggggatgctgcctttgctgggctggaactgcctgtgcgcctttgaccgctgctccagccttctgcccctctactccaagcgctacatcctcttctgcctggtgatcttcgccggcgtcctggccaccatcatgggcctctatggggccatcttccgcctggtgcaggccagcgggcagaaggccccacgcccagcggcccgccgcaaggcccgccgcctgctgaagacggtgctgatgatcctgctggccttcctggtgtgctggggcccactcttcgggctgctgctggccgacgtctttggctccaacctctgggcccaggagtacctgcggggcatggactggatcctggccctggccgtcctcaactcggcggtcaaccccatcatctactccttccgcagcagggaggtgtgcagagccgtgctcagcttcctctgctgcgggtgtctccggctgggcatgcgagggcccggggactgcctggcccgggccgtcgaggctcactccggagcttccaccaccgacagctctctgaggccaagggacagctttcgcggctcccgctcgctcagctttcggatgcgggagcccctgtccagcatctccagcgtgcggagcatctgaagttgcagtcttgcgtgtggatggtgcagccaccgggtgcgtgccaggcaggccctcctggggtacaggaagctgtgtgcacgcagcctcgcctgtatggggagcagggaacgggacaggcccccatggtcttcccggtggcctctcggggcttctgacgccaaatgggcttcccatggtcaccctggacaaggaggcaaccaccccacctccccgtaggagcagagagcaccctggtgtgggggcgagtgggttccccacaaccccgcttctgtgtgattctggggaagtcccggcccctctctgggcctcagtagggctcccaggctgcaaggggtggactgtgggatgcatgccctggcaacattgaagttcgatcatggta

SEQ ID NO: 185924 - DNA, 2341 bp, Homo sapiens
  Payload ID: 16610
  Gene Symbol: S1PR5
  Gene Name: sphingosine-1-phosphate receptor 5
  Uniprot ID: Q9H228
  ENST ID: ENST00000333430
  CDS Start-End: 72-1268
ctcactcggttcaaggcagcgcgactgcgggtggcgcacgaccagggcgcagaccttggggcgcgcggcccatggagtcggggctgctgcggccggcgccggtgagcgaggtcatcgtcctgcattacaactacaccggcaagctccgcggtgcgcgctaccagccgggtgccggcctgcgcgccgacgccgtggtgtgcctggcggtgtgcgccttcatcgtgctagagaatctagccgtgttgttggtgctcggacgccacccgcgcttccacgctcccatgttcctgctcctgggcagcctcacgttgtcggatctgctggcaggcgccgcctacgccgccaacatcctactgtcggggccgctcacgctgaaactgtcccccgcgctctggttcgcacgggagggaggcgtcttcgtggcactcactgcgtccgtgctgagcctcctggccatcgcgctggagcgcagcctcaccatggcgcgcagggggcccgcgcccgtctccagtcgggggcgcacgctggcgatggcagccgcggcctggggcgtgtcgctgctcctcgggctcctgccagcgctgggctggaattgcctgggtcgcctggacgcttgctccactgtcttgccgctctacgccaaggcctacgtgctcttctgcgtgctcgccttcgtgggcatcctggccgctatctgtgcactctacgcgcgcatctactgccaggtacgcgccaacgcgcggcgcctgccggcacggcccgggactgcggggaccacctcgacccgggcgcgtcgcaagccgcgctcgctggccttgctgcgcacgctcagcgtggtgctcctggcctttgtggcatgttggggccccctcttcctgctgctgttgctcgacgtggcgtgcccggcgcgcacctgtcctgtactcctgcaggccgatcccttcctgggactggccatggccaactcacttctgaaccccatcatctacacgctcaccaaccgcgacctgcgccacgcgctcctgcgcctggtctgctgcggacgccactcctgcggcagagacccgagtggctcccagcagtcggcgagcgcggctgaggcttccgggggcctgcgccgctgcctgcccccgggccttgatgggagcttcagcggctcggagcgctcatcgccccagcgcgacgggctggacaccagcggctccacaggcagccccggtgcacccacagccgcccggactctggtatcagaaccggctgcagactgacaccctcggcccacgactgtcttcccaagttttacagacttgttctttttacataaaggaatttgtaggaaatgcagccaaaggtgcagtcggaaaagatgcaggggaaatgtatttatgcagcgacaccccacaatgtgaacaaacagacaaaaaatctgtgccctcgtggaattgacgttctgcttgggaacacagaaaagaactcggtgatgaaataatggagatgattccagtgacaaacgacagagatggtgatggtggtcagggaagacctctctgcagaggtagtgacttgtgatgtgagctgagacctctgtcctgggaagaccaaaagaaaagcatttcaggatgagggaatggcatgcgcaaaggccctgaggctgaaatgtgcccatgtgttctaagaaatgcagcgatgctggtgtgcctggagcagggacggagggggagaatgggaggagacaaggagctgaaggagtagttcccgaaggaccttgtgggtgatatagaggacttcgcttttgctctgagtgaggtgggagccatagaagcttctaagcagaagagggacttgccctaattcaggtgatcacaggtgtcttgtggcctccatgggaggttgaaaaccagagaaggtgaaggggggctgcactgagccacaggaacaatgatggagattccagctaagcccagaccccgtggattctagatagattttagaggcagcagacagaattactgaggaattgagtgtaagagtggaataaagttatcaaggacaatgccaagggtggggcacccccaaatttgactctgggagactcagccaaatcctatctggtaataaaatttcttttttatttttcttttctttctttctttcttttttttttttttgagttgggatcttgtgctctgtcacccaggctggagtgcaatgggcacaattatagctcactgcagcctggaactcctgggatcaagcctggagttcctgcttcagcctccctagtagctgggactacaggcatgcaccaccatgcccagttaataaaatttcttcaaatgca

SEQ ID NO: 185925 - DNA, 2191 bp, Homo sapiens
  Payload ID: 16610
  Gene Symbol: S1PR5
  Gene Name: sphingosine-1-phosphate receptor 5
  Uniprot ID: Q9H228
  ENST ID: ENST00000439028
  CDS Start-End: 127-1323
ggctaaggtggcccccactgaagactcctgctaagcaacccactgaagacccctccgaatcatcgacggggcgtccttggggtgcagcccaggaagctcagttcacagccttggggcgcgcggcccatggagtcggggctgctgcggccggcgccggtgagcgaggtcatcgtcctgcattacaactacaccggcaagctccgcggtgcgcgctaccagccgggtgccggcctgcgcgccgacgccgtggtgtgcctggcggtgtgcgccttcatcgtgctagagaatctagccgtgttgttggtgctcggacgccacccgcgcttccacgctcccatgttcctgctcctgggcagcctcacgttgtcggatctgctggcaggcgccgcctacgccgccaacatcctactgtcggggccgctcacgctgaaactgtcccccgcgctctggttcgcacgggagggaggcgtcttcgtggcactcactgcgtccgtgctgagcctcctggccatcgcgctggagcgcagcctcaccatggcgcgcagggggcccgcgcccgtctccagtcgggggcgcacgctggcgatggcagccgcggcctggggcgtgtcgctgctcctcgggctcctgccagcgctgggctggaattgcctgggtcgcctggacgcttgctccactgtcttgccgctctacgccaaggcctacgtgctcttctgcgtgctcgccttcgtgggcatcctggccgctatctgtgcactctacgcgcgcatctactgccaggtacgcgccaacgcgcggcgcctgccggcacggcccgggactgcggggaccacctcgacccgggcgcgtcgcaagccgcgctcgctggccttgctgcgcacgctcagcgtggtgctcctggcctttgtggcatgttggggccccctcttcctgctgctgttgctcgacgtggcgtgcccggcgcgcacctgtcctgtactcctgcaggccgatcccttcctgggactggccatggccaactcacttctgaaccccatcatctacacgctcaccaaccgcgacctgcgccacgcgctcctgcgcctggtctgctgcggacgccactcctgcggcagagacccgagtggctcccagcagtcggcgagcgcggctgaggcttccgggggcctgcgccgctgcctgcccccgggccttgatgggagcttcagcggctcggagcgctcatcgccccagcgcgacgggctggacaccagcggctccacaggcagccccggtgcacccacagccgcccggactctggtatcagaaccggctgcagactgacaccctcggcccacgactgtcttcccaagttttacagacttgttctttttacataaaggaatttgtaggaaatgcagccaaaggtgcagtcggaaaagatgcaggggaaatgtatttatgcagcgacaccccacaatgtgaacaaacagacaaaaaatctgtgccctcgtggaattgacgttctgcttgggaacacagaaaagaactcggtgatgaaataatggagatgattccagtgacaaacgacagagatggtgatggtggtcagggaagacctctctgcagaggtagtgacttgtgatgtgagctgagacctctgtcctgggaagaccaaaagaaaagcatttcaggatgagggaatggcatgcgcaaaggccctgaggctgaaatgtgcccatgtgttctaagaaatgcagcgatgctggtgtgcctggagcagggacggagggggagaatgggaggagacaaggagctgaaggagtagttcccgaaggaccttgtgggtgatatagaggacttcgcttttgctctgagtgaggtgggagccatagaagcttctaagcagaagagggacttgccctaattcaggtgatcacaggtgtcttgtggcctccatgggaggttgaaaaccagagaaggtgaaggggggctgcactgagccacaggaacaatgatggagattccagctaagcccagaccccgtggattctagatagattttagaggcagcagacagaattactgaggaattgagtgtaagagtggaataaagttatcaaggacaatgccaagggtggggcacccccaaatttgactctgggagactcagccaaatcctatctggtaataaaatttcttttttattttt

SEQ ID NO: 185926 - DNA, 565 bp, Homo sapiens
  Payload ID: 16610
  Gene Symbol: S1PR5
  Gene Name: sphingosine-1-phosphate receptor 5
  ENST ID: ENST00000590601
  CDS Start-End: 340-565
actgcgggtggcgcacgaccagggcgcagagtgagtggactgcactggacctttgggggcgctgggctgggcctgacccggagggggtcgccctggcggccactttcccggtctaaaaaggcgcaccactccttgcagggagttctccgaacttttcctggaggcctctggggagggggaagctgggggctccccagctgggtgcaggacctgggatacggggtgaaggtggctggaatcccctggccaccccctcctggccgggccactgcaagtttccatacttcagtcctgctgccgggcaagctgggcggatggggttggcctccccctcagagcatgtgtaaccctgtctccctgtatttgggctccccacctccagcatggccttggggcgcgcggcccatggagtcggggctgctgcggccggcgccggtgagcgaggtcatcgtcctgcattacaactacaccggcaagctccgcggtgcgcgctaccagccgggtgccggcctgcgcgccgacgccgtggtgtgcctggcggtgtgcgccttcatcgtgctagaga

SEQ ID NO: 185927 - DNA, 1698 bp, Homo sapiens
  Payload ID: 16610
  Gene Symbol: S1PR5
  Gene Name: sphingosine-1-phosphate receptor 5
  ENST ID: ENST00000617721
  CDS Start-End: 11-775
cgcgcggcccatggagtcggggctgctgcggccggcgccggtgagcgaggtcatcgtcctgcattacaactacaccggcaagctccgcggtgcgcgctaccagccgggtgccggcctgcgcgccgacgccgtggtgtgcctggcggtgtgcgccttcatcgtgctagagaatctagccgtgttgttggtgctcggacgccacccgcgcttccacgctcccatgttcctgctcctgggcagcctcacgttgtcggatctggcacggcccgggactgcggggaccacctcgacccgggcgcgtcgcaagccgcgctcgctggccttgctgcgcacgctcagcgtggtgctcctggcctttgtggcatgttggggccccctcttcctgctgctgttgctcgacgtggcgtgcccggcgcgcacctgtcctgtactcctgcaggccgatcccttcctgggactggccatggccaactcacttctgaaccccatcatctacacgctcaccaaccgcgacctgcgccacgcgctcctgcgcctggtctgctgcggacgccactcctgcggcagagacccgagtggctcccagcagtcggcgagcgcggctgaggcttccgggggcctgcgccgctgcctgcccccgggccttgatgggagcttcagcggctcggagcgctcatcgccccagcgcgacgggctggacaccagcggctccacaggcagccccggtgcacccacagccgcccggactctggtatcagaaccggctgcagactgacaccctcggcccacgactgtcttcccaagttttacagacttgttctttttacataaaggaatttgtaggaaatgcagccaaaggtgcagtcggaaaagatgcaggggaaatgtatttatgcagcgacaccccacaatgtgaacaaacagacaaaaaatctgtgccctcgtggaattgacgttctgcttgggaacacagaaaagaactcggtgatgaaataatggagatgattccagtgacaaacgacagagatggtgatggtggtcagggaagacctctctgcagaggtagtgacttgtgatgtgagctgagacctctgtcctgggaagaccaaaagaaaagcatttcaggatgagggaatggcatgcgcaaaggccctgaggctgaaatgtgcccatgtgttctaagaaatgcagcgatgctggtgtgcctggagcagggacggagggggagaatgggaggagacaaggagctgaaggagtagttcccgaaggaccttgtgggtgatatagaggacttcgcttttgctctgagtgaggtgggagccatagaagcttctaagcagaagagggacttgccctaattcaggtgatcacaggtgtcttgtggcctccatgggaggttgaaaaccagagaaggtgaaggggggctgcactgagccacaggaacaatgatggagattccagctaagcccagaccccgtggattctagatagattttagaggcagcagacagaattactgaggaattgagtgtaagagtggaataaagttatcaaggacaatgccaagggtggggcacccccaaatttgactctgggagactcagccaaatcctatctggtaataaaatttcttttttatttttcttttctttctttctttcttttttttttttttgagttgggatcttgtgctctgtc

SEQ ID NO: 185928 - DNA, 6804 bp, Homo sapiens
  Payload ID: 16611
  Gene Symbol: SPHKAP
  Gene Name: SPHK1 interactor, AKAP domain containing
  Uniprot ID: Q2M3C7
  ENST ID: ENST00000344657
  CDS Start-End: 29-5044
gtctttcttctctgggcgcccaccaacaatggatggcaactccctgctctcggtaccaagcaacttggagtcatcacggatgtatgacgttttggaaccgcagcagggcagaggctgtggcagctcaggaagcggcccggggaactccatcacagcctgtaagaaggttcttcgcagcaatagcctgctggagtcaacagactactggttgcagaatcagaggatgccctgccaaattggttttgtagaagacaagtctgaaaactgtgcttctgtctgctttgtgaatcttgatgtgaacaaggatgaatgcagcacagagcacctgcaacagaaactggtcaacgtttcaccagatcttccaaaacttatcagttccatgaatgtccaacaaccaaaagaaaatgaaattgttgtcctaagtgggttagcctctggaaatctccaggcagattttgaagtttcacagtgcccttggctgccagatatctgcttggtccaatgtgcaagagggaacagaccaaacagtaccaactgcatcatctttgaaatcaacaaatttctgattggtctggaactggtgcaggagcgacagctccacctggaaacaaacatcttgaaactggaggatgacacgaactgttccttatcttcaatcgaggaagactttctcaccgcttctgagcacttggaggaggaaagcgaggtggatgaatctaggaacgattatgaaaatataaatgtctcagccaatgttttggaaagtaaacagctaaagggagccacccaggtggaatggaattgcaacaaggaaaagtggctttatgctttggaagacaaatacatcaacaaatatcccacaccattgattaaaacagaacgatctccagaaaacctaacaaagaacacagccttgcagagtctagatccctcagccaagccatcacagtggaaaagagaagctgtggggaatgggagacaagccacacattattatcattcagaagcttttaaaggtcaaatggaaaaatcacaggcactgtatattccaaaagatgcttatttctccatgatggataaagatgtaccttctgcatgtgctgtggcagagcagagaagcaacctaaacccaggagaccatgaagacacaagaaacgctctccctcctagacaagatggagaagtcaccactggcaagtatgctacaaatttagcagaatccgtgctgcaggatgcatttattagattatctcaatctcagtccacattaccccaggaatctgcagtcagtgtttctgtaggaagttctctgcttcccagttgctattccacaaaagatacagtggtttctcggtcatggaatgagctccccaaaatcgtcgttgttcagagtccagatggcagtgatgctgccccacagccaggcatctcctcctggcctgagatggaagtctctgttgaaacctcaagcatcctctctggagagaactccagcagacaaccccagagtgctctagaagtggcgttagcttgtgcagccactgtgattggaactatttccagtccacaggccacagaaagactcaaaatggagcaagtggtctcgaactttcccccagggagcagtggtgcactgcaaactcaagcaccccaaggactcaaggaaccttccatcaatgagtactcctttccatctgctttgtgtggcatgactcaggtggccagtgccgtggctgtctgtggtctgggtgaaagagaagaggtgacatgctcagtggctccaagtggtagcctcccgcctgcagctgaggcttctgaagccatgcccccactttgtggtttagcaagcatggagcttggcaaggaagccattgccaagggattgctcaaggaggctgctctggttttaacaaggcctaatacctacagcagcattggagactttctggactccatgaacaggagaatcatggaaactgcttcaaagtctcagaccctgtgctcagaaaatgtcgtcaggaatgaactggcacataccctgtccaatgttatcctgaggcattccattgatgaagttcaccacaaaaatatgataatcgaccccaatgacaacaggcattcatctgaaattctggacaccttaatggaaagtacaaatcaactgcttttagatgtgatatgcttcacgttcaagaagatgagtcatattgtacggcttggtgaatgtcctgctgtcctttctaaggagaccatcagaaggagggagacagaaccaagctgccagccatctgatccgggtgctagtcaagcttggacaaaagccactgaatcctccagcagctctccacttagcaattcacacaacacgagtcttgtcatcaacaatcttgtggatggcatgtattcaaaacaagacaagggtggagtgaggccaggcctcttcaagaaccccacgctgcagtcacaattatcacgtagtcacagagtgcccgattcttcaactgctacaacatcctccaaggaaatatatctgaaaggaatagcaggagaggatacaaaaagccctcatcacagtgagaatgaatgcagagcctcttccgaaggacaaaggtccccaacggtcagccagtccagaagtggttcccaggaggctgaggagagtatccacccaaacacccaagaaaagtacaactgtgccacatctcgcatcaacgaagttcaagtcaacctgtccttgttaggggatgacctgctgcttcctgctcaatccacgcttcaaacaaagcatccagacatctactgcattacagactttgcggaagaattagcagacacggtcgtctccatggcaactgaaattgcagcgatttgccttgacaactccagtggaaaacaaccctggttttgtgcatggaaaagagggagtgagtttctgatgacacccaacgtaccctgccgatccttgaagaggaagaaagagagccaggggagcgggaccgctgtgaggaaacacaagcctccccggctcagtgagatcaagaggaagacggacgagcaccctgagcttaaagaaaagctgatgaacagggttgtggatgagtccatgaaccttgaagatgtcccagattctgtcaatctttttgccaatgaagtggcagccaagatcatgaacctaacggagttctctatggtggacggcatgtggcaggcgcagggctatccccggaatcggttactgagtggcgacaggtggagccggctgaaggcctccagctgcgaaagcattcctgaggaagactccgaggccagggcctatgtcaacagcctgggcttaatgagcacgctgagccagccggtcagcagggccagctctgtctccaagcagtcgagctgtgagagcatcaccgatgagttttccaggttcatggtgaaccagatggaaaatgaagggagaggatttgagttactgctggattactatgctggcaagaacgccagcagcattctgaactcagccatgcaacaggcgtgccggaaaagtgaccacctcagtgtgaggcctagctgtccctctaagcagtccagcacagagagcatcactgaggagttctacaggtacatgctgagggacatcgaaagagacagcagagaaagtgcctcctccagacggagcagccaggattggacagccggcctgctgtctccttctctgcgatccccagtgtgccacagacagtcgtccatgccagacagcagatccccatgctccaggctgacagtgaatgtgcccatcaaagccaactctttagatggctttgctcagaactgcccacaagatttcctaagcgtgcagccggtcagtagcgcgtcctcatccggtctctgcaaatctgactcttgcttgtatcggagaggtgggactgaccacatcaccaacatgttaattcatgaaacgtgggctagctccattgaggctctcatgcgcaagaacaaaatcattgtggatgatgcagaggaagctgacactgagcctgtttctggtggctctccctcgcaagcagagaagtgtgcaaatagattagctgcgagcaggatgtgcagtgggccaactctgcttgttcaggagtctctcgattgcccgaggaaagactctgttaccgaatgtaaacagcccccagtgtcatctttgagcaaaactgcttctcttacaaaccacagccctttagattctaaaaaagaaacttcctcgtgccaggaccctgtaccaataaaccacaaaaggcgatcactttgctcgagggaagtgcctttgattcagattgaaacagatcagagagaagcctgtgctggggaacctgaacccttcctttccaaaagcagcctcctagaggaagcagaagggcattcgaatgacaaaaacatcccagatgtggtgagaggtggagacacagccgtgagcgcttgtcaaatccatagtgacagccttgataccagagatgtaccagaggctgaagcctccacagaagccagagcccccgatgaggcccccaaccctccaagcagcagcgaggagagcacaggcagctggacccagcttgccaatgaggaagacaacccagatgacacaagtagctttctccagctcagtgagcgatccatgagtgaattagtagaagaaaagaagattcttaaaggacagtcagaaagcacagaggcacctgcatctggaccgcctacgggaacagccagcccccagaggagcctgctggtgatcaactttgacctggagccagagtgtccagatgccgagctccgagccactctgcagtggatagctgcctctgaactggggattcccaccatctactttaagaaatctcaggaaaacagaattgaaaagtttctagatgtcgtgcagctggttcatcggaagtcctggaaagtgggtgatatcttccatgcagttgtccagtactgcaaaatgcatgaggagcagaaggatgggagactgagtctctttgactggctcttggaactgggataataaggcagtctgccgtatagatcattccttccctttattccaacttagattacagtggtttgttctaaatgctctaaacattctcaaaacatcacatcacattagcagaactataaaaaaaaatctgctactcagatccactgcatacagaataagtcagaggaaaagcaaaatataggtctgtccaaattcatacaacttgtgggtgagttccaaagagcttggattagaagggctggacaaagagagaattcaatggggcccaaattagaatgcttataatgagacccaatctccaggaaaacaacactcacataagtttaatcatataaaatgatttgtaatgtctctaattagatgaatcaactagaaacaaactcagtggtcaaaataatttttaagagtattccgtaacctatattttacttttctgattatattaaggggctgccagcccggagaaatacttaagatatgggtgagaaatccccagacttttatacaaaagatttccactttcaaatcaatgtcagtagacattgataaaagtatagcagcatcctctactgaggtgatttcatttattccctgcagcccactgataaatatctcacttctcccaaatagtatgtggactcccagctaagcagaaaactattgtcattcaactgaagaagaggaagataaaagattgtcttgtttccatcactgtattacttgtgtaacatgattacataattcttatcctaagagaaagctttcatatttaaaaaaaagtcttttcagataaaatctgcttgtgtcttgaataatatgaaatacaaactttcactttattttattgtaaattataaagagattattgtcttaaataatatattgagttagcttcaagcttcctaaaatatgaagagattgttgtctaaagtcacatattgacattgagctcagtggcctgtttcatcacgtatgtgctgctacctgtacagcagacatgccgctccagtgacatttataatgacagaagcagggtaatggtcttgtgtttgacatgatcagttaggatcatagactttccctgactcgtagatattagccttgaattgggggaaaagaagactttgacacattttagttattttaataacagagatttactcttttgaaaaataaaggtatctaatgtctccctaataagtcttctttccttccaactaaatgacctacacggacttttattttcttgatcaaagaggtgtttattaaggacttctggataactatacttttactctatttttaaagatcacaaagtaattttaaatgtgaacaggttcccataccatgaatgctggcctcaccttctctatcatccacattttgaaatgcaaagaaagctcccttgtaagccatacttccttccccactcccatcctaggatacttgcccagtgctcattaggcatttcttattcagatagtccaaatttaggttattatgcttaatttgacacattaactaaatgcccagttttaaaatatatccatcaattcacgctgaaatgtgcttctttgtgctatcaaatggaatagaatacacttattttttaaacaatcccagaatactgtgtgtagacttttgttgtgctcaaataaatgtttacttatcttacaaagctcaaatactggattgtaaccatgtgatgaagttatctatgttgtacctaacattgcaaattaatcaataaatctctgttgtca

SEQ ID NO: 185929 - DNA, 6917 bp, Homo sapiens
  Payload ID: 16611
  Gene Symbol: SPHKAP
  Gene Name: SPHK1 interactor, AKAP domain containing
  Uniprot ID: Q2M3C7
  ENST ID: ENST00000392056
  CDS Start-End: 48-5150
tccttcgcctgcactttccgtctttcttctctgggcgcccaccaacaatggatggcaactccctgctctcggtaccaagcaacttggagtcatcacggatgtatgacgttttggaaccgcagcagggcagaggctgtggcagctcaggaagcggcccggggaactccatcacagcctgtaagaaggttcttcgcagcaatagcctgctggagtcaacagactactggttgcagaatcagaggatgccctgccaaattggttttgtagaagacaagtctgaaaactgtgcttctgtctgctttgtgaatcttgatgtgaacaaggatgaatgcagcacagagcacctgcaacagaaactggtcaacgtttcaccagatcttccaaaacttatcagttccatgaatgtccaacaaccaaaagaaaatgaaattgttgtcctaagtgggttagcctctggaaatctccaggcagattttgaagtttcacagtgcccttggctgccagatatctgcttggtccaatgtgcaagagggaacagaccaaacagtaccaactgcatcatctttgaaatcaacaaatttctgattggtctggaactggtgcaggagcgacagctccacctggaaacaaacatcttgaaactggaggatgacacgaactgttccttatcttcaatcgaggaagactttctcaccgcttctgagcacttggaggaggaaagcgaggtggatgaatctaggaacgattatgaaaatataaatgtctcagccaatgttttggaaagtaaacagctaaagggagccacccaggtggaatggaattgcaacaaggaaaagtggctttatgctttggaagacaaatacatcaacaaatatcccacaccattgattaaaacagaacgatctccagaaaacctaacaaagaacacagccttgcagagtctagatccctcagccaagccatcacagtggaaaagagaagctgtggggaatgggagacaagccacacattattatcattcagaagcttttaaaggtcaaatggaaaaatcacaggcactgtatattccaaaagatgcttatttctccatgatggataaagatgtaccttctgcatgtgctgtggcagagcagagaagcaacctaaacccaggagaccatgaagacacaagaaacgctctccctcctagacaagatggagaagtcaccactggcaagtatgctacaaatttagcagaatccgtgctgcaggatgcatttattagattatctcaatctcagtccacattaccccaggaatctgcagtcagtgtttctgtaggaagttctctgcttcccagttgctattccacaaaagatacagtggtttctcggtcatggaatgagctccccaaaatcgtcgttgttcagagtccagatggcagtgatgctgccccacagccaggcatctcctcctggcctgagatggaagtctctgttgaaacctcaagcatcctctctggagagaactccagcagacaaccccagagtgctctagaagtggcgttagcttgtgcagccactgtgattggaactatttccagtccacaggccacagaaagactcaaaatggagcaagtggtctcgaactttcccccagggagcagtggtgcactgcaaactcaagcaccccaaggactcaaggaaccttccatcaatgagtactcctttccatctgctttgtgtggcatgactcaggtggccagtgccgtggctgtctgtggtctgggtgaaagagaagaggtgacatgctcagtggctccaagtggtagcctcccgcctgcagctgaggcttctgaagccatgcccccactttgtggtttagcaagcatggagcttggcaaggaagccattgccaagggattgctcaaggaggctgctctggttttaacaaggcctaatacctacagcagcattggagactttctggactccatgaacaggagaatcatggaaactgcttcaaagtctcagaccctgtgctcagaaaatgtcgtcaggaatgaactggcacataccctgtccaatgttatcctgaggcattccattgatgaagttcaccacaaaaatatgataatcgaccccaatgacaacaggcattcatctgaaattctggacaccttaatggaaagtacaaatcaactgcttttagatgtgatatgcttcacgttcaagaagatgagtcatattgtacggcttggtgaatgtcctgctgtcctttctaaggagaccatcagaaggagggagacagaaccaagctgccagccatctgatccgggtgctagtcaagcttggacaaaagccactgaatcctccagcagctctccacttagcaattcacacaacacgagtcttgtcatcaacaatcttgtggatggcatgtattcaaaacaagacaagggtggagtgaggccaggcctcttcaagaaccccacgctgcagtcacaattatcacgtagtcacagagtgcccgattcttcaactgctacaacatcctccaaggaaatatatctgaaaggaatagcaggagaggatacaaaaagccctcatcacagtgagaatgaatgcagagcctcttccgaaggacaaaggtccccaacggtcagccagtccagaagtggttcccaggaggctgaggagagtatccacccaaacacccaagaaaagtacaactgtgccacatctcgcatcaacgaagttcaagtcaacctgtccttgttaggggatgacctgctgcttcctgctcaatccacgcttcaaacaaagcatccagacatctactgcattacagactttgcggaagaattagcagacacggtcgtctccatggcaactgaaattgcagcgatttgccttgacaactccagtggaaaacaaccctggttttgtgcatggaaaagagggagtgagtttctgatgacacccaacgtaccctgccgatccttgaagaggaagaaagagagccaggggagcgggaccgctgtgaggaaacacaagcctccccggctcagtgagatcaagaggaagacggacgagcaccctgagcttaaagaaaagctgatgaacagggttgtggatgagtccatgaaccttgaagatgtcccagattctgtcaatctttttgccaatgaagtggcagccaagatcatgaacctaacggagttctctatggtggacggcatgtggcaggcgcagggctatccccggaatcggttactgagtggcgacaggtggagccggctgaaggcctccagctgcgaaagcattcctgaggaagactccgaggccagggcctatgtcaacagcctgggcttaatgagcacgctgagccagccggtcagcagggccagctctgtctccaagcagtcgagctgtgagagcatcaccgatgagttttccaggttcatggtgaaccagatggaaaatgaagggagaggatttgagttactgctggattactatgctggcaagaacgccagcagcattctgaactcagccatgcaacaggcgtgccggaaaagtgaccacctcagtgtgaggcctagctgtccctctaagcagtccagcacagagagcatcactgaggagttctacaggtacatgctgagggacatcgaaagagacagcagagaaagtgcctcctccagacggagcagccaggattggacagccggcctgctgtctccttctctgcgatccccagtgtgccacagacagtcgtccatgccagacagcagatccccatgctccaggctgacagtgaatgtgcccatcaaagccaactctttagatggctttgctcagaactgcccacaagatttcctaagcgtgcagccggtcagtagcgcgtcctcatccggtctctgcaaatctgactcttgcttgtatcggagaggtgggactgaccacatcaccaacatgttaattcatgaaacgtgggctagctccattgaggctctcatgcgcaagaacaaaatcattgtggatgatgcagaggaagctgacactgagcctgtttctggtggctctccctcgcaagcagagaagtgtgcaaatagattagctgcgagcaggatgtgcagtgggccaactctgcttgttcaggagtctctcgattgcccgaggaaagactctgttaccgaatgtaaacagcccccagtgtcatctttgagcaaaactgcttctcttacaaaccacagccctttagattctaaaaaagaaacttcctcgtgccaggaccctgtaccaataaaccacaaaaggcgatcactttgctcgagggaagtgcctttgattcagattgaaacagatcagagagaagcctgtgctggggaacctgaacccttcctttccaaaagcagcctcctagaggaagcagaagggcattcgaatgacaaaaacatcccagatgtggtgagaggtggagacacagccgtgagcgcttgtcaaatccatagtgacagccttgataccagagatgtaccagaggctgaagcctccacagaagccagagcccccgatgaggcccccaaccctccaagcagcagcgaggagagcacaggcagctggacccagcttgccaatgaggaagacaacccagatgacacaagtagctttctccagctcagtgagcgatccatgagcaatggcaacagtagtgccactagcagtcttggcattatggatctggacatttatcaggaaagcatgccatcttctcccatgattaatgaattagtagaagaaaagaagattcttaaaggacagtcagaaagcacagaggcacctgcatctggaccgcctacgggaacagccagcccccagaggagcctgctggtgatcaactttgacctggagccagagtgtccagatgccgagctccgagccactctgcagtggatagctgcctctgaactggggattcccaccatctactttaagaaatctcaggaaaacagaattgaaaagtttctagatgtcgtgcagctggttcatcggaagtcctggaaagtgggtgatatcttccatgcagttgtccagtactgcaaaatgcatgaggagcagaaggatgggagactgagtctctttgactggctcttggaactgggataataaggcagtctgccgtatagatcattccttccctttattccaacttagattacagtggtttgttctaaatgctctaaacattctcaaaacatcacatcacattagcagaactataaaaaaaaatctgctactcagatccactgcatacagaataagtcagaggaaaagcaaaatataggtctgtccaaattcatacaacttgtgggtgagttccaaagagcttggattagaagggctggacaaagagagaattcaatggggcccaaattagaatgcttataatgagacccaatctccaggaaaacaacactcacataagtttaatcatataaaatgatttgtaatgtctctaattagatgaatcaactagaaacaaactcagtggtcaaaataatttttaagagtattccgtaacctatattttacttttctgattatattaaggggctgccagcccggagaaatacttaagatatgggtgagaaatccccagacttttatacaaaagatttccactttcaaatcaatgtcagtagacattgataaaagtatagcagcatcctctactgaggtgatttcatttattccctgcagcccactgataaatatctcacttctcccaaatagtatgtggactcccagctaagcagaaaactattgtcattcaactgaagaagaggaagataaaagattgtcttgtttccatcactgtattacttgtgtaacatgattacataattcttatcctaagagaaagctttcatatttaaaaaaaagtcttttcagataaaatctgcttgtgtcttgaataatatgaaatacaaactttcactttattttattgtaaattataaagagattattgtcttaaataatatattgagttagcttcaagcttcctaaaatatgaagagattgttgtctaaagtcacatattgacattgagctcagtggcctgtttcatcacgtatgtgctgctacctgtacagcagacatgccgctccagtgacatttataatgacagaagcagggtaatggtcttgtgtttgacatgatcagttaggatcatagactttccctgactcgtagatattagccttgaattgggggaaaagaagactttgacacattttagttattttaataacagagatttactcttttgaaaaataaaggtatctaatgtctccctaataagtcttctttccttccaactaaatgacctacacggacttttattttcttgatcaaagaggtgtttattaaggacttctggataactatacttttactctatttttaaagatcacaaagtaattttaaatgtgaacaggttcccataccatgaatgctggcctcaccttctctatcatccacattttgaaatgcaaagaaagctcccttgtaagccatacttccttccccactcccatcctaggatacttgcccagtgctcattaggcatttcttattcagatagtccaaatttaggttattatgcttaatttgacacattaactaaatgcccagttttaaaatatatccatcaattcacgctgaaatgtgcttctttgtgctatcaaatggaatagaatacacttattttttaaacaatcccagaatactgtgtgtagacttttgttgtgctcaaataaatgtttacttatcttacaaagctcaaatactggattgtaaccatgtgatgaagttatctatgttgtacctaacattgcaaattaatcaataaatctctgttgtcagattgtt

SEQ ID NO: 185930 - DNA, 1168 bp, Homo sapiens
  Payload ID: 16612
  Gene Symbol: SPI1
  Gene Name: Spi-1 proto-oncogene
  Uniprot ID: P17947
  ENST ID: ENST00000227163
  CDS Start-End: 39-854
ccgaggcaggggatctgaccgactcggagcccggctggatgttacaggcgtgcaaaatggaagggtttcccctcgtcccccctcagccatcagaagacctggtgccctatgacacggatctataccaacgccaaacgcacgagtattacccctatctcagcagtgatggggagagccatagcgaccattactgggacttccacccccaccacgtgcacagcgagttcgagagcttcgccgagaacaacttcacggagctccagagcgtgcagcccccgcagctgcagcagctctaccgccacatggagctggagcagatgcacgtcctcgatacccccatggtgccaccccatcccagtcttggccaccaggtctcctacctgccccggatgtgcctccagtacccatccctgtccccagcccagcccagctcagatgaggaggagggcgagcggcagagccccccactggaggtgtctgacggcgaggcggatggcctggagcccgggcctgggctcctgcctggggagacaggcagcaagaagaagatccgcctgtaccagttcctgttggacctgctccgcagcggcgacatgaaggacagcatctggtgggtggacaaggacaagggcaccttccagttctcgtccaagcacaaggaggcgctggcgcaccgctggggcatccagaagggcaaccgcaagaagatgacctaccagaagatggcgcgcgcgctgcgcaactacggcaagacgggcgaggtcaagaaggtgaagaagaagctcacctaccagttcagcggcgaagtgctgggccgcgggggcctggccgagcggcgccacccgccccactgagcccgcagcccccgccgggccccgccaggcctccccgctggccatagcattaagccctcgcccggcccggacacagggaggacgctcccggggcccagaggcaggactgtggcgggccgggcctcgcctcacccgccccctccccccactccaggccccctccacatcccgcttcgcctccctccaggactccaccccggctcccggacgccagctgggcgtcagaccccaccggggcaaccttgcagaggacgacccggggtactgccttgggagtctcaagtccgtatgtaaatcagatctcccctctcacc

SEQ ID NO: 185931 - DNA, 1403 bp, Homo sapiens
  Payload ID: 16612
  Gene Symbol: SPI1
  Gene Name: Spi-1 proto-oncogene
  Uniprot ID: P17947
  ENST ID: ENST00000378538
  CDS Start-End: 224-1036
gactatctcccagcggcaggcccttcgataaaatcaggaacttgtgctggccctgcaatgtcaagggagggggctcacccagggctcctgtagctcagggggcaggcctgagccctgcacccgccccacgaccgtccagcccctgacggggcaccccatcctgaggggctctgcattggcccccaccgaggcaggggatctgaccgactcggagcccggctggatgttacaggcgtgcaaaatggaagggtttcccctcgtcccccctccatcagaagacctggtgccctatgacacggatctataccaacgccaaacgcacgagtattacccctatctcagcagtgatggggagagccatagcgaccattactgggacttccacccccaccacgtgcacagcgagttcgagagcttcgccgagaacaacttcacggagctccagagcgtgcagcccccgcagctgcagcagctctaccgccacatggagctggagcagatgcacgtcctcgatacccccatggtgccaccccatcccagtcttggccaccaggtctcctacctgccccggatgtgcctccagtacccatccctgtccccagcccagcccagctcagatgaggaggagggcgagcggcagagccccccactggaggtgtctgacggcgaggcggatggcctggagcccgggcctgggctcctgcctggggagacaggcagcaagaagaagatccgcctgtaccagttcctgttggacctgctccgcagcggcgacatgaaggacagcatctggtgggtggacaaggacaagggcaccttccagttctcgtccaagcacaaggaggcgctggcgcaccgctggggcatccagaagggcaaccgcaagaagatgacctaccagaagatggcgcgcgcgctgcgcaactacggcaagacgggcgaggtcaagaaggtgaagaagaagctcacctaccagttcagcggcgaagtgctgggccgcgggggcctggccgagcggcgccacccgccccactgagcccgcagcccccgccgggccccgccaggcctccccgctggccatagcattaagccctcgcccggcccggacacagggaggacgctcccggggcccagaggcaggactgtggcgggccgggcctcgcctcacccgccccctccccccactccaggccccctccacatcccgcttcgcctccctccaggactccaccccggctcccggacgccagctgggcgtcagaccccaccggggcaaccttgcagaggacgacccggggtactgccttgggagtctcaagtccgtatgtaaatcagatctcccctctcacccctcccacccattaacctcctcccaaaaaacaagtaaagttattctcaatcca

SEQ ID NO: 185932 - DNA, 1290 bp, Homo sapiens
  Payload ID: 16612
  Gene Symbol: SPI1
  Gene Name: Spi-1 proto-oncogene
  ENST ID: ENST00000533968
  CDS Start-End: 135-872
gtagctcagggggcaggcctgagccctgcacccgccccacgaccgtccagcccctgacggggcaccccatcctgaggggctctgcattggcccccaccgaggcaggggatctgaccgactcggagcccggctggatgttacaggcgtgcaaaatggaagggtttcccctcgtcccccctccatcagaagacctggtgccctatgacacggatctataccaacgccaaacgcacgagtattacccctatctcagcagtgatggggagagccatagcgaccattactgggacttccacccccaccacgtgcacagcgagttcgagagcttcgccgagaacaacttcacggagctccagagcgtgcagcccccgcagctgcagcagctctaccgccacatggagctggagcagatgcacgtcctcgatacccccatggtgccaccccatcccagtcttggccaccaggtctcctacctgccccggatgtgcctccagtacccatccctgtccccagcccagcccagctcagatgaggaggagggcgagcggcagagccccccactggaggtgtctgacggcgaggcggatggcctggagcccgggcctgggctcctgcctggggagacaggtggggcacctggccctccaccctggccccgaccctggccgtgtctgtgccctgcccccacccagccaggccaactgacccagcagccacgccaccgagtcgcgtgtgtgtgtgtgtgcatgtttgccagtgtgtgtgttttgtggggctgtctgtggctgtctctgtgtgtgtgtatctgctgtgtagtgcatacgggcatctccatgaagtgtgccaggtgtgtgtgtctctctgtgccatgagtgtgtgtacatctgggtgtgtgtgagcaagtgtgcagagggtgcgtgtgcacaggtacgggcaggtgcatgtgtgcgagtggctgtgtgagtgggtgtgtgagaaggtgaatgtgagagctggtgtggctgagagtgggtgtggccatgtttgtgtgtctgtcaacacatgaatgtatttcagtgcgtgtgagcagctgtgcacgtatgatgtcagtgggtgtcagcagtgtgtgggtgtgcctgtgtgagcagggatgtgagcatggtatatgtgagtggctgtaagcaggcatgtgtgagtgatatgtgtgagtgggggtgtgacagcaggtgtgtgagcaagtgtatatgtgtgaatgtgtatgtaagcagggatgtgtgtgatataagtgtgtgtgaatgggcataggtgtgt

SEQ ID NO: 185933 - DNA, 661 bp, Homo sapiens
  Payload ID: 16612
  Gene Symbol: SPI1
  Gene Name: Spi-1 proto-oncogene
  ENST ID: ENST00000533030
  CDS Start-End: 171-278
tgcaatgtcaagggagggggctcacccagggctcctgtagctcagggggcaggcctgagccctgcacccgccccacgaccgtccagcccctgacggggcaccccatcctgaggggctctgcattggcccccaccgaggcaggggatctgaccgactcggagcccggctggatgttacaggcgtgcaaaatggaagggtttcccctcgtcccccctgcagcaagaagaagatccgcctgtaccagttcctgttggacctgctccgcagcggcgacatgaaggacagcatctggtgggtggacaaggacaagggcaccttccagttctcgtccaagcacaaggaggcgctggcgcaccgctggggcatccagaagggcaaccgcaagaagatgacctaccagaagatggcgcgcgcgctgcgcaactacggcaagacgggcgaggtcaagaaggtgaagaagaagctcacctaccagttcagcggcgaagtgctgggccgcgggggcctggccgagcggcgccacccgccccactgagcccgcagcccccgccgggccccgccaggcctccccgctggccatagcattaagccctcgcccggcccggacacagggaggacgctcccggggcccagaggcaggactgtggcgggccgggcctcg

SEQ ID NO: 185934 - DNA, 1443 bp, Homo sapiens
  Payload ID: 16613
  Gene Symbol: SPIB
  Gene Name: Spi-B transcription factor (Spi-1/PU.1 related)
  Uniprot ID: Q01892
  ENST ID: ENST00000270632
  CDS Start-End: 6-539
ccaccatgctcgccctggaggctgcacagctcgacgggccacacttcagctgtctgtacccagatggcgtcttctatgacctggacagctgcaagcattccagctaccctgattcagagggggctcctgactccctgtgggactggactgtggccccacctgtcccagccaccccctatgaagccttcgacccggcagcagccgcttttagccacccccaggctgcccagctctgctacgaaccccccacctacagccctgcagggaacctcgaactggcccccagcctggaggccccggggcctggcctccctgcataccccacggagaacttcgctagccagaccctggttcccccggcatatgccccgtaccccagccctgtgctatcagaggaggaagacttaccgttggacagccctgccctggaggtctcggacagcgagtcggatgaggccctcgtggctggccccgaggggaagggatccgagggactcgcaagaagctgcgcctgtaccagttcctgctggggctactgacgcgcggggacatgcgtgagtgcgtgtggtgggtggagccaggcgccggcgtcttccagttctcctccaagcacaaggaactcctggcgcgccgctggggccagcagaaggggaaccgcaagcgcatgacctaccagaagctggcgcgcgccctccgaaactacgccaagaccggcgagatccgcaaggtcaagcgcaagctcacctaccagttcgacagcgcgctgctgcctgcagtccgccgggcctgagcacacccgaggctcccacctgcggagccgctgggggacctcacgtcccagccaggatccccctggaagaaaaagggcgtccccacactctaggtgataggacttacgcatccccaccttttggggtaaggggagtgctgccctgccataatccccaagcccagcccgggcctgtctgggattccccacttgtgcctggggtcctctgggatttctttgtcatgtacagactccctgggatcctcatgttttgggtgacaggacctatggaccactatactcggggaggcagggtagcagttcttccagaatcccaagagcttctctgggattttcttgtgatatctgattccccagtgaggcctgggacgtttttaagatcgctgtgtgtctgtaaaccctgaatctcatctggggtgggggccctgctggcaaccctgagccctgtccaaggttccctcttgtcagatctgagatttcctagttatgtctggggccctctgggagctgttatcatctcagatctcttcgcccatctatggctgtgttgtcacatctgtcccctcatttttgagatcccccaattctctggaactattctgctgcccctttttatgtgtctggagttccccaatcacatctagggctcctcc

SEQ ID NO: 185935 - DNA, 3311 bp, Homo sapiens
  Payload ID: 16613
  Gene Symbol: SPIB
  Gene Name: Spi-B transcription factor (Spi-1/PU.1 related)
  Uniprot ID: Q01892
  ENST ID: ENST00000439922
  CDS Start-End: 84-599
ggcaaacagcccgcccggcaccaccatgctcgccctggaggctgcacagctcgacgggccacacttcagctgtctgtacccagatggcgtcttctatgacctggacagctgcaagcattccagctaccctgattcagagggggctcctgaccctggttcccccggcatatgccccgtaccccagccctgtgctatcagaggaggaagacttaccgttggacagccctgccctggaggtctcggacagcgagtcggatgaggccctcgtggctggccccgaggggaagggatccgaggcagggactcgcaagaagctgcgcctgtaccagttcctgctggggctactgacgcgcggggacatgcgtgagtgcgtgtggtgggtggagccaggcgccggcgtcttccagttctcctccaagcacaaggaactcctggcgcgccgctggggccagcagaaggggaaccgcaagcgcatgacctaccagaagctggcgcgcgccctccgaaactacgccaagaccggcgagatccgcaaggtcaagcgcaagctcacctaccagttcgacagcgcgctgctgcctgcagtccgccgggcctgagcacacccgaggctcccacctgcggagccgctgggggacctcacgtcccagccaggatccccctggaagaaaaagggcgtccccacactctaggtgataggacttacgcatccccaccttttggggtaaggggagtgctgccctgccataatccccaagcccagcccgggcctgtctgggattccccacttgtgcctggggtcctctgggatttctttgtcatgtacagactccctgggatcctcatgttttgggtgacaggacctatggaccactatactcggggaggcagggtagcagttcttccagaatcccaagagcttctctgggattttcttgtgatatctgattccccagtgaggcctgggacgtttttaagatcgctgtgtgtctgtaaaccctgaatctcatctggggtgggggccctgctggcaaccctgagccctgtccaaggttccctcttgtcagatctgagatttcctagttatgtctggggccctctgggagctgttatcatctcagatctcttcgcccatctatggctgtgttgtcacatctgtcccctcatttttgagatcccccaattctctggaactattctgctgcccctttttatgtgtctggagttccccaatcacatctagggctcctccaagatccttttgtcatgtctgaaatcactcttgagaggtctggggtggaggatggggagtcagtgaaatgtgtcatgtctgggccctgtcagggacacccttgttatatctgggatcctccaatcacatctgagacctcctaggctctccatctgatatgccctttcagggaccccacaaagactgagttctcatggggatcctacccttcctagtgccactccctatggccatgctgaagaccactctggccacgcgactgattttgggtgatcatggcagctccccacccatgtcatttctaaccagaagtctcaaggtcgtcacccccctgccccccaaccgaggccccggtcgctggtggtggtctctttagtgcactgtagcacttggtggtggaggtgtgagggatccacattaacagcaggccatcagctgggcaatggctcacacctgtaatcccagcactttgggaggcgaggcagggggaatggcttgaacccaggcattcaagaccagcctgggcaacataatgagacctcgtctctacaaaacataacaaaaacaattagccgagcgtgggggtgaacacctgtggtcccagctgctcaggaggctgaggtgggaggatctcttgagcccaggaagtaggaggctgtagtgagctgtaatcgtgccactgcactccagcctgggcgacagagtgagacaccgtcttaaaaacaaaaacaaggccgggcacggtggctcatgcctgttgtcccagcactttgggaggccgaggcaggcggatcacgaggtcgagagatcgagaccatcctggccaacatggtgaaaccctgtctctactaaaaatacagaaattagctgggcgtggtggcacgtgcctgtagtcccagctactcgggaggctgaggcaagagaatcgcttgaacgtgggaggcagaggttgcagtgagcctagattgtgccactgcactccagcctgggggacagagcgagactccgtctgaaaataaaaacaacaaaaacagcagaccattcaaaatagggagactttgcataatccagatttctgccttcacttaaaactttggacggtctggagagagtcggccagttttcggtggggggtggggagctggaacaggacagtagcctttcctaatgaggcatttgttctccaatctgccccagtcgctgccatccctggctatctcaccctagcagcttctcaagcctgttggctttagaccactgtataaacccagctggaactgaagcctgggtggactatggagccctggttgggacccccagggagtcaaaggctgcgggccaagaggccagaggtccttgagcctgggtgggcaggtggatctagggtgcatgacttgctgcttcccaaccttagtttgtcccttctgtgaaaaagggagagaaggaggaggaagatctcaaaaagactttccagcccagtgcggtggctcacgcctgtaatcccagcactttgggaggccgatgcaggtggatcacctgaggtaggagttcaagaccagcctgaccaacatagtgaagccccttctctactaaaaatacaaaattagctgggcgtggtggcatgtgcctgtactcccagctacttgggaggctgaggcaggagaatcgcttgaacctgggaggcggaggttgtagtgagctgagatcacaccactgcacaccagcctgggcgacaagagcgaaactccgtctcaaaaaaaaaaaactgttgcagccccgttgagcctttgacaccgcctgaaatccaccccactcccaggaggaggaggaggaaggaatgccaatgacctagagacacgagaagtccatgtggaggcacacagcagctgatggcagagcccaggctgggacctgcccttaagagaatgagtgggaagggggagggaggaagggcaggtaaaacgtcctccccagggccccctgcaacggggaaggtactttttacaaaagctatcattgtcaccctaaatgtggaataaaataagatgcatcgacgtag

SEQ ID NO: 185936 - DNA, 564 bp, Homo sapiens
  Payload ID: 16613
  Gene Symbol: SPIB
  Gene Name: Spi-B transcription factor (Spi-1/PU.1 related)
  ENST ID: ENST00000597855
  CDS Start-End: 23-436
aaacagcccgcccggcaccaccatgctcgccctggaggctgcacagctcgacgggccacacttcagctgtctgtacccagatggcgtcttctatgacctggacagctgcaagcattccagctaccctgattcagagggggctcctgactccctgtgggactggactgtggccccacctgtcccagccaccccctatgaagccttcgacccggcagcagccgcttttagccacccccaggctgcccagctctgctacgaaccccccacctacagccctgcagggaacctcgaactggcccccagcctggaggccccggggcctggcctccctgcataccccacggagaacttcgctagccagccctgtgctatcagaggaggaagacttaccgttggacagccctgccctggaggtctcggacagcgagtcggatgaggccctcgtggctggccccgaggggaagggatccgaggcagggactcgcaagaagctgcgcctgtaccagttcctgctggggctactgacgcgcggggacatgcgtgagtgcgtgtggtgggtggagc

SEQ ID NO: 185937 - DNA, 847 bp, Homo sapiens
  Payload ID: 16613
  Gene Symbol: SPIB
  Gene Name: Spi-B transcription factor (Spi-1/PU.1 related)
  ENST ID: ENST00000596074
  CDS Start-End: 23-256
aaacagcccgcccggcaccaccatgctcgccctggaggctgcacagctcgacgggccacacttcagctgtctgtacccagatggcgtcttctatgacctggacagctgcaagcattccagctaccctgattcagagggggctcctgaccctggttcccccggcatatgccccgtaccccagccctgtgctatcagaggaggaagacttaccgttggacagccctgccctggaggtctcggacagcgagtcggatgaggccctcgtggctggccccgaggggaagggatccgaggcagggactcgcaagaagctgcgcctgtaccagttcctgctggggctactgacgcgcggggacatgcgtgagtgcgtgtggtgggtggagccaggcgccggcgtcttccagttctcctccaagcacaaggaactcctggcgcgccgctggggccagcagaaggggaaccgcaagcgcatgacctaccagaagctggcgcgcgccctccgaaactacgccaagaccggcgagatccgcaaggtcaagcgcaagctcacctaccagttcgacagcgcgctgctgcctgcagtccgccgggcctgagcacacccgaggctcccacctgcggagccgctgggggacctcacgtcccagccaggatccccctggaagaaaaagggcgtccccacactctaggtgataggacttacgcatccccaccttttggggtaaggggagtgctgccctgccataatccccaagcccagcccgggcctgtctgggattccccacttgtgcctggggtcctctgggatttctttgtcatgtacagactccctgggatcctcatgttt

SEQ ID NO: 185938 - DNA, 3791 bp, Homo sapiens
  Payload ID: 16613
  Gene Symbol: SPIB
  Gene Name: Spi-B transcription factor (Spi-1/PU.1 related)
  Uniprot ID: Q01892
  ENST ID: ENST00000595883
  CDS Start-End: 26-814
ggcaaacagcccgcccggcaccaccatgctcgccctggaggctgcacagctcgacgggccacacttcagctgtctgtacccagatggcgtcttctatgacctggacagctgcaagcattccagctaccctgattcagagggggctcctgactccctgtgggactggactgtggccccacctgtcccagccaccccctatgaagccttcgacccggcagcagccgcttttagccacccccaggctgcccagctctgctacgaaccccccacctacagccctgcagggaacctcgaactggcccccagcctggaggccccggggcctggcctccctgcataccccacggagaacttcgctagccagaccctggttcccccggcatatgccccgtaccccagccctgtgctatcagaggaggaagacttaccgttggacagccctgccctggaggtctcggacagcgagtcggatgaggccctcgtggctggccccgaggggaagggatccgaggcagggactcgcaagaagctgcgcctgtaccagttcctgctggggctactgacgcgcggggacatgcgtgagtgcgtgtggtgggtggagccaggcgccggcgtcttccagttctcctccaagcacaaggaactcctggcgcgccgctggggccagcagaaggggaaccgcaagcgcatgacctaccagaagctggcgcgcgccctccgaaactacgccaagaccggcgagatccgcaaggtcaagcgcaagctcacctaccagttcgacagcgcgctgctgcctgcagtccgccgggcctgagcacacccgaggctcccacctgcggagccgctgggggacctcacgtcccagccaggatccccctggaagaaaaagggcgtccccacactctaggtgataggacttacgcatccccaccttttggggtaaggggagtgctgccctgccataatccccaagcccagcccgggcctgtctgggattccccacttgtgcctggggtcctctgggatttctttgtcatgtacagactccctgggatcctcatgttttgggtgacaggacctatggaccactatactcggggaggcagggtagcagttcttccagaatcccaagagcttctctgggattttcttgtgatatctgattccccagtgaggcctgggacgtttttaagatcgctgtgtgtctgtaaaccctgaatctcatctggggtgggggccctgctggcaaccctgagccctgtccaaggttccctcttgtcagatctgagatttcctagttatgtctggggccctctgggagctgttatcatctcagatctcttcgcccatctatggctgtgttgtcacatctgtcccctcatttttgagatcccccaattctctggaactattctgctgcccctttttatgtgtctggagttccccaatcacatctagggctcctccaagatccttttgtcatgtctgaaatcactcttgagaggtctggggtggaggatggggagtcagtgaaatgtgtcatgtctgggccctgtcagggacacccttgttatatctgggatcctccaatcacatctgagacctcctaggctctccatctgatatgccctttcagggaccccacaaagactgagttctcatggggatcctacccttcctagtgccactccctatggccatgctgaagaccactctggccacgcgactgattttgggtgatcatggcagctccccacccatgtcatttctaaccagaagtctcaaggtcgtcacccccctgccccccaaccgaggccccggtcgctggtggtggtctctttagtgcactgtagcacttggtggtggaggtgtgagggatccacattaacagcaggccatcagctgggcaatggctcacacctgtaatcccagcactttgggaggcgaggcagggggaatggcttgaacccaggcattcaagaccagcctgggcaacataatgagacctcgtctctacaaaacataacaaaaacaattagccgagcgtgggggtgaacacctgtggtcccagctgctcaggaggctgaggtgggaggatctcttgagcccaggaagtaggaggctgtagtgagctgtaatcgtgccactgcactccagcctgggcgacagagtgagacaccgtcttaaaaacaaaaacaaggccgggcacggtggctcatgcctgttgtcccagcactttgggaggccgaggcaggcggatcacgaggtcgagagatcgagaccatcctggccaacatggtgaaaccctgtctctactaaaaatacagaaattagctgggcgtggtggcacgtgcctgtagtcccagctactcgggaggctgaggcaagagaatcgcttgaacgtgggaggcagaggttgcagtgagcctagattgtgccactgcactccagcctgggggacagagcgagactccgtctgaaaataaaaacaacaaaaacagcagaccattcaaaatagggagactttgcataatccagatttctgccttcacttaaaactttggacggtctggagagagtcggccagttttcggtggggggtggggagctggaacaggacagtagcctttcctaatgaggcatttgttctccaatctgccccagtcgctgccatccctggctatctcaccctagcagcttctcaagcctgttggctttagaccactgtataaacccagctggaactgaagcctgggtggactatggagccctggttgggacccccagggagtcaaaggctgcgggccaagaggccagaggtccttgagcctgggtgggcaggtggatctagggtgcatgacttgctgcttcccaaccttagtttgtcccttctgtgaaaaagggagagaaggaggaggaagatctcaaaaagactttccagcccagtgcggtggctcacgcctgtaatcccagcactttgggaggccgatgcaggtggatcacctgaggtaggagttcaagaccagcctgaccaacatagtgaagccccttctctactaaaaatacaaaattagctgggcgtggtggcatgtgcctgtactcccagctacttgggaggctgaggcaggagaatcgcttgaacctgggaggcggaggttgtagtgagctgagatcacaccactgcacaccagcctgggcgacaagagcgaaactccgtctcaaaaaaaaaaaactgttgcagccccgttgagcctttgacaccgcctgaaatccaccccactcccaggaggaggaggaggaaggaatgccaatgacctagagacacgagaagtccatgtggaggcacacagcagctgatggcagagcccaggctgggacctgcccttaagagaatgagtgggaagggggagggaggaagggcaggtaaaacgtcctccccagggccccctgcaacggggaaggtactttttacaaaagctatcattgtcaccctaaatgtggaataaaataagatgcatcgacgtagacaaacctcctgggaccttttgtcagggactgcaatcctgcccctccactgaggccgctggctctcagagacaccgtgacatcacgggtgatgatgagaggagttcaaagagagaattatatgctggcgcggtggctctgtaatcccaacactttggggggccaaggcaggaggatcgcttgagtacaggagtttgaaaccagcctgggcaagatagtgagatccccttcccacccgtctacaaaaaaaataaaaaattagcggg

SEQ ID NO: 185939 - DNA, 391 bp, Homo sapiens
  Payload ID: 16613
  Gene Symbol: SPIB
  Gene Name: Spi-B transcription factor (Spi-1/PU.1 related)
  ENST ID: ENST00000594685
  CDS Start-End: 10-391
ggcaccaccatgctcgccctggaggctgcacaattcaggtggctggaggcagcctcagcatgcccctgtgtctctccccctccaggctcgacgggccacacttcagctgtctgtacccagatggcgtcttctatgacctggacagctgcaagcattccagctaccctgattcagagggggctcctgactccctgtgggactggactgtggccccacctgtcccagccaccccctatgaagccttcgacccggcagcagccgcttttagccacccccaggctgcccagctctgctacgaaccccccacctacagccctgcagggaacctcgaactggcccccagcctggaggccccggggcctggcctccctgcataccccacggagaactt

SEQ ID NO: 185940 - DNA, 1132 bp, Homo sapiens
  Payload ID: 16614
  Gene Symbol: SPIC
  Gene Name: Spi-C transcription factor (Spi-1/PU.1 related)
  Uniprot ID: Q8N5J4
  ENST ID: ENST00000551346
  CDS Start-End: 160-906
ttattttcatgatagcctaccgttgaatttaccgttctgatattaatgaaacatctctataaagggttgaagtgtcttcccggattgtcaacttattttattttattttcttcaagcaacaattgctaaggaacagaattgtcaatttattaatgaaatatgacgtgtgttgaacaagacaagctgggtcaagcatttgaagatgcttttgaggttctgaggcaacattcaactggagatcttcagtactcgccagattacagaaattacctggctttaatcaaccatcgtcctcatgtcaaaggaaattccagctgctatggagtgttgcctacagaggagcctgtctataattggagaacggtaattaacagtgctgcggacttctattttgaaggaaatattcatcaatctctgcagaacataactgaaaaccagctggtacaacccactcttctccagcaaaaggggggaaaaggcaggaagaagctccgactgtttgaataccttcacgaatccctgtataatccggagatggcatcttgtattcagtgggtagataaaaccaaaggcatctttcagtttgtatcaaaaaacaaagaaaaacttgccgagctttgggggaaaagaaaaggcaacaggaagaccatgacttaccagaaaatggccagggcactcagaaattacggaagaagtggggaaattaccaaaatccggaggaagctgacttaccagttcagtgaggccattctccaaagactctctccatcctatttcctggggaaagagatcttctattcacagtgtgttcaacctgatcaagaatatctcagtttaaataactggaatgcaaattataattatacatatgccaattaccatgagctaaatcaccatgattgctaaatatactttcatatttcatggtttactggcatcggaaatctctacaagttttaatgatttctccctccctctctttttttcctcctctgaagaaatttaggatttttctcttaaagcaaatactaaagaggaaaaaaaattaactttattgttgcttttatcaaagagtatgtaatctatactaacttgttgggaaattctgccaatgaacaacttttttataata

SEQ ID NO: 185941 - DNA, 5417 bp, Homo sapiens
  Payload ID: 16615
  Gene Symbol: SPICE1
  Gene Name: spindle and centriole associated protein 1
  Uniprot ID: Q8N0Z3
  ENST ID: ENST00000295872
  CDS Start-End: 261-2828
aacctgtggcgcgctccgcggttccggcgcctgaagttttagctgcggtggcggcggcagtcgggaccgactgcaaggcaggttgagatgatggatctgaggcttgcagctcgcagtcccaacgagccttagggaccagggctaccaaaagggtggggagaacggtggtggcatctgtctgttgcctgggatccaggcgcccggttggggaatccttacttcaggaagcgcagccgcggctctgtgttttgagagtgcaaatgtcatttgtcagagtgaaccgctgtggtccccgagttggtgtaagaaagacaccgaaagtaaagaagaagaaaacttcagtgaaacaagaatgggataataccgtgactgatctaaccgttcatcgggcaactcccgaagatctggtacgccgtcatgaaatacacaaatcgaagaatagagcattagtacactgggaactccaagaaaaagctttgaagagaaaatggaggaagcagaaaccagaaactttaaatcttgagaaaagaagattgtctatcatgaaggagattctttctgatcaataccagatgcaagatgtgttggagaaatctgatcatctaatagctgcagcaaaagagctgtttcctcgtaggcgcacagggtttccaaatgtaacagtggctcctgattcctctcagggtcccattgtggtaaatcaagaccctatcacccaatctatctttaatgagtctgtcatagaacctcaggctcttaatgatgtagatggtgaagaagaaggaactgttaatagccagtcaggagaaagtgagaatgagaatgagttggataactctctaaactctcagtctaacacgaatacagacaggtttctccaacaactaacagaagagaattttgagttaattagtaagttgtggactgacattcagcagaaaatagcaacccagtcacaaataactcctccaggaacgccatcatctgctctttcatcaggggagcaaagagctgctctgaatgctaccaatgctgtcaagagactccaaaccaggcttcagcctgaagaatctactgagactctagactcaagctacgttgtgggacacgtgctgaactcaaggaagcaaaaacagctgttaaataaagtgaaaaggaaaccgaatttgcatgctctttccaagccgaagaaaaacatatcatcaggtagcacaacctctgcagacttaccaaataggactaattccaacctggatgtcctcaaacacatgatacatgaagtggaacatgaaatggaagaatatgagcggtggacaggtcgcgaggtcaagggtctgcagagcagtcagggtcttacaggcttcactttgtcgctggtgagctccctctgtcgcctggttcggtaccttaaagagagtgagatccagctacgtaaagaagtagagacaaggcaacaactggaacaagtattaggtgatcatcgagagctcattgatgctctgacagctgaaattcttcgtcttagagaagaaaacgctgctacacaggcaagacttcagcagtacatggtcacaacagatgagcaactgatatcactcacacatgctattaagaactgtcctgtgataaataacagacaagaaattcaggcatcagaaagcggagccacaggtagaagagttatggacagtccagagcgtccagttgtaaatgccaatgtctcagtgccattgatgttcagagaggaagtggctgaattcccacaggaagagttgcccgttaaactgtctcaggtgccagaccctccagataacatgaatctggccaagaattttccagcacatatttttgagccagctgtgttgttaacaccacccaggcagaagagcaacttaaaattctctcctcttcaggacgtattgagaaggactgttcaaactcgtcctgctccacgacttcctccaactgtggaaataattgagaaggaacaaaattgggaagagaagaccttacctattgatacagacattcagaattcaagtgaagagaatcgtctcttcactcagagatggagagtctctcacatgggagaagatttggagaacaaaactcaggctccttttgttaacctctcacagcccctctgcaattcccattccaacactcaacagtcaagaagccccacattctcagaagagctcccagtactgggagatgggcagcagctgagaacaaatgagtcattaatacaaagaaaggacataatgacacgaattgctgatttgacattgcagaattcagctatcaaggcacatatgaataatattattgagcccagaggagagcaaggggatggactccgggagttgaacaaacaagaaagtgcaagtgacatgacttctacttttccagtagcacagtctctaacaccaggtagtatggaggaacggattgcagaattgaatcgacaaagtatggaggctcgtggaaaactactgcagttgatagagcagcagaaacttgttggtttgaatctttctccaccaatgtcacctgttcagttacctctcagagcatggactgaaggagcaaagaggacaattgaggtatctattccaggagcagaagccccagaaagctcaaaatgtagtactgtctctcccgtcagcgggataaatacaagaagatcttccggggctactggtaattcttgttctccactaaatgccacctcaggaagtgggagattcacacctcttaatccaagagcaaagattgagaaacagaatgaagaaggctggtttgctctttctacccatgtatcataagtgaagtcaagtctcactgagtttgttcttaataatttattacttccctttccctgctctgacttttaagtttttatatccttctttcagataaaacctacaaagatcctgtgaattagtactaatgaaacagagaaataaagcaattattttttgactttctcaaataagttttcaacaaccaactgacctacagctccctgtgaatgaaactttgactgtagagaagttaaagttttgtattttaatactttcttaagtattttaagggttttttttattaatacatttttacctttatctttattcagggttttttgaggtttagtatatcttagttgatccatttatttatttattttcctgaagaactaatttgctttgcatgtaacttacaataaaattcctctgtgtgattagagtctggctttcaggaatatgtaacacccacttttctttcttttttcttgggaagtcattgctgttcatcactttttccatcaagtgaaatatacagccttaaaaacaataggcctgggagtgtttgtttatatttgcttaagcaggtaagagtggttgcatttattataaaatcttatgtagtttttaaatgtgaaaatgtcatcaataatggtaatgcaaatcaaataaatatgattctagagctcaaatgcctaaatgtggtaacattgatttaatggtatatttaatgcttcaaacaattaaatagaaaaagttgctattaattttcccagccctgaatttaagcagatctttcagggtagatttctcttttttttttttttttgagacagagtcttgctttattgcccaggctggagtgcagttgtataatctggttcactgccacctcagtctcctgggttcaagcaatcctcttacctcagcctcctgagtagctaggattataggttcatgccaccacgcccagctaatttgtgtattttcagtagagacggggtttcaccatgttggccaggctgatctcgaactcctgacctcaaatgatccacctgccttggtttcccaaagtgccgggattacaggtgtgagccactgcacccggctcaggatagatttttcagggtacccttttggttctgagatgtttatttctattttaaacttgttttttgaatgatctctgctccctggctctatgataggaattctcaacctgagtgaacaattcaaactgagattacttgtgtttagactcatatattttgataacatatgacttctccagtatgccccagaaagctgctaataacttgctcaacctgaaatttacagttttccaaattacaggttggcagagatactggattgataacaacatccacagttatcatataatcattcttatgctgtaaacaaaattattttggttagcagaatttaataattaactgttaactacatactaggcaatattgtagccactttatgtgcttcatgacaccttatgggataggtactattatcctcattttgcagatgaggaaactgaggtacaaggaggtattttctcaaggtcacacaactagggagtggtggcattagaatgggaacataggcagtctttctccaaagcctatgctgtgctgcctcttgttggagagtaaacctgttttacagtgtgtgtagtatggaagcagcataataataagaatagctgttccttattgagccattactgtggcagacaccgtactataagctgtggtatcaccattatctcatttgaatctcatagtagacctatcagttagaggtatgtaaatgcttcctcctctcccagcacctttacagatgaggatgctgagccctagaggtgaagaaagttgtctaatgacagagtgcttgtaagaggtaaagccaagacttgaagctctttcttgcagttactggatttctcctaatttacgggaactaatacagtacagtagctaaggatgcaagtactgaaaccagaaatcttgcctcaaatgccatttctgccacttgagctgtgtactttggacaaattaatctaatctttcccatttgaaagtcagacataatgtcttccctagaggcttgtgaggattaagtgaggcaagtgtatgtaaatgggctgagatcagagcttggctcacaacactcagtaatgatcactgccaattttttttggtatataaataaataaatacactatttcccccatgtttccaatttttaagacattgtatagtgaatttattgtatctttctcagattaacaattgcacacagtgcttgaaatttagaggtatttcacctgaaaagatgtctagagattgaaagaaaacatgctgggcatatgatttgaaaatataaataacatgctatttaaaaataagtttaccctatgttttctatcttttctggcacctagatataccatttaataagtaatagcaaggataatcatttttttaagccctggaaaatcttgattaaagaggacatttcagtattgcaaataaatgcatggtatttgtgtaacattgtggaaactaataaacacaaattgtattatagcaa

SEQ ID NO: 185942 - DNA, 556 bp, Homo sapiens
  Payload ID: 16615
  Gene Symbol: SPICE1
  Gene Name: spindle and centriole associated protein 1
  ENST ID: ENST00000496859
  CDS Start-End: 500-556
gagagtgcaagtacgtgtcagggtgcgtgtctgggtatgtttgtgcgtggcgccagagcacctcgagtatgcgcgtgcgcaccgctttcgggagcttttgcacagagctggtaattgggggtgctcgattgtagcgttgggggagttcaccgtgtagcaggagagaggcaaactatccagggtgctttgggaccgggagcgtcatttaaatcgatggatgtcagaggggcttctcagaaggctcctcctgtgagttttgaggagtccgtggaagttaacccagtagagaagagagtgagcctaatgagtgttccaagcagagggaaaagaatggttgcaactgtgtgtgaggcgagagcttggttttaggatttgcgggagatgtgagagaacactggaaagaaaagtcagccgggccatatgggggagagggtctgaatgccaagctgagttggattgcttttgacagtggggagccatccgaatctagaggaagtagatgtcatttgtcagagtgaaccgctgtggtccccgagttggtgtaagaaagacaccg

SEQ ID NO: 185943 - DNA, 568 bp, Homo sapiens
  Payload ID: 16615
  Gene Symbol: SPICE1
  Gene Name: spindle and centriole associated protein 1
  ENST ID: ENST00000495812
  CDS Start-End: 49-568
tcgagtatgcgcgtgcgcaccgctttcgggagcttttgcacagagctgatgtcatttgtcagagtgaaccgctgtggtccccgagttggtgtaagaaagacaccgaaagtaaagaagaagaaaacttcagtgaaacaagaatgggataataccgtgactgatctaaccgttcatcgggcaactcccgaagatctggtacgccgtcatgaaatacacaaatcgaagaatagagcattagtacactgggaactccaagaaaaagctttgaagagaaaatggaggaagcagaaaccagaaactttaaatcttgagaaaagaagattgtctatcatgaaggagattctttctgatcaataccagatgcaagatgtgttggagaaatctgatcatctaatagctgcagcaaaagagctgtttcctcgtaggcgcacagggtttccaaatgtaacagtggctcctgattcctctcagggtcccattgtggtaaatcaagaccctatcacccaatctatctttaatgagtctgtcatagaacctcaggctcttaatgatgtagatggtgaagaag

SEQ ID NO: 185944 - DNA, 590 bp, Homo sapiens
  Payload ID: 16615
  Gene Symbol: SPICE1
  Gene Name: spindle and centriole associated protein 1
  ENST ID: ENST00000480527
  CDS Start-End: 109-590
aggcaacagcccggaagccgctggctgggttaacctgtggcgcgctccgcggttccggcgcctgaagttttagctgcggtggcggcggcagtcgggaccgactgcaagatgtcatttgtcagagtgaaccgctgtggtccccgagttggtgtaagaaagacaccgaaagtaaagaagaagaaaacttcagtgaaacaagaatgggataataccgtgactgatctaaccgttcatcgggcaactcccgaagatctggtacgccgtcatgaaatacacaaatcgaagaatagagcattagtacactgggaactccaagaaaaagctttgaagagaaaatggaggaagcagaaaccagaaactttaaatcttgagaaaagaagattgtctatcatgaaggagattctttctgatcaataccagatgcaagatgtgttggagaaatctgatcatctaatagctgcagcaaaagagctgtttcctcgtaggcgcacagggtttccaaatgtaacagtggctcctgattcctctcagggtcccattgtggtaaatcaagaccctatcacccaatctatctttaatgagtctgtcat

SEQ ID NO: 185945 - DNA, 622 bp, Homo sapiens
  Payload ID: 16615
  Gene Symbol: SPICE1
  Gene Name: spindle and centriole associated protein 1
  ENST ID: ENST00000467618
  CDS Start-End: 1-569
agttggataactctctaaactctcagtctaacacgaatacagacaggtttctccaacaactaacagaagagaattttgagttaattagtaagttgtggactgacattcagcagaaaatagcaacccagtcacaaataactcctccaggaacgccatcatctgctctttcatcaggggagcaaagagctgctctgaatgctaccaatgctgtcaagagactccaaaccaggcttcagcctgaagaatctactgagactctagactcaagctacgttgtgggacacgtgctgaactcaaggaagcaaaaacagctgttaaataaagaaggagcaaagaggacaattgaggtatctattccaggagcagaagccccagaaagctcaaaatgtagtactgtctctcccgtcagcgggataaatacaagaagatcttccggggctactggtaattcttgttctccactaaatgccacctcaggaagtgggagattcacacctcttaatccaagagcaaagattgagaaacagaatgaagaaggctggtttgctctttctacccatgtatcataagtgaagtcaagtctcactgagtttgttcttaataatttattacttccctttcc

SEQ ID NO: 185946 - DNA, 2905 bp, Homo sapiens
  Payload ID: 16616
  Gene Symbol: SKA1
  Gene Name: spindle and kinetochore associated complex subunit 1
  Uniprot ID: Q96BD8
  ENST ID: ENST00000285116
  CDS Start-End: 212-979
gatgacgcaaaccgggaacagcggctgagcctgcgcttcggaagcatggatgtgcgcctgcgctgcgctagggcgcggcgggcggtttgaattttgcttacagagtcccgtctcaccatcctgggcttccaacggagactgcggtatccgcagctggagacccagcggcgagtagccttttgctcccggacggacttgagaggcttaaaggatggcctcgtcagatctggaacaattatgctctcatgttaatgaaaagattggcaatattaagaaaaccttatcattaagaaactgtggccaggaacctaccttgaaaactgtattaaataaaataggagatgagatcattgtaataaatgaacttctaaataaattggaattggaaattcagtatcaagaacaaaccaacaattcactcaaggaactctgtgaatctcttgaagaagattacaaagacatagaacatcttaaagaaaacgttccttcccatttgcctcaagtaacagtaacccagagctgtgttaagggatcagatcttgatcctgaagaaccaatcaaagttgaagaacctgaacccgtaaagaagcctcccaaagagcaaagaagtattaaggaaatgccatttataacttgtgatgagttcaatggtgttccttcgtacatgaaatcccgcttaacctataatcaaattaatgatgttattaaagaaatcaacaaggcagtaattagtaaatataaaatcctacatcagccaaaaaagtctatgaattctgtgaccagaaatctctatcacagatttattgatgaagaaacgaaggataccaaaggtcgttattttatagtggaagctgacataaaggagttcacaactttgaaagctgacaagaagtttcacgtgttactgaatattttacgacactgccggaggctatcagaggtccgagggggaggacttactcgttatgttataacctgagtcccttgtgaacttttgaacataccaacagggtatagagtatagaggctatttctataattttcttatatataatttttttaacttttaatcttttttgtttccttttttttttttttgagacaggatcttgctttgtcacccaggggcttgctttgtcacgcaggctagagtgcagtggcgcaaacatggctcactgcagcctcaacctcccaggctcaagtgatcctcccacctcagccccctgaatggctgggactacaagcgtgcgccaccatgcctggctaatttttgtattttttggagagatggggtttcaccatgttgcctaggctggtcttgagctcctgagctcaaacaatccaccctcctcagcctcccaaagtgctgggattacaggcttgagccaccacacctgacctattcttgtttcttataaaaataaaacttttttggataaagcttatttcttgtttttttctttttctttttttttttttttgagacagtctcgctctttcacccaggccggactgcagcggcgctatctcggctcactgcaaactctgcctcccaggttcacgccatcctcctgcctcagcctcctgagtagctgggactacaggcacctgccaccacgcccagctaattttttgtatttttagtagagatggggtttcaccgtgttagccaggatggtctcgatctcctgacctcatgatccgcccacctcggcctcccaaagtgctgggattacaggcgtgagccaccgcgcccggccaacttatatattttcaagattcacctcctctcaccaaatatttaactacctgctgaatacgcctctgtactaggcacataatggaactaaaaaatgctcatgtccagtttttgtgttgagtgaacaatgctgcagaccctaataagattgggtacagatcggcatgcgcctgtagtcccagctactcaggagaattgcttgaacctaggaggtggaggttgcagtgagccgagatcgtgccactgcactccagtctgggcaacagagcgagactccatctcagaaaaaaagaaaaaaagactgggtacagatgtgatattggaagaaaaagatcaagctgatgaggttaggatacccaggccctttggacttaaagatcactagtgtctaaattccatcgatggcatttcagtctataggtaaacttcctggaagctggatttggagacagtttatcatctgattattgggctttcgtataggtccttagggagcagcttacctgaaatgcatttagtgtacaccagtctgtaaacttcaacctgtaatgaaagtgtaataaatgtacattgagttgatgtgataatgtgatataataagaaatatatatttgatcttcctatctagttccttgttcagagctcctaaaacccttgtaatttccaaagtgatggagtacatcttttgttctagtatttggtctttgaccccagttcctgacacaaagctcctaaattcctttaaatttcccagtgataggagaattttttgttctaatgaggtcactcttgatgggcacctggataactcaggatgggggctgctcacaaagaccacatcatgattggaagtttcaaactttcagtctcccacctccagagaggggagaggggctggagatttgtgtcaataatccatcaggcctatgtcaacaagacataatccgttaactatggagttcagggagcttcagggttggcaaacattttgatgtgccaggaaggtgacgcactccagctttatgaagtcagcaagtcctgtgctcaggatgcttctggaccttgccccaggtaccccttcatgtggctgttgttcatctgtatcctttgtagtagccttaaaataaactgttaaacacaagtaaa

SEQ ID NO: 185947 - DNA, 979 bp, Homo sapiens
  Payload ID: 16616
  Gene Symbol: SKA1
  Gene Name: spindle and kinetochore associated complex subunit 1
  Uniprot ID: Q96BD8
  ENST ID: ENST00000398452
  CDS Start-End: 212-979
atggatgtgcgcctgcgctgcgctagggcgcggcgggcggtttgaattttgcttacagagtcccgtctcaccatcctgggcttccaacggagactgcggtatccgcagctggagacccagcggcgagtagccttttgctcccggacggacttgaggttggagtctgtgtgttggggaccctgcctttggaagcgcccgagaggcttaaaggatggcctcgtcagatctggaacaattatgctctcatgttaatgaaaagattggcaatattaagaaaaccttatcattaagaaactgtggccaggaacctaccttgaaaactgtattaaataaaataggagatgagatcattgtaataaatgaacttctaaataaattggaattggaaattcagtatcaagaacaaaccaacaattcactcaaggaactctgtgaatctcttgaagaagattacaaagacatagaacatcttaaagaaaacgttccttcccatttgcctcaagtaacagtaacccagagctgtgttaagggatcagatcttgatcctgaagaaccaatcaaagttgaagaacctgaacccgtaaagaagcctcccaaagagcaaagaagtattaaggaaatgccatttataacttgtgatgagttcaatggtgttccttcgtacatgaaatcccgcttaacctataatcaaattaatgatgttattaaagaaatcaacaaggcagtaattagtaaatataaaatcctacatcagccaaaaaagtctatgaattctgtgaccagaaatctctatcacagatttattgatgaagaaacgaaggataccaaaggtcgttattttatagtggaagctgacataaaggagttcacaactttgaaagctgacaagaagtttcacgtgttactgaatattttacgacactgccggaggctatcagaggtccgagggggaggacttactcgttatgttataacctga

SEQ ID NO: 185948 - DNA, 1095 bp, Homo sapiens
  Payload ID: 16616
  Gene Symbol: SKA1
  Gene Name: spindle and kinetochore associated complex subunit 1
  Uniprot ID: Q96BD8
  ENST ID: ENST00000417656
  CDS Start-End: 164-793
gatgtgcgcctgcgctgcgctagggcgcggcgggcggtttgaattttgcttacagagtcccgtctcaccatcctgggcttccaacggagactgcggtatccgcagctggagacccagcggcgagtagccttttgctcccggacggacttgagaggcttaaaggatggcctcgtcagatctggaacaattatgctctcatgttaatgaaaagattggcaatattaagaaaaccttatcattaagaaactgtggccaggaacctaccttgaaaactgtattaaataaaataggagatgagatcattgtaataaatgaacttctaaataaattggaattggaaattcagtatcaagaacaaaccaacaattcactcaaggaactctgtgaatctcttgaagaagattacaaagacatagaacatcttaaagaaaacgttccttcccatttgcctcaagtaacagtaacccagagctggtacatgaaatcccgcttaacctataatcaaattaatgatgttattaaagaaatcaacaaggcagtaattagtaaatataaaatcctacatcagccaaaaaagtctatgaattctgtgaccagaaatctctatcacagatttattgatgaagaaacgaaggataccaaaggtcgttattttatagtggaagctgacataaaggagttcacaactttgaaagctgacaagaagtttcacgtgttactgaatattttacgacactgccggaggctatcagaggtccgagggggaggacttactcgttatgttataacctgagtcccttgtgaacttttgaacataccaacagggtatagagtatagaggctatttctataattttcttatatataatttttttaacttttaatcttttttgtttccttttttttttttttgagacaggatcttgctttgtcacccaggggcttgctttgtcacgcaggctagagtgcagtggcgcaaacatggctcactgcagcctcaacctcccaggctcaagtgatcctcccacctcagccccctgaatggctgggactacaagcgtgcgccaccatgcctggctaatttttgtatttttt

SEQ ID NO: 185949 - DNA, 2905 bp, Homo sapiens; identical to SEQ ID NO: 185946
  Payload ID: 16616
  Gene Symbol: SKA1
  Gene Name: spindle and kinetochore associated complex subunit 1
  Uniprot ID: Q96BD8
  ENST ID: ENST00000571751
  CDS Start-End: 212-979

SEQ ID NO: 185950 - DNA, 669 bp, Homo sapiens
  Payload ID: 16616
  Gene Symbol: SKA1
  Gene Name: spindle and kinetochore associated complex subunit 1
  ENST ID: ENST00000488454
  CDS Start-End: 351-665
gtgcgcctgcgctgcgctagggcgcggcgggcggtttgaattttgcttacagagtcccgtctcaccatcctgggcttccaacggagactgcggtatccgcagctggagacccagcggcgagtagccttttgctcccggacggacttgagaggcttaaaggatggcctcgtcagatctggaacaattatgctctcatgttaatgaaaagattggcaatattaagaaaaccttatcattaagaaactgtggaactctgtgaatctcttgaagaagattacaaagacatagaacatcttaaagaaaacgttccttcccatttgcctcaagtaacagtaacccagagctggtacatgaaatcccgcttaacctataatcaaattaatgatgttattaaagaaatcaacaaggcagtaattagtaaatataaaatcctacatcagccaaaaaagtctatgaattctgtgaccagaaatctctatcacagatttattgatgaagaaacgaaggataccaaaggtcgttattttatagtggaagctgacataaaggagttcacaactttgaaagctgacaagaagtttcacgtgttactgaatattttacgacactgccggaggctatcagaggtccgagggggaggacttactcgttatgttataacctgagtcc

SEQ ID NO: 185951 - DNA, 746 bp, Homo sapiens
  Payload ID: 16616
  Gene Symbol: SKA1
  Gene Name: spindle and kinetochore associated complex subunit 1
  ENST ID: ENST00000494518
  CDS Start-End: 474-746
gctagggcgcggcgggcggtttgaattttgcttacagagtcccgtctcaccatcctgggcttccaacggagactgcggtatccgcagctggagacccagcggcgagtagccttttgctcccggacggacttgaggttggagtctgtgtgttggggaccctgcctttggaagcgcccgagaggcttaaaggatggcctcgtcagatctggaacaattatgctctcatgttaatgaaaagattggcaatattaagaaaaccttatcattaagaaactgtggaactctgtgaatctcttgaagaagattacaaagacatagaacatcttaaagaaaacgttccttcccatttgcctcaagtaacagtaacccagagctgtgttaagggatcagatcttgatcctgaagaaccaatcaaagttgaagaacctgaacccgtaaagaagcctcccaaagagcaaagaagtattaaggaaatgccatttataacttgtgatgagttcaatggtgttccttcgtacatgaaatcccgcttaacctataatcaaattaatgatgttattaaagaaatcaacaaggcagtaattagtaaatataaaatcctacatcagccaaaaaagtctatgaattctgtgaccagaaatctctatcacagatttattgatgaagaaacgaaggataccaaaggtcgttattttatagtggaagctgacataaaggagttcacaactttgaaagctgacaagaag

SEQ ID NO: 185952 - DNA, 979 bp, Homo sapiens; identical to SEQ ID NO: 185947
  Payload ID: 16616
  Gene Symbol: SKA1
  Gene Name: spindle and kinetochore associated complex subunit 1
  Uniprot ID: Q96BD8
  ENST ID: ENST00000616604
  CDS Start-End: 212-979

SEQ ID NO: 185953 - DNA, 669 bp, Homo sapiens; identical to SEQ ID NO: 185950
  Payload ID: 16616
  Gene Symbol: SKA1
  Gene Name: spindle and kinetochore associated complex subunit 1
  ENST ID: ENST00000576078
  CDS Start-End: 351-665

SEQ ID NO: 185954 - DNA, 746 bp, Homo sapiens; identical to SEQ ID NO: 185951
  Payload ID: 16616
  Gene Symbol: SKA1
  Gene Name: spindle and kinetochore associated complex subunit 1
  ENST ID: ENST00000571318
  CDS Start-End: 474-746

SEQ ID NO: 185955 - DNA, 1095 bp, Homo sapiens; identical to SEQ ID NO: 185948
  Payload ID: 16616
  Gene Symbol: SKA1
  Gene Name: spindle and kinetochore associated complex subunit 1
  Uniprot ID: Q96BD8
  ENST ID: ENST00000633940
  CDS Start-End: 164-793

SEQ ID NO: 185956 - DNA, 2798 bp, Homo sapiens
  Payload ID: 16617
  Gene Symbol: SKA2
  Gene Name: spindle and kinetochore associated complex subunit 2
  Uniprot ID: Q8WVK7
  ENST ID: ENST00000330137
  CDS Start-End: 107-472
aatgagtgcgagatgttgagtgacagctgtccaatggaggccctccgtgctagtacggcttgcggcttaagcgccgccgcggtctgcggaatgtcaactattcaacatggaggcggaggtcgataagctggaactgatgttccagaaagctgagtctgatctggattacattcaatacaggctggaatatgaaatcaagactaatcatcctgattcagcaagtgagaaaaatccagttacactcttaaaggaattgtcagtgataaagtctcgatatcaaactttgtatgcccgctttaaaccagttgctgttgagcagaaagagagtaagagccgcatttgtgctactgtgaaaaagactatgaatatgatacaaaaactacagaagcaaacagacctggagctgtcaccactgactaaagaagagaaaactgcggcagagcaattcaaatttcacatgccagatttatgaagaaatggacttggaaaggaaattctaacagagaagagcttaattccggagaaatttaggaagatgtcttgttaacccttgatgtctagagattgggggctggtgaagggggtttggcttcaatgactggataatgatatctttcatgagagagattataagaagaagggcagataatatatgaataaagttcagccaaaaggatcaaatgagaataaaacgatttaaatatatgtacacacgcatgcacacacacacttagtcttgtaatttcaggccagaaattctcaacactattttgcatctgttttctttttctaagtcatgataatatagatgttctggtctatcataaaagaatgtttatgtacatttcagtcattcggtatgtggctttgtaaattaaagtataggcaaaacatttgtgttatacatgatatataatttcattttgtaaatgttgattgcacatgtggtcacattattgttgagactgcttttatgtgacctgtagtctcccacagaacctaaagtaataagctggcttttctgtgatagccacgtttgcgtatttctttccctatttcccttgcctgctaatgttgaacagcatgaacttgctttctgatgctgttttagactgtccctgttgtatctcaataatatctttgttttccttcagcctttattactataattgttcattctacatgaaagctaggaaactgaaattagaagagcacttatctgctacttgccagttttgcgtgagtgtgttatatgtatgtgtcaatttccctttaaaataactatttattttaaaataactattggcaataaggaaactgttcaaagtagaggcagatcttgatagaaagatgttaatcacagggttgtttataatagcaatatacatacacatttggctagtactaggtgaataggaaaataaatcatgctgtatgtatacaataagaggtcaagttgccaataaattattactgttaatgttctgggaaatgctgaaactatgctaagtgggggagagggaaagcaggtattgcagttttgtagtgaagattgggctttggagtcatatctgagatgtaagtagcagcttttaaattctagctatgaccctgtgcagatcacttaacttttgagtgtcaggatgtttggaaggacaagacaggaaagtgttttaatacagggttcagtatttagtaagccttcaataagtgatattacatacatgtaataaaaactaagcattgaaaggactaggaaaaatgcatcaaatgttagttctgcaggttatagaattatacttttatgtaattttaaaatttcagttatgaacatgtttgtccattaacaaacttataatagctgaaaaacagggttgtgagaacagcttcagttaaaattgtcctgtctagtttgaatatttcaagaacagaaagcctttttttttttttttttttttttgagacggagtctcactctgttgcccaggctggaatgcagtggtacgctctcagctcactgcaacctccacctcccaggttcaagcagttctctgccccaccctcccgagtagctgggattacaggcgcccgccaccacgcccggctatttttttgtatttttagtagagatggggcttcaccatcttgaccaggctggtctttaactcctgatggtgatccacccacctcggcctcccaaagtgctgggattacaggcatgagctaccgtgcctggcccccttttttttaattacagagaaataagttacaccttagtatcagatattaattttcttcagtgttcaggcaattagtatttagaaagctcttgtcatgagatggctctgggatgtgatgatgattgttgggattgaaaaaacggtagtatcatggagagatcataataaattcttagtattaaaagtggttttgctttcagttagggagaaaaattagattgtactatttttcctctatgatttccttcagttatcttccaaatgttgttttttccccacagcccccttaacattgttctctatgcacttctcaatacattttcatttgtttctcaagcctctttgtggatgactcctaaatataacttcttccactagctctagatccgtatttccaataaaatcccctacctgaatattcaagttaaacatgtccagaatacttactgattttattgttaatagccactattctgttgtctggaattaaaacctgtataactaatttgcatccctttatcttcttagtcaataaaacctacaatcctctttctaaaa

SEQ ID NO: 185957 - DNA, 625 bp, Homo sapiens
  Payload ID: 16617
  Gene Symbol: SKA2
  Gene Name: spindle and kinetochore associated complex subunit 2
  Uniprot ID: Q8WVK7
  ENST ID: ENST00000437036
  CDS Start-End: 112-339
gccgcggtctgcggaatgtcaactattcaacatggaggcggaggtcgataagctggaactgatggtgagtgcaaagtgaaggagatctactgggtagtttatttttcccccatggcctcggaggtggggcacaatttggagtcgccggaaactccgggcggcggaggctggaccagagtcgagttccctcctcctgcaccaaagggagccgccaccgtctggtgtctaaaccgcctcggttccagaaagctgagtctgatctggattacattcaatacaggctggaatatgaaatcaagactaatcatcctgattcagcaagtgagctgtcaccactgactaaagaagagaaaactgcggcagagcaattcaaatttcacatgccagatttatgaagaaatggacttggaaaggaaattctaacagagaagagcttaattccggagaaatttaggaagatgtcttgttaacccttgatgtctagagattgggggctggtgaagggggtttggcttcaatgactggataatgatatctttcatgagagagattataagaagaagggcagataatatatgaataaagttcagccaaaaggatcaaatgagaataaaacgatttaaat

SEQ ID NO: 185958 - DNA, 689 bp, Homo sapiens
  Payload ID: 16617
  Gene Symbol: SKA2
  Gene Name: spindle and kinetochore associated complex subunit 2
  ENST ID: ENST00000580541
  CDS Start-End: 102-242
gcggaatgtcaactattcaacatggaggcggaggtcgataagctggaactgatggtgagtgcaaagtgaaggagatctactgggtagtttatttttcccccatggcctcggaggtggggcacaatttggagtcgccggaaactccgggcggcggaggctggaccagagtcgagttccctcctcctgcaccaaagggagccgccaccgtctggtgtctaaaccgcctcggctgtcaccactgactaaagaagagaaaactgcggcagagcaattcaaatttcacatgccagatttatgaagaaatggacttggaaaggaaattctaacagagaagagcttaattccggagaaatttaggaagatgtcttgttaacccttgatgtctagagattgggggctggtgaagggggtttggcttcaatgactggataatgatatctttcatgagagagattataagaagaagggcagataatatatgaataaagttcagccaaaaggatcaaatgagaataaaacgatttaaatatatgtacacacgcatgcacacacacacttagtcttgtaatttcaggccagaaattctcaacactattttgcatctgttttctttttctaagtcatgataatatagatgttctggtctatcataaaagaatgtttatgtacatttcagtcattcggtatgt

SEQ ID NO: 185959 - DNA, 595 bp, Homo sapiens
  Payload ID: 16617
  Gene Symbol: SKA2
  Gene Name: spindle and kinetochore associated complex subunit 2
  ENST ID: ENST00000581068
  CDS Start-End: 86-274
gacagctgtccaatggaggccctccgtgctagtacggcttgcggcttaagcgccgccgcggtctgcggaatgtcaactattcaacatggaggcggaggtcgataagctggaactgatgttccagaaagctgagtctgatctggattacattcaatacaggctggaatatgaaatcaagactaatcatcctgattcagcaagtgagctgtcaccactgactaaagaagagaaaactgcggcagagcaattcaaatttcacatgccagatttatgaagaaatggacttggaaaggaaattctaacagagaagagcttaattccggagaaatttaggaagatgtcttgttaacccttgatgtctagagattgggggctggtgaagggggtttggcttcaatgactggataatgatatctttcatgagagagattataagaagaagggcagataatatatgaataaagttcagccaaaaggatcaaatgagaataaaacgatttaaatatatgtacacacgcatgcacacacacacttagtcttgtaatttcaggccagaaattctcaacactattttgcatctgttttctttttctaa

SEQ ID NO: 185960 - DNA, 583 bp, Homo sapiens
  Payload ID: 16617
  Gene Symbol: SKA2
  Gene Name: spindle and kinetochore associated complex subunit 2
  ENST ID: ENST00000583380
  CDS Start-End: 12-341
aactattcaacatggaggcggaggtcgataagctggaactgatgttccagaaagctgagtctgatctggattacattcaatacaggctggaatatgaaatcaagactaatcatcctgattcagcaagtgagaaaaatccagttacactcttaaaggaattgtcagtgataaagtctcgatatcaaactttgtatgcccgctttaaaccagttgctgttgagcagaaagagagtaagagccgcatttgtgctactgtgaaaaagactatgaatatgatacaaaaactacagaagcaaacagacctggaggtaatgctttcagttgacagctgtcaccactgactaaagaagagaaaactgcggcagagcaattcaaatttcacatgccagatttatgaagaaatggacttggaaaggaaattctaacagagaagagcttaattccggagaaatttaggaagatgtcttgttaacccttgatgtctagagattgggggctggtgaagggggtttggcttcaatgactggataatgatatctttcatgagagagattataagaagaagggcagataatatatgaat

SEQ ID NO: 185961 - DNA, 689 bp, Homo sapiens
  Payload ID: 16617
  Gene Symbol: SKA2
  Gene Name: spindle and kinetochore associated complex subunit 2
  ENST ID: ENST00000578105
  CDS Start-End: 22-300
gcggaatgtcaactattcaacatggaggcggaggtcgataagctggaactgatgaaaaatccagttacactcttaaaggaattgtcagtgataaagtctcgatatcaaactttgtatgcccgctttaaaccagttgctgttgagcagaaagagagtaagagccgcatttgtgctactgtgaaaaagactatgaatatgatacaaaaactacagaagcaaacagacctggagctgtcaccactgactaaagaagagaaaactgcggcagagcaattcaaatttcacatgccagatttatgaagaaatggacttggaaaggaaattctaacagagaagagcttaattccggagaaatttaggaagatgtcttgttaacccttgatgtctagagattgggggctggtgaagggggtttggcttcaatgactggataatgatatctttcatgagagagattataagaagaagggcagataatatatgaataaagttcagccaaaaggatcaaatgagaataaaacgatttaaatatatgtacacacgcatgcacacacacacttagtcttgtaatttcaggccagaaattctcaacactattttgcatctgttttctttttctaagtcatgataatatagatgttctggtctatcataaaagaatgtttatgtacatttcagtcattcggtat

SEQ ID NO: 185962 - DNA, 570 bp, Homo sapiens
  Payload ID: 16617
  Gene Symbol: SKA2
  Gene Name: spindle and kinetochore associated complex subunit 2
  ENST ID: ENST00000583976
  CDS Start-End: 95-331
gtcaactattcaacatggaggcggaggtcgataagctggaactgatggtgagtgcaaagtgaaggagatctactgggtagtttatttttcccccatggcctcggaggtggggcacaatttggagtcgccggaaactccgggcggcggaggctggaccagagtcgagttccctcctcctgcaccaaagggagccgccaccgtctggtgtctaaaccgcctcggttccagaaagctgagtctgatctggattacattcaatacaggctggaatatgaaatcaagactaatcatcctgattcagcaagtgagaaaaatccagttacactcttaaaggaattgtcagtgataaagtctcgatatcaaactttgtatgcccgctttaaaccagttgctgttgagcagaaagagagtaagagccgcatttgtgctactgtgaaaaagactatgaatatgatacaaaaactacagaagcaaacagacctggagctgtcaccactgactaaagaagagaaaactgcggcagagcaattcaaatttcacatgccagatttatgaagaaatggacttgga

SEQ ID NO: 185963 - DNA, 229 bp, Homo sapiens
  Payload ID: 16617
  Gene Symbol: SKA2
  Gene Name: spindle and kinetochore associated complex subunit 2
  ENST ID: ENST00000584089
  CDS Start-End: 31-229
cttagtaaactcaagataaaaagctgtaagatgttccagaaagctgagtctgatctggattacattcaatacaggctggaatatgaaatcaagactaatcatcctgattcagcaagtgagaaaaatccagttacactcttaaaggaattgtcagtgataaagtctcgatatcaaactttgtatgcccgctttaaaccagttgctgttgagcagaaagagagtaagagcc

SEQ ID NO: 185964 - DNA, 894 bp, Homo sapiens
  Payload ID: 16617
  Gene Symbol: SKA2
  Gene Name: spindle and kinetochore associated complex subunit 2
  ENST ID: ENST00000578519
  CDS Start-End: 20-205
ggaatgtcaactattcaacatggaggcggaggtcgataagctggaactgatgttccagaaagctgagtctgatctggattacattcaatacaggctggaatatgaaatcaagactaatcatcctgattcagcaagtgagacagagtctcactctgttgtccagactggagtgcagtggcatgatcatggctcactgcagctttgacctcctgggctcaggtgatcctcccacctcagtctcctgcgtaggtggaaatacagaaaaatccagttacactcttaaaggaattgtcagtgataaagtctcgatatcaaactttgtatgcccgctttaaaccagttgctgttgagcagaaagagagtaagagccgcatttgtgctactgtgaaaaagactatgaatatgatacaaaaactacagaagcaaacagacctggagctgtcaccactgactaaagaagagaaaactgcggcagagcaattcaaatttcacatgccagatttatgaagaaatggacttggaaaggaaattctaacagagaagagcttaattccggagaaatttaggaagatgtcttgttaacccttgatgtctagagattgggggctggtgaagggggtttggcttcaatgactggataatgatatctttcatgagagagattataagaagaagggcagataatatatgaataaagttcagccaaaaggatcaaatgagaataaaacgatttaaatatatgtacacacgcatgcacacacacacttagtcttgtaatttcaggccagaaattctcaacactattttgcatctgttttctttttctaagtcatgataatatagatgttctggtctatcataaaagaatgtttatgtacatttcagtcattcggt

SEQ ID NO: 185965 - DNA, 2803 bp, Homo sapiens
  Payload ID: 16618
  Gene Symbol: SKA3
  Gene Name: spindle and kinetochore associated complex subunit 3
  Uniprot ID: Q8IX90
  ENST ID: ENST00000298260
  CDS Start-End: 72-179
tagtggcgggaggctgtgagctgagcggtggggtctgcgtacgcctggagtccttccccgctgtgctcagcatggaccctatccggagcttctgcgggaagctgcggtctctggccagcacgctggactgcgagacggcccggctgcagcgagcgctggacggagaggaaagcggatgatgttaatattcttcttgataaagcaagattggaaaatcaagaaggcattgatttcataaaggcaacaaaagtactaatggaaaaaaattcaatggatattatgaaaataagagagtatttccagaagtatggatatagtccacgtgtcaagaaaaattcagtacacgagcaagaagccattaactctgacccagagttgtctaattgtgaaaattttcagaagactgatgtgaaagatgatctgtctgatcctcctgttgcaagcagttgtatttctgagaagtctccacgtagtccacaactttcagattttggacttgagcggtacatcgtatcccaagttctaccaaaccctccacaggcagtgaacaactataaggaagagcccgtaattgtaaccccacctaccaaacaatcactagtaaaagtactaaaaactccaaaatgtgcactaaaaatggatgattttgagtgtgtaactcctaaattagaacactttggtatctctgaatatactatgtgtttaaatgaagattacacaatgggacttaaaaatgcgaggaataataaaagtgaggaggccatagatacagaatccaggctcaatgataatgtttttgccactcccagccccatcatccagcagttggaaaaaagtgatgccgaatataccaactctcctttggtacctacattctgtactcctggtttgaaaattccatctacaaagaacagcatagctttggtatccacaaattacccattatcaaaaacaaatagttcatcaaatgatttggaagttgaagatcgtacttcgttggttttaaattcagacacatgctttgagaatttaacagatccctcttcacctacgatttcttcttatgagaatctgctcagaacacctacacctccggaagtaactaaaattccagaagatattctccagcttttatcaaaatacaactcaaacctagctactccaatagcaattaaagcagtgccacccagtaaaaggttccttaaacatggacagaacatccgagatgtcagcaacaaagaaaactgaaattccagtggatctatccaacacagaaactgaacaaaatgagatgaaagccgagctggaccgattttaacattcacattgccctgcctctgtccccctttaaacgttgacccattttaaagacaaacatgaacattaacatcataatatgctttttatgaagtttcaataaggtttaaccttagtcttgttgacatgtagcccagtcattcactctttaaggattattagtgtttcattgatactaaattacccagcttaatcaacagaatggtttaagtagtaccaggaagtaggacaagtaatttcaaaaatataaaggtgtttgctactcagatgaggccgcccctgaccttctggccagagagacattgctgccagccagctctgccttcccatcatctcctttcaggaccgtcccacaccttttacttgctcagtgctgtctgaagatgcagttgctgtttgcaaacaacaggaacaccagttaaactaattaggaaaagagggagatttccaggcctgggtaactatatactgtgaccattggaggtagagacaggtctcaacagttggaaccaggaactctgctgtcaggttgagagttttgtttctcttccagcttttcactgtgtgggggtcttttctcttatgtcagctctttctatcacatggcagctgacctctcacgctccactctgcagcttggacacccagtagaccctgaatttcactctctctaaaaggttctgagggctcatcctgggccaggggccctcctgtgcactgttagctatggccacgggagcctccagagctgcctggtagcttcaggttgacctgcttatcaggcctacgatccttctgatttaagtacagctggaaagtattatctaattaagttcatgatagtgcttttggagaacttgtcaaattacagccaatgagaaaataaggacctagcatactgtggagaaccattaaaaatttgagaagaaacaacaagtattatgtcaacttacttcaaaggcgtagttttgggaatttgatgcagtaaagattaccctgttttatgattgttccttgaaagtcaaatgggggacctgtccattgtgctctattaatcttgtcagaaaactgtcaccaaaacaaaacttgagtttgtccttgttctaggagttactgggtagttgtaagtattatttttattaaatataatgtaaaataaaatgttaagatacttagttttgtttttcaaagtaaagctgtagtcagccttatgtatgccattgactctgaaatgtataccagcctttcactgtgtaccgtgtgtatataaatccacagaaccggatgagctgcttagggagggaatatattcaaagtgtaccaaggaccaaatcctggagttctcccaactttagaggatggaaaggggcagagtaatctagcaaaggagactgaggccagtgaagtaggaagaaagtatttcaaggagagtgatgattctgtgaatattgctgagaattcaaataaaaagaggactgagaactga

SEQ ID NO: 185966 - DNA, 2919 bp, Homo sapiens
  Payload ID: 16618
  Gene Symbol: SKA3
  Gene Name: spindle and kinetochore associated complex subunit 3
  Uniprot ID: Q8IX90
  ENST ID: ENST00000314759
  CDS Start-End: 126-1364
gagaggactgcgcctgcgcagagccgaggacgcgtccggcgccgagattcaaactagtggcgggaggctgtgagctgagcggtggggtctgcgtacgcctggagtccttccccgctgtgctcagcatggaccctatccggagcttctgcgggaagctgcggtctctggccagcacgctggactgcgagacggcccggctgcagcgagcgctggacggagaggaaagcgactttgaagattatccaatgagaattttatatgaccttcattcagaagttcagactctaaaggatgatgttaatattcttcttgataaagcaagattggaaaatcaagaaggcattgatttcataaaggcaacaaaagtactaatggaaaaaaattcaatggatattatgaaaataagagagtatttccagaagtatggatatagtccacgtgtcaagaaaaattcagtacacgagcaagaagccattaactctgacccagagttgtctaattgtgaaaattttcagaagactgatgtgaaagatgatctgtctgatcctcctgttgcaagcagttgtatttctgagaagtctccacgtagtccacaactttcagattttggacttgagcggtacatcgtatcccaagttctaccaaaccctccacaggcagtgaacaactataaggaagagcccgtaattgtaaccccacctaccaaacaatcactagtaaaagtactaaaaactccaaaatgtgcactaaaaatggatgattttgagtgtgtaactcctaaattagaacactttggtatctctgaatatactatgtgtttaaatgaagattacacaatgggacttaaaaatgcgaggaataataaaagtgaggaggccatagatacagaatccaggctcaatgataatgtttttgccactcccagccccatcatccagcagttggaaaaaagtgatgccgaatataccaactctcctttggtacctacattctgtactcctggtttgaaaattccatctacaaagaacagcatagctttggtatccacaaattacccattatcaaaaacaaatagttcatcaaatgatttggaagttgaagatcgtacttcgttggttttaaattcagacacatgctttgagaatttaacagatccctcttcacctacgatttcttcttatgagaatctgctcagaacacctacacctccggaagtaactaaaattccagaagatattctccagcttttatcaaaatacaactcaaacctagctactccaatagcaattaaagcagtgccacccagtaaaaggttccttaaacatggacagaacatccgagatgtcagcaacaaagaaaactgaaattccagtggatctatccaacacagaaactgaacaaaatgagatgaaagccgagctggaccgattttaacattcacattgccctgcctctgtccccctttaaacgttgacccattttaaagacaaacatgaacattaacatcataatatgctttttatgaagtttcaataaggtttaaccttagtcttgttgacatgtagcccagtcattcactctttaaggattattagtgtttcattgatactaaattacccagcttaatcaacagaatggtttaagtagtaccaggaagtaggacaagtaatttcaaaaatataaaggtgtttgctactcagatgaggccgcccctgaccttctggccagagagacattgctgccagccagctctgccttcccatcatctcctttcaggaccgtcccacaccttttacttgctcagtgctgtctgaagatgcagttgctgtttgcaaacaacaggaacaccagttaaactaattaggaaaagagggagatttccaggcctgggtaactatatactgtgaccattggaggtagagacaggtctcaacagttggaaccaggaactctgctgtcaggttgagagttttgtttctcttccagcttttcactgtgtgggggtcttttctcttatgtcagctctttctatcacatggcagctgacctctcacgctccactctgcagcttggacacccagtagaccctgaatttcactctctctaaaaggttctgagggctcatcctgggccaggggccctcctgtgcactgttagctatggccacgggagcctccagagctgcctggtagcttcaggttgacctgcttatcaggcctacgatccttctgatttaagtacagctggaaagtattatctaattaagttcatgatagtgcttttggagaacttgtcaaattacagccaatgagaaaataaggacctagcatactgtggagaaccattaaaaatttgagaagaaacaacaagtattatgtcaacttacttcaaaggcgtagttttgggaatttgatgcagtaaagattaccctgttttatgattgttccttgaaagtcaaatgggggacctgtccattgtgctctattaatcttgtcagaaaactgtcaccaaaacaaaacttgagtttgtccttgttctaggagttactgggtagttgtaagtattatttttattaaatataatgtaaaataaaatgttaagatacttagttttgtttttcaaagtaaagctgtagtcagccttatgtatgccattgactctgaaatgtataccagcctttcactgtgtaccgtgtgtatataaatccacagaaccggatgagctgcttagggagggaatatattcaaagtgtaccaaggaccaaatcctggagttctcccaactttagaggatggaaaggggcagagtaatctagcaaaggagactgaggccagtgaagtaggaagaaagtatttcaaggagagtgatgattctgtgaatattgctgagaattcaaataaaaagaggactgagaactga

SEQ ID NO: 185967 - DNA, 2745 bp, Homo sapiens
  Payload ID: 16618
  Gene Symbol: SKA3
  Gene Name: spindle and kinetochore associated complex subunit 3
  Uniprot ID: Q8IX90
  ENST ID: ENST00000400018
  CDS Start-End: 71-1237
agtggcgggaggctgtgagctgagcggtggggtctgcgtacgcctggagtccttccccgctgtgctcagcatggaccctatccggagcttctgcgggaagctgcggtctctggccagcacgctggactgcgagacggcccggctgcagcgagcgctggacggagaggaaagcgactttgaagattatccaatgagaattttatatgaccttcattcagaagttcagactctaaaggatgatgttaatattcttcttgataaagcaagattggaaaatcaagaaggcattgatttcataaaggcaacaaaagtactaatggaaaaaaattcaatggatattatgaaaataagagagtatttccagaagtatggatatagtccacgtgtcaagaaaaattcagtacacgagcaagaagccattaactctgacccagagttgtctaattgtgaaaattttcagaagactgatgtgaaagatgatctgtctgatcctcctgttgcaagcagttgtatttctgagaagtctccacgtagtccacaactttcagattttggacttgagcggtacatcgtatcccaagttctaccaaaccctccacaggcagtgaacaactataaggaagagcccgtaattgtaaccccacctaccaaacaatcactagtaaaagtactaaaaactccaaaatgtgcactaaaaatggatgattttgagtgtgtaactcctaaattagaacactttggtatctctgaatatactatgtgtttaaatgaagattacacaatgggacttaaaaatgcgaggaataataaaagtgaggaggccatagatacagaatccaggctcaatgataatgtttttgccactcccagccccatcatccagcagttggaaaaaagtgatgccgaatataccaactctcctttggtacctacattctgtactcctggtttgaaaattccatctacaaagaacagcatagctttggtatccacaaattacccattatcaaaaacaaatagttcatcaaatgatttggaagttgaagatcgtacttcgttggttttaaattcagacacatgctttgagaatttaacagatccctcttcacctacgatttcttcttatgagaatctgctcagaacacctacacctccggaagtaactaaaattccagaagatattctccagaaattccagtggatctatccaacacagaaactgaacaaaatgagatgaaagccgagctggaccgattttaacattcacattgccctgcctctgtccccctttaaacgttgacccattttaaagacaaacatgaacattaacatcataatatgctttttatgaagtttcaataaggtttaaccttagtcttgttgacatgtagcccagtcattcactctttaaggattattagtgtttcattgatactaaattacccagcttaatcaacagaatggtttaagtagtaccaggaagtaggacaagtaatttcaaaaatataaaggtgtttgctactcagatgaggccgcccctgaccttctggccagagagacattgctgccagccagctctgccttcccatcatctcctttcaggaccgtcccacaccttttacttgctcagtgctgtctgaagatgcagttgctgtttgcaaacaacaggaacaccagttaaactaattaggaaaagagggagatttccaggcctgggtaactatatactgtgaccattggaggtagagacaggtctcaacagttggaaccaggaactctgctgtcaggttgagagttttgtttctcttccagcttttcactgtgtgggggtcttttctcttatgtcagctctttctatcacatggcagctgacctctcacgctccactctgcagcttggacacccagtagaccctgaatttcactctctctaaaaggttctgagggctcatcctgggccaggggccctcctgtgcactgttagctatggccacgggagcctccagagctgcctggtagcttcaggttgacctgcttatcaggcctacgatccttctgatttaagtacagctggaaagtattatctaattaagttcatgatagtgcttttggagaacttgtcaaattacagccaatgagaaaataaggacctagcatactgtggagaaccattaaaaatttgagaagaaacaacaagtattatgtcaacttacttcaaaggcgtagttttgggaatttgatgcagtaaagattaccctgttttatgattgttccttgaaagtcaaatgggggacctgtccattgtgctctattaatcttgtcagaaaactgtcaccaaaacaaaacttgagtttgtccttgttctaggagttactgggtagttgtaagtattatttttattaaatataatgtaaaataaaatgttaagatacttagttttgtttttcaaagtaaagctgtagtcagccttatgtatgccattgactctgaaatgtataccagcctttcactgtgtaccgtgtgtatataaatccacagaaccggatgagctgcttagggagggaatatattcaaagtgtaccaaggaccaaatcctggagttctcccaactttagaggatggaaaggggcagagtaatctagcaaaggagactgaggccagtgaagtaggaagaaagtatttcaaggagagtgatgattctgtgaatattgctgagaattcaaataaaaagaggactgagaactga

SEQ ID NO: 185968 - DNA, 930 bp, Homo sapiens
  Payload ID: 16618
  Gene Symbol: SKA3
  Gene Name: spindle and kinetochore associated complex subunit 3
  ENST ID: ENST00000465471
  CDS Start-End: 75-185
aactagtggcgggaggctgtgagctgagcggtggggtctgcgtacgcctggagtccttccccgctgtgctcagcatggaccctatccggagcttctgcgggaagctgcggtctctggccagcacgctggactgcgagacggcccggctgcagcgagcgctggacggagaggaaagcggtgcgtgaggcgggcggccagggcacgactttgaagattatccaatgagaattttatatgaccttcattcagaagttcagactctaaaggatgatgttaatattcttcttgataaagcaagattggaaaatcaagaaggcattgatttcataaaggcaacaaaagtactaatggaaaaaaattcaatggatattatgaaaataagagagtatttccagaagtatggatatagtccacgtgtcaagaaaaattcagtacacgagcaagaagccattaactctgacccagagttgtctaattgtgaaaattttcagaagactgatgtgaaagatgatctgtctgatcctcctgttgcaagcagttgtatttctgagaagtctccacgtagtccacaactttcagattttggacttgagcggtacatcgtatcccaagttctaccaaaccctccacaggcagtgaacaactataaggaagagcccgtaattgtaaccccacctaccaaacaatcactagtaaaagtactaaaaactccaaaatgtgcactaaaaatggatgattttgagtgtgtaactcctaaattagaacactttggtatctctgaatatactatgtgtttaaatgaagattacacaatgggacttaaaaatgcgaggaataataaaagtgaggaggccatagatacagaatccaggctcaatgataatgtttttgccactcccagccccatcatccagcagttggaaaaaagtg

SEQ ID NO: 185969 - DNA, 750 bp, Homo sapiens
  Payload ID: 16618
  Gene Symbol: SKA3
  Gene Name: spindle and kinetochore associated complex subunit 3
  ENST ID: ENST00000462482
  CDS Start-End: 75-224
aactagtggcgggaggctgtgagctgagcggtggggtctgcgtacgcctggagtccttccccgctgtgctcagcatggaccctatccggagcttctgcgggaagctgcggtctctggccagcacgctggactgcgagacggcccggctgcagcgagcgctggacggagaggaaagcgcttttatcaaaatacaactcaaacctagctactccaatagcaattaaagcagtgccacccagtaaaaggttccttaaacatggacagaacatccgagatgtcagcaacaaagaaaactgaaattccagtggatctatccaacacagaaactgaacaaaatgagatgaaagccgagctggaccgattttaacattcacattgccctgcctctgtccccctttaaacgttgacccattttaaagacaaacatgaacattaacatcataatatgctttttatgaagtttcaataaggtttaaccttagtcttgttgacatgtagcccagtcattcactctttaaggattattagtgtttcattgatactaaattacccagcttaatcaacagaatggtttaagtagtaccaggaagtaggacaagtaatttcaaaaatataaaggtgtttgctactcagatgaggccgcccctgaccttctggccagagagacattgctgccagccagctctgccttcccatcatctcctttcaggaccgtcccacaccttttacttgctcagtgctgtctgaaga

SEQ ID NO: 185970 - DNA, 2668 bp, Homo sapiens
  Payload ID: 16619
  Gene Symbol: SPDL1
  Gene Name: spindle apparatus coiled-coil protein 1
  Uniprot ID: Q96EA4
  ENST ID: ENST00000265295
  CDS Start-End: 280-2097
acatgcgcagtagctgtaggagggggtgggcgctccattgggcgtttctcttggtttttcctttccgcgcggcttgggcggacgtctcgtgagacgtgggacttctcgcgggaactgcattcaaatatcccaggcgcttactcgagagctagctgagcgaatgggccggcgactgtggagttagcgtcctcaatgtggacgccctgagctcccattaggagccgctggctgcggcagcaggggactagcgtgagagttggctaaaaaaaagaaaagaacatggaggcagatataatcacaaatcttcgatgcaggctcaaagaggctgaagaagagcgactaaaagctgcacagtatggtttacaactagtagagagtcaaaatgaattacagaatcaattggataaatgtcgtaatgaaatgatgaccatgactgagagttatgaacaagaaaaatatacccttcaaagagaagttgaactcaagagtcgaatgttagaaagtttgagctgcgaatgtgaagctattaaacaacaacaaaaaatgcacctggagaaattggaagaacaactaagcagaagccatggacaggaagtgaatgaactaaaaactaagatagaaaaactgaaagtggaattagatgaagccaggcttagtgaaaagcagctgaagcaccaagtagatcatcagaaggaactcctctcttgtaaatcagaggaactgcgcgtaatgtctgaacgtgtgcaggaaagcatgtcttcagagatgctggctcttcaaattgagctgacagaaatggagagtatgaagaccaccctcaaagaagaagtgaatgaactacaatacagacaagaacagctagaacttcttattactaacctaatgcgccaggtagaccggcttaaagaggaaaaagaggagcgagagaaagaagcagtttcttactataatgccctagagaaagctcgtgtagcaaatcaagatcttcaggtacagttggaccaggcactccagcaagccttggatcccaatagtaaaggcaactctttgtttgcagaggtggaagatcgaagggcagcaatggaacgtcagctcatcagtatgaaagtcaagtatcagtcactaaagaagcaaaatgtatttaacagagaacagatgcagagaatgaagttacaaattgccacgttgctacagatgaaagggtctcaaactgaatttgagcagcaggaacggttgcttgccatgttggagcagaagaatggtgaaataaaacatcttttaggtgaaattagaaatctggagaaatttaagaatttatatgacagtatggaatctaagccttcagtcgactctggtactctggaagataacacctattatacagatttacttcagatgaagctggataacttaaacaaagaaattgaaagcactaaaggtgaattgtccatacagcgaatgaaagcattatttgagagccagcgggctctagatattgagcgaaaactttttgcaaatgaaagatgcctccagctttcagaaagtgaaaatatgaaactgagagctaaactagatgaattgaaactaaaatatgaacctgaagagacagttgaagtgcctgtactgaaaaagaggcgtgaggtgctccctgtggatataaccaccgctaaagatgcatgtgtcaacaacagtgctctcgggggagaagtttatcgattaccgcctcagaaagaggagacacagtcctgccctaacagtttagaagataacaacttgcaattagaaaaatcagtttctatatacacaccagtagtcagtctctctcctcacaaaaatctgcccgtggatatgcagctgaagaaggaaaagaaatgtgtgaaactcataggagttcccgctgacgctgaggccttaagtgaaagaagtggaaacacccctaactctcccaggttagctgctgaatcaaagcttcaaacagaagttaaagaaggaaaagaaacttcaagcaaattggaaaaagaaacttgtaagaaattacaccctattctatatgtgtcttctaaatctactccagagacccagtgccctcaacagtaaagacttgtctttaataagagtacggtgccacttgcctcaaaagttactatggtgcttaagattgtcttgatctgacatatatcaccttctgggttatttactcattgtgccaggacctggcattttcatgtgcctttgaccaagtgttcagaatttgcttgactctaacctggagagcttcttaagtgatgccccttcatggagcttctatgacagtgaataaactattaattgaaggaaaatgttataattaatgtatctatttgctgcattgtatatggattaaatgataaaaaacaagtaatctaccctcagagccatgtatttgagaatgcttcaatcatattttcctatgtacttttttttataaacttagttttagactatgttgtaaaaatgggaaggttgtaaactatgttgtaaaaataggaaatgtggcttaaaatatatacattatattgtttcaggattttgtcagtgtttaaagaaccaatgttcatctttgtatttatatacatgatttaaattttgtctaaaattttaaataaaactgcagtgatttatccttaaa

SEQ ID NO: 185971 - DNA, 711 bp, Homo sapiens
  Payload ID: 16619
  Gene Symbol: SPDL1
  Gene Name: spindle apparatus coiled-coil protein 1
  ENST ID: ENST00000506574
  CDS Start-End: 452-711
atgcgcagtagctgtaggagggggtgggcgctccattgggcgtttctcttggtttttcctttccgcgcggcttgggcggacgtctcgtgagacgtgggacttctcgcgggaactgcattcaaatatcccaggcgcttactcgagagctagctgagcgaatgggccggcgactgtggagttagcgtcctcaatgtggacgccctgagctcccattaggagccgctggctgcggcagcaggggactagcgtgagagtttcatgagggaggagcttttttttcgtccattttgttccctaatgaatctgaactgcccagaatggaacctagtatataaggcattcaagaaatactcgttcagtgaatgactacattgacttgagacatgggggaacatcttgcaatgacctggtgccctttgaaggcaaagttggctaaaaaaaagaaaagaacatggaggcagatataatcacaaatcttcgatgcaggctcaaagaggctgaagaagagcgactaaaagctgcacagtatggtttacaactagtagagagtcaaaatgaattacagaatcaattggataaatgtcgtaatgaaatgatgaccatgactgagagttatgaacaagaaaaatatacccttcaaagagaagttgaactcaagagtcgaatgttagaaagtttgagctgcgaatgtgaagctattaaacaacaaca

SEQ ID NO: 185972 - DNA, 896 bp, Homo sapiens
  Payload ID: 16619
  Gene Symbol: SPDL1
  Gene Name: spindle apparatus coiled-coil protein 1
  ENST ID: ENST00000513941
  CDS Start-End: 206-896
tgagcgaatgggccggcgactgtggagttagcgtcctcaatgtggacgccctgagctcccattaggagccgctggctgcggcagcaggggactagcgtgagagggattctggacaaatatggaacgttgggtcggttgccgggtcctcaaaattataaccgccactggatctgcgctgtgcgttggctaaaaaaaagaaaagaacatggaggcagatataatcacaaatcttcgatgcaggctcaaagaggctgaagaagagcgactaaaagctgcacagtatggtttacaactagtagagagtcaaaatgaattacagaatcaattggataaatgtcgtaatgaaatgatgaccatgactgagagttatgaacaagaaaaatatacccttcaaagagaagttgaactcaagagtcgaatgttagaaagtttgagctgcgaatgtgaagctattaaacaacaacaaaaaatgcacctggagaaattggaagaacaactaagcagaagccatggacaggaagtgaatgaactaaaaactaagatagaaaaactgaaagtggaattagatgaagccaggcttagtgaaaagcagctgaagcaccaagtagatcatcagaaggaactcctctcttgtaaatcagaggaactgcgcgtaatgtctgaacgtgtgcaggaaagcatgtcttcagagatgctggctcttcaaattgagctgacagaaatggagagtatgaagaccaccctcaaagaagaagtgaatgaactacaatacagacaagaacagctagaacttcttattactaacctaatgcgccaggtagaccggcttaaagaggaaaaagaggagcgagagaaagaagcagtttcttactataatgccctagagaaagctcgtg

SEQ ID NO: 185973 - DNA, 552 bp, Homo sapiens
  Payload ID: 16619
  Gene Symbol: SPDL1
  Gene Name: spindle apparatus coiled-coil protein 1
  ENST ID: ENST00000515224
  CDS Start-End: 288-552
ctcgcgggaactgcattcaaatatcccaggcgcttactcgagagctagctgagcgaatgggccggcgactgtggagttagcgtcctcaatgtggacgccctgagctcccattaggagccgctggctgcggcagcaggggactagcgtgagagaatggaacctagtatataaggcattcaagaaatactcgttcagtgaatgactacattgacttgagacatgggggaacatcttgcaatgacctggtgccctttgaaggcaaagttggctaaaaaaaagaaaagaacatggaggcagatataatcacaaatcttcgatgcaggctcaaagaggctgaagaagagcgactaaaagctgcacagtatggtttacaactagtagagagtcaaaatgaattacagaatcaattggataaatgtcgtaatgaaatgatgaccatgactgagagttatgaacaagaaaaatatacccttcaaagagaagttgaactcaagagtcgaatgttagaaagtttgagctgcgaatgtgaagctattaaacaacaacaaaaaa

SEQ ID NO: 185974 - DNA, 2144 bp, Homo sapiens
  Payload ID: 16619
  Gene Symbol: SPDL1
  Gene Name: spindle apparatus coiled-coil protein 1
  ENST ID: ENST00000507232
  CDS Start-End: 164-298
gcattcaaatatcccaggcgcttactcgagagctagctgagcgaatgggccggcgactgtggagttagcgtcctcaatgtggacgccctgagctcccattaggagccgctggctgcggcagcaggggactagcgtgagagttggctaaaaaaaagaaaagaacatggaggcagatataatcacaaatcttcgatgcaggctcaaagaggctgaagaagagcgactaaaagctgcacaagttatgaacaagaaaaatatacccttcaaagagaagttgaactcaagagtcgaatgttagaaagtttgagctgcgaatgtgaagctattaaacaacaacaaaaaatgcacctggagaaattggaagaacaactaagcagaagccatggacaggaagtgaatgaactaaaaactaagatagaaaaactgaaagtggaattagatgaagccaggcttagtgaaaagcagctgaagcaccaagtagatcatcagaaggaactcctctcttgtaaatcagaggaactgcgcgtaatgtctgaacgtgtgcaggaaagcatgtcttcagagatgctggctcttcaaattgagctgacagaaatggagagtatgaagaccaccctcaaagaagaagtgaatgaactacaatacagacaagaacagctagaacttcttattactaacctaatgcgccaggtagaccggcttaaagaggaaaaagaggagcgagagaaagaagcagtttcttactataatgccctagagaaagctcgtgtagcaaatcaagatcttcaggtacagttggaccaggcactccagcaagccttggatcccaatagtaaaggcaactctttgtttgcagaggtggaagatcgaagggcagcaatggaacgtcagctcatcagtatgaaagtcaagtatcagtcactaaagaagcaaaatgtatttaacagagaacagatgcagagaatgaagttacaaattgccacgttgctacagatgaaagggtctcaaactgaatttgagcagcaggaacggttgcttgccatgttggagcagaagaatggtgaaataaaacatcttttaggtgaaattagaaatctggagaaatttaagaatttatatgacagtatggaatctaagccttcagtcgactctggtactctggaagataacacctattatacagatttacttcagatgaagctggataacttaaacaaagaaattgaaagcactaaaggtgaattgtccatacagcgaatgaaagcattatttgagagccagcgggctctagatattgagcgaaaactttttgcaaatgaaagatgcctccagctttcagaaagtgaaaatatgaaactgagagctaaactagatgaattgaaactaaaatatgaacctgaagagacagttgaagtgcctgtactgaaaaagaggcgtgaggtgctccctgtggatataaccaccgctaaagatgcatgtgtcaacaacagtgctctcgggggagaagtttatcgattaccgcctcagaaagaggagacacagtcctgccctaacagtttagaagataacaacttgcaattagaaaaatcagtttctatatacacaccagtagtcagtctctctcctcacaaaaatctgcccgtggatatgcagctgaagaaggaaaagaaatgtgtgaaactcataggagttcccgctgacgctgaggccttaagtgaaagaagtggaaacacccctaactctcccaggtcagtgtcctcttttcctccaggcagccagcagacctctccatctctcctctctcgctgcatgaactgtgctgtctgtttctttatctactttcttacaattgcatgcagtataattcctcagtttcatctacctaccttcaacttttccagaactttaagaaagactaaactgattgcaaagggaaaggactcttgaataaggcaatcacattaaaaagttacacgtttctgtttcatgaaagggaatatcacagtttaacacatctctgaatgttttatcagtttgaatacatgtactgttatttttctcctggttcaagcatggccatgaaagaaaaattaacttactttctcaaagggctttccagtagtctaagaaatttcagccttcta

SEQ ID NO: 185975 - DNA, 623 bp, Homo sapiens
  Payload ID: 16619
  Gene Symbol: SPDL1
  Gene Name: spindle apparatus coiled-coil protein 1
  ENST ID: ENST00000508247
  CDS Start-End: 175-623
atcccaggcgcttactcgagagctagctgagcgaatgggccggcgactgtggagttagcgtcctcaatgtggacgccctgagctcccattaggagccgctggctgcggcagcaggggactagcgtgagagttttatttcctctatttacagttggctaaaaaaaagaaaagaacatggaggcagatataatcacaaatcttcgatgcaggctcaaagaggctgaagaagagcgactaaaagctgcacagtatggtttacaactagtagagagtcaaaatgaattacagaatcaattggataaatgtcgtaatgaaatgatgaccatgactgagagttatgaacaagaaaaatatacccttcaaagagaagttgaactcaagagtcgaatgttagaaagtttgagctgcgaatgtgaagctattaaacaacaacaaaaaatgcacctggagaaattggaagaacaactaagcagaagccatggacaggaagtgaatgaactaaaaactaagatagaaaaactgaaagtggaattagatgaagccaggcttagtgaaaagcagctgaagcaccaagtagatcatcagaaggaactcctctcttgtaaatcagaggaactgcgcgt

SEQ ID NO: 185976 - DNA, 369 bp, Homo sapiens
  Payload ID: 16619
  Gene Symbol: SPDL1
  Gene Name: spindle apparatus coiled-coil protein 1
  ENST ID: ENST00000503871
  CDS Start-End: 1-68
aattggataaatgtcgtaatgaaatgatgaccatgactgagcagagattacttgacttgacgtgttgacataccatggagcacattttacttccttgacaaggcacagaagcagtaagagttatgaacaagaaaaatatacccttcaaagagaagttgaactcaagagtcgaatgttagaaagtttgagctgcgaatgtgaagctattaaacaacaacaaaaaatgcacctggagaaattggaagaacaactaagcagaagccatggacaggaagtgaatgaactaaaaactaagatagaaaaactgaaagtggaattagatgaagccaggcttagtgaaaagcagctgaagcaccaagtagatcatca

SEQ ID NO: 185977 - DNA, 667 bp, Homo sapiens
  Payload ID: 16619
  Gene Symbol: SPDL1
  Gene Name: spindle apparatus coiled-coil protein 1
  ENST ID: ENST00000512028
  CDS Start-End: 126-308
gagcgaatgggccggcgactgtggagttagcgtcctcaatgtggacgccctgagctcccattaggagccgctggctgcggcagcaggggactagcgtgagagttggctaaaaaaaagaaaagaacatggaggcagatataatcacaaatcttcgatgcaggctcaaagaggctgaagaagagcgactaaaagctgcacagtatggtttacaactagtagagagtcaaaatgaattacagaatcaattggataaatgtcgtaatgaaatgatgaccatgactgagagattacttgacttgacgtgttgacataccatggagcacattttacttccttgacaaggcacagaagcagtaagagttatgaacaagaaaaatatacccttcaaagagaagttgaactcaagagtcgaatgttagaaagtttgagctgcgaatgtgaagctattaaacaacaacaaaaaatgcacctggagaaattggaagaacaactaagcagaagccatggacaggaagtgaatgaactaaaaactaagatagaaaaactgaaagtggaattagatgaagccaggcttagtgaaaagcagctgaagcaccaagtagatcatcagaaggaactcctctcttgtaaatcagaggaactgcgcgtaatgtctgaacgtgtgcag

SEQ ID NO: 185978 - DNA, 559 bp, Homo sapiens
  Payload ID: 16619
  Gene Symbol: SPDL1
  Gene Name: spindle apparatus coiled-coil protein 1
  ENST ID: ENST00000509785
  CDS Start-End: 300-482
gagcgaatgggccggcgactgtggagttagcgtcctcaatgtggacgccctgagctcccattaggagccgctggctgcggcagcaggggactagcgtgagagtttcatgagggaggagcttttttttcgtccattttgttccctaatgaatctgaactgcccagaatggaacctagtatataaggcattcaagaaatactcgttcagtgaatgactacattgacttgagacatgggggaacatcttgcaatgacctggtgccctttgaaggcaaagttggctaaaaaaaagaaaagaacatggaggcagatataatcacaaatcttcgatgcaggctcaaagaggctgaagaagagcgactaaaagctgcacagtatggtttacaactagtagagagtcaaaatgaattacagaatcaattggataaatgtcgtaatgaaatgatgaccatgactgagagattacttgacttgacgtgttgacataccatggagcacattttacttccttgacaaggcacagaagcagtaagagttatgaacaagaaaaatataccctt

SEQ ID NO: 185979 - DNA, 637 bp, Homo sapiens
  Payload ID: 16619
  Gene Symbol: SPDL1
  Gene Name: spindle apparatus coiled-coil protein 1
  ENST ID: ENST00000513795
  CDS Start-End: 162-637
cttatacactgggttccgagccggtcttatcttccgctggaccacctcgccgccctcagggattctggacaaatatggaacgttgggtcggttgccgggtcctcaaaattataaccgccactggatctgcgctgtgcgttggctaaaaaaaagaaaagaacatggaggcagatataatcacaaatcttcgatgcaggctcaaagaggctgaagaagagcgactaaaagctgcacagtatggtttacaactagtagagagtcaaaatgaattacagaatcaattggataaatgtcgtaatgaaatgatgaccatgactgagagttatgaacaagaaaaatatacccttcaaagagaagttgaactcaagagtcgaatgttagaaagtttgagctgcgaatgtgaagctattaaacaacaacaaaaaatgcacctggagaaattggaagaacaactaagcagaagccatggacaggaagtgaatgaactaaaaactaagatagaaaaactgaaagtggaattagatgaagccaggcttagtgaaaagcagctgaagcaccaagtagatcatcagaaggaactcctctcttgtaaatcagaggaactgcgcgtaatgtctgaacgtgtgcaggaaagcat

SEQ ID NO: 185980 - DNA, 936 bp, Homo sapiens
  Payload ID: 16619
  Gene Symbol: SPDL1
  Gene Name: spindle apparatus coiled-coil protein 1
  ENST ID: ENST00000505977
  CDS Start-End: 1-936
gttagaaagtttgagctgcgaatgtgaagctattaaacaacaacaaaaaatgcacctggagaaattggaagaacaactaagcagaagccatggacaggaagtgaatgaactaaaaactaagatagaaaaactgaaagtggaattagatgaagccaggcttagtgaaaagcagctgaagcaccaagtagatcatcagaaggaactcctctcttgtaaatcagaggaactgcgcgtaatgtctgaacgtgtgcaggaaagcatgtcttcagagatgctggctcttcaaattgagctgacagaaatggagagtatgaagaccaccctcaaagaagaagtgaatgaactacaatacagacaagaacagctagaacttcttattactaacctaatgcgccaggtagaccggcttaaagaggaaaaagaggagcgagagaaagaagcagtttcttactataatgccctagagaaagctcgtgtagcaaatcaagatcttcaggtacagttggaccaggcactccagcaagccttggatcccaatagtaaaggcaactctttgtttgcagaggtggaagatcgaagggcagcaatggaacgtcagctcatcagtatgaaagtcaagtatcagtcactaaagaagcaaaatgtatttaacagagaacagatgcagagaatgaagatgaaagggtctcaaactgaatttgagcagcaggaacggttgcttgccatgttggagcagaagaatggtgaaataaaacatcttttaggtgaaattagaaatctggagaaatttaagaatttatatgacagtatggaatctaagccttcagtcgactctggtactctggaagataacacctattatacagatttacttcagatgaagctggataacttaaacaaagaaattgaaagcactaaaggtgaattgtccataca

SEQ ID NO: 185981 - DNA, 340 bp, Homo sapiens
  Payload ID: 16619
  Gene Symbol: SPDL1
  Gene Name: spindle apparatus coiled-coil protein 1
  ENST ID: ENST00000629457
  CDS Start-End: 158-340
aaatatcccaggcgcttactcgagagctagctgagcgaatgggccggcgactgtggagttagcgtcctcaatgtggacgccctgagctcccattaggagccgctggctgcggcagcaggggactagcgtgagagttggctaaaaaaaagaaaagaacatggaggcagatataatcacaaatcttcgatgcaggctcaaagaggctgaagaagagcgactaaaagctgcacagtatggtttacaactagtagagagtcaaaatgaattacagaatcaattggataaatgtcgtaatgaaatgatgaccatgactgagagattacttgacttgacgtgttga

SEQ ID NO: 185982 - DNA, 4484 bp, Homo sapiens
  Payload ID: 16620
  Gene Symbol: SPIN1
  Gene Name: spindlin 1
  Uniprot ID: Q9Y657
  ENST ID: ENST00000375859
  CDS Start-End: 279-1067
tccgcggcgagggagcgggggcggggaggcgccgtctggctcaggctggggccggcgggagcgcgaacgagcgacggcggaacccgtgggcctgtggactgcagcctcggcggtcagcagagtgcttgtgatttcacgtatttttgctgaactcgtaaaagagacacttggatggtggattaaccagaacactaacattctgtgaaaagtttcaaattggagaatattgaattttcaccctagtccagcagctccgctgctcacttaaatacagatgaatgaagaccccattcggaaagacacctggccagcggtccagagctgatgcaggccatgctggagtatctgccaacatgatgaagaagaggacatcccacaaaaaacatcggagcagtgtgggtccgagcaaacctgtttcccagccccggcggaacatcgtaggctgcaggattcagcatgggtggaaagaggggaatggccctgttacccagtggaaaggaaccgttctggaccaggtgcctgtaaatccttctttgtatcttataaaatacgatggatttgactgtgtttatggactagaacttaataaagatgaaagagtttctgcgcttgaagtcctccctgatagagttgcgacatctcgaatcagcgatgcacacttggcagacacaatgattggcaaagcagtggaacatatgtttgagacagaggatggttctaaagatgagtggaggggaatggtcttagcacgtgcacctgtcatgaacacatggttttacattacctatgagaaagaccctgtcttgtacatgtaccaactcttagatgattacaaagaaggcgaccttcgcattatgcctgattccaatgattcacctccagcagaaagggaaccaggagaagttgtggacagcctggtaggcaaacaagtggaatatgccaaagaagatggctcgaaaaggactggcatggtcattcatcaagtagaagccaagccctccgtctatttcatcaagtttgatgatgatttccatatttatgtctacgatttggtgaaaacatcctagatgtcatcacaaactctgccaaatttgtggaactatgaaatgtattatttgtagacataaagacttgattgctttccagtttaatgaaagcttaaatgtccctgcgaacccacaatctctgccagcagaactggttttgttctgaatagtacagattgatgtgaacacaaagcattttgtgtaaggagaacccctttcttttaaaagaagtctgtctatttcgaggggagttacaggcaagtttggtaaaagttaagctagtatcatagtcatttaaaattgtaatagatcttaaccattttccccctcaccctaactctcttattctgccgccacaatgcaagcatagtttgatgttttcgttattgccttttttgagatgtatgtatctgtatctacctatatctatatgtgtgtatacatatataatatatacacacagatacaagtgtacacacacacaccacacaccacacacaccccactggcagtctttgtggattaggatgggggtgacataattttcttgagtttaacaggagtgctttacccaagtcagtcatggatatgatatcactgctctttatttaaaagtaaactttgggcacaggaaccatatgggaacattcagcttgtttaaaaaaaaaaaatcagaagttcagagcaccttttcaatctggagcccttaaaccataagtccaaatatgaattatttgtgaacagttaatgacccatattagaattttacaatctggtgaacaatctgggtaaaaggctacctttaattctaagcttcatttttttttgggggggggttacattttaatcataaattcttttttgcaaagcccaggttcttgttccacacagtgtaatgtaggtgtattttggacagcacatatggtccattgtgtacaagtcagtaatctggatttcagtacatggatttaaaaggcaacaatccatcactggtttgtgtgtttttggttaagtttctggaagaatacaatgcttttatattggaagtataagttttgagtggcattgttgccttctaacaagctctctgggacttttaaagttttattactattattgctaatgtatgattatggtcagagactttcaacccaccccttcctgcctacccctggcttttcctcacaaagaatgtctagacaaacagcagcttagtctcctgacacctcttgtggggtgcatgttcctgctccaggtatgctgttcatgtggattcattccattcagtggccccttggggtttgcatgccagtgaagcgttaccatagaagagccagccgtttgtgttcgcttggtaggtgtaagtaatagcagcccttagccacggagtctttatgtggtttattcctgcaaggttgttttaaactgaaatagaactgctagtgtgattggttgatcagcaaaacagctgctctcattttgttttggaggaaccctggtggtttgacagccaggagaaaggccatatgtgaaaccagtctcttgtggagattggaaatcctccctgatatttgggcagagcctaaacgtgcatgcttgtcactcaaacaccagaagtttgaatcagaggtctgagtgacctcttttgtggctgttcttgatggtttccaggcctcgttatgcatggtttgcttgatgcccattttttgtgccttgtgctgttggatggtaacgaccactcaccatgtaaacacagtacctcagttttctgtccacagctgcagtcgctctgtccctcgtgcttcactgtgggcagccagggacaagcttctgaaagcagtgtgatacccaagtcataggtgcttctcgtatgtgaacaggtgtcattctacagatctgttatgtgttttcctgttgactcttaagagtccctgcatgtaaatctcaaagctgagcctggctcccagagtccagactgacattacagcgcaagagtttgcaagtgtgtccagcatgcaccaactgtgcagaacttggctcggtaactttgcgtggaaaaataaagtacattttgaagtatcttgagggttgggtcaattgagacatttctagcattacttaatgacttgcattgtggtttttctgcaagcaactttaatgactttttttataccacatggtctcccagtttctagatgaatgcaacatgatgatggtgatgatgacgatgagtttaatcattgttcatttattgcctttagggctgagggaaagggaaggtttgtttttttttctccccattttcccccattctgtctttcttttggtgacttacaccacatgtaatgacgctatgactaattctgctcccaagcccttgtatcttgggcttcattttaggctcatgtgtcagatctgcatgcattgcttgcatttttctggtatctgaatgttggttccttgttccaggaattcaacattaatttccaaaagtatcatgggacttgtgacaatacaagacatgaatctatgtataaaatttatcggcctttctcatttacctgctctagtattattgtattgtgtgtgcgtgcgtgtgtgatgtcaggctgccacgtaaaacttcagagaaaaatcttaaaagcagaccatccttttttgcatgctctattctaagtagaatgttcaatgtaactgactaaaattgcatgttaaagatatttaggtttttttgttttctttatttttatttgttttcagtttcctgtatatttgcttactgtgccgttttagtggttttaggataaaaatgcactggtgaagcaaatgtagtgccaacagaaggtgattttccagttgtaaatgtcatgcagcatttgaagggactgtgttttcttaaaaaaaaatcacagttacttctaaaccagatttcatttcttttattgttttatgtgccaaaccacgaagtgcattgggcttcaatctctgaacactgtagacccattagaagactgttccgattgttacaaattgtagtgcctgaaaacactcttaagctgattgtcttaacaaaatgaaagttctccaaagacaaaacagaacaattattataacaaaataattatggttgaaatgtctgtggttccttggaaatgctgcgctctttgtgtttttccatcattagtgcagttggaatgaatgtgtataggtcagaggtcttcgtgttcacattttaaaattaggtaaatgacctcatctttcaagcttgaattcatttttaattttaattttattttatacaatgtgtagacagttccctgttctctgcatttagaagtatacacaatataaatctgttaattctgtaagtaatttttataattatgatgtaactctatcttatccttaaaacatttaaaataaaccctttatgtgcaa

SEQ ID NO: 185983 - DNA, 1319 bp, Homo sapiens
  Payload ID: 16621
  Gene Symbol: SPIN2A
  Gene Name: spindlin family, member 2A
  Uniprot ID: Q99865
  ENST ID: ENST00000374906
  CDS Start-End: 372-1148
ggagcccaggaggggccccaagaaaagaaaggcagatctgctctgtgattagaatggaagacatcactactaagaggaaactaacactgtagtcttgtgcagaaaaagggcagagactacagccactgcatcagggactggtggcagcccaacgtggctgaggggtggccgccaccaacagggaggtagacggccagcgagcgaagcgctggggacaccgctgcagtgctctttgcctgtctcgccgcgctcctacacacgctcctcatctatggatcctaccctccccgctcttgcaagcagtcactcagcgagtcgcctgttgaccctccttcgccacaggctcacagcagaggcagcatcgagcaggcatgaagacccccaacgcacaggaagccgaagggcaacaaaccagggcagctgcaggacgggccactgggtctgcaaacatgacaaagaaaaaagtctcccaaaagaagcagagaggccgaccttcatcccagccccgcaggaacatcgtgggctgcagaatttctcatggatggaaggaaggagatgagcccatcacgcagtggaaaggaaccgttctggatcaggtgcctataaatccctctctttatctggtgaaatatgatggaattgactgtgtctatggactggaacttcacagagatgaaagggttttgtctcttaaaattctttctgacagggtggcatcatctcacattagtgatgccaaccttgcaaataccataattggcaaagcagtggaacacatgtttgagggagagcatggttctaaggatgaatggagggggatggtcttagctcaagcacctatcatgaaagcctggttttatattacctatgagaaagatcctgtcttgtacatgtaccagcttctagatgattataaggaaggtgacctccgcatcatgccagaatccagtgagtctcctccaacagagagggagccaggaggagttgtagatggcctaataggtaagcatgtggaatataccaaagaagatggctccaaaaggatcggcatggtcattcaccaagtggaaaccaaaccctctgtgtatttcatcaagtttgatgatgatttccatatctatgtctacgatttggtgaaaaagtcctaactgttagggtaaaatttggcacatgtgtggaaacaaatgtataatttgtagacatgcaaaaaatgttgcctttcagtgtactgaaagcttatggaatccctgataactaaacatctttgccagcattaactgttgttttgctctaaaaaatacaaatttgtgaatacatga

SEQ ID NO: 185984 - DNA, 2468 bp, Homo sapiens
  Payload ID: 16621
  Gene Symbol: SPIN2A
  Gene Name: spindlin family, member 2A
  Uniprot ID: Q99865
  ENST ID: ENST00000374908
  CDS Start-End: 401-1177
ggcagtgggggttacagacagcaccagaggcactcagggcaggagggtagtgggtgctggtcaaggccgctttgcaggggattgggagtggatgctagtggcagtaaagggtaaagggagggcagtgggctctgagctaggaggaggtggcccagccacttctgcagagttcctaaccccagacagctctactgcaccaccccagcccttccccacagcccaaaggaacttaagagggagagcactgcgggcatgcagccaggatttccagcattgcttccaggctcctaggggaaacttaggcactagcgcagactacatccagacatggctatagggaaaagtttgccttgtggcacactgggtgtgtctctctatcctctctcctcccccagcaggcatgaagacccccaacgcacaggaagccgaagggcaacaaaccagggcagctgcaggacgggccactgggtctgcaaacatgacaaagaaaaaagtctcccaaaagaagcagagaggccgaccttcatcccagccccgcaggaacatcgtgggctgcagaatttctcatggatggaaggaaggagatgagcccatcacgcagtggaaaggaaccgttctggatcaggtgcctataaatccctctctttatctggtgaaatatgatggaattgactgtgtctatggactggaacttcacagagatgaaagggttttgtctcttaaaattctttctgacagggtggcatcatctcacattagtgatgccaaccttgcaaataccataattggcaaagcagtggaacacatgtttgagggagagcatggttctaaggatgaatggagggggatggtcttagctcaagcacctatcatgaaagcctggttttatattacctatgagaaagatcctgtcttgtacatgtaccagcttctagatgattataaggaaggtgacctccgcatcatgccagaatccagtgagtctcctccaacagagagggagccaggaggagttgtagatggcctaataggtaagcatgtggaatataccaaagaagatggctccaaaaggatcggcatggtcattcaccaagtggaaaccaaaccctctgtgtatttcatcaagtttgatgatgatttccatatctatgtctacgatttggtgaaaaagtcctaactgttagggtaaaatttggcacatgtgtggaaacaaatgtataatttgtagacatgcaaaaaatgttgcctttcagtgtactgaaagcttatggaatccctgataactaaacatctttgccagcattaactgttgttttgctctaaaaaatacaaatttgtgaatacatgacatgctgtctgtaagccctttgtcttgttgaaaagttcgggtgtgtttggtagatggggcatggaaggaacgaacagctgtcaatttcggctgtgaataaagttcagctagaatcataatcagtcatttaaaaatggcactggatttagctggtctggtctggagggggcaggggaaggaacaagagattggctgtcttggggagagaggaggaggtgactgcttaggaagaggtggaaaagggccagaaagggaggggctccttgggggaggggatgacctatgagaaggaaacatccaactcagaaggaagactaacagagggagagtgagatcttggggcttagaggaaaatagaataaactgagtagagaggaacacaaagaagcttagaagagggtccagagtaaggtggagaaggatcaacctgacagggatctgggagaggctaaaggatacacaaaggaagaggctatgtgggttagggtgttggagggattagaagagggccactgaggaaggaggaattcaaagaagaaagactgacagagggagtgagaatacaggaaaagagttgtggggtatggggcccatgagagatcggaaggcccaggaaaatgttggacttctggtagtgtccacattgctcttcctggctctatgcacaaaggaagtggcaactgtcaaagatgccagatgcattggaggttcactagaagagcatgttgacaggaatgactcagtcaagttaatcaggagccaagtttatgcccataaggcttttcctgtttcagggagttaatgacacacttgtccagcagaaacccaatgctcagcctaaacacgctaacatggtgccccacatgtgctgggctgtgggctgcctcctcacatttgtcctgcgctagataagcaatcttggtagaggatgggttagtggggctctcagaacttaagagatgtgccatcttgcatttggaaagtactttatccagaaaaaatgaaatcttactgaactcaggtacagcagtctcatcactcctattccttctgctggaatgtttgttttctatctagagatgaggggcatcagaggactgagcctagtgtttctctcgag

SEQ ID NO: 185985 - DNA, 966 bp, Homo sapiens
  Payload ID: 16621
  Gene Symbol: SPIN2A
  Gene Name: spindlin family, member 2A
  ENST ID: ENST00000614076
  CDS Start-End: 322-795
aaaaagggcagagactacagccactgcatcagggactggtggcagcccaacgtggctgaggggtggccgccaccaacagggaggtagacggccagcgagcgaagcgctggggacaccgctgcagtgctctttgcctgtctcgccgcgctcctacacacgctcctcatctatggatcctaccctccccgctcttgcaagcagtcactcagcgagtcgcctgttgaccctccttcgccacaggctcacagcagaggcagcatcgaggtatccgatttcggcacgtgaggcccgcgatccccggcggtggacgccaggcagggcatgaagacccccaacgcacaggaagccgaagggcaacaaaccagggcagctgcaggacgggccactgggtctgcaaacatgacaaagaaaaaagtctcccaaaagaagcagagaggccgaccttcatcccagccccgcaggaacatcgtgggctgcagaatttctcatggatggaaggaaggagatgagcccatcacgcagtggaaaggaaccgttctggatcagcttctagatgattataaggaaggtgacctccgcatcatgccagaatccagtgagtctcctccaacagagagggagccaggaggagttgtagatggcctaataggtaagcatgtggaatataccaaagaagatggctccaaaaggatcggcatggtcattcaccaagtggaaaccaaaccctctgtgtatttcatcaagtttgatgatgatttccatatctatgtctacgatttggtgaaaaagtcctaactgttagggtaaaatttggcacatgtgtggaaacaaatgtataatttgtagacatgcaaaaaatgttgcctttcagtgtactgaaagcttatggaatccctgataactaaacatctttgccagcattaactgttgttttgctctaaaaaatacaaatttgtgaatacatga

SEQ ID NO: 185986 - DNA, 1152 bp, Homo sapiens
  Payload ID: 16622
  Gene Symbol: SPIN2B
  Gene Name: spindlin family, member 2B
  Uniprot ID: Q9BPZ2
  ENST ID: ENST00000275988
  CDS Start-End: 205-981
gccaccgccagcagggaggcggagggctagcgagccaagcggtggggacgccgctgccttcctctttgcctgtctcgccgccctcctagacacgctcctcatctacggatcctaccctccccgctcttgcaagcattcactcggccggtcgcctgctgaccctccttcgccacaggctcgtagcggaggcagcagcgagcaggcatgaagacccccaacgcacaggaagccgaagggcaacaaaccagggcagctgcaggacgggccactgggtctgcaaacatgacaaagaaaaaagtctcccaaaagaagcagagaggccgaccttcatcccagccccgcaggaacatcgtgggctgcagaatttctcatggatggaaggaaggagatgagcccatcacgcagtggaaaggaaccgttctggatcaggtgcctataaatccctctctttatctggtgaaatatgatggaattgactgtgtctatggactggaacttcacagagatgaaagggttttgtctcttaaaattctttctgacagggtggcatcatctcacattagtgatgccaaccttgcaaataccataattggcaaagcagtggaacatatgtttgagggagagcatggttctaaggatgaatggagggggatggtcttagctcaagcacctatcatgaaagcctggttttatattacctatgagaaagatcctgtcttgtacatgtaccagcttctagatgattataaggaaggtgacctccgcatcatgccagaatccagtgagtctcctccaacagagagggagccaggaggagttgtagatggcctaataggtaagcatgtggaatataccaaagaagatggctccaaaaggatcggcatggtcattcaccaagtggaagccaaaccctctgtgtatttcatcaagtttgatgatgatttccatatctatgtctacgatttggtgaaaaagtcctaactgttagggtaaaatttggcacatgtgtggaaacaaatgtataatttgtagacatgcaaaaaatgttgcctttcagtgtattgaaagcttatggaatccctgataactaaacatctttgccagcattaactgttgttttgctctaaaaaatacaaacttgtgtgtacatga

SEQ ID NO: 185987 - DNA, 1258 bp, Homo sapiens
  Payload ID: 16622
  Gene Symbol: SPIN2B
  Gene Name: spindlin family, member 2B
  Uniprot ID: Q9BPZ2
  ENST ID: ENST00000333933
  CDS Start-End: 312-1088
gagactgccgcggcgacagcagggactggtggaatcccgatgtggctgaggggccgccaccgccagcagggaggcggagggctagcgagccaagcggtggggacgccgctgccttcctctttgcctgtctcgccgccctcctagacacgctcctcatctacggatcctaccctccccgctcttgcaagcattcactcggccggtcgcctgctgaccctccttcgccacaggctcgtagcggaggcagcagcgaggtgtccgatttgggcacgtgaggcccgcgatccccggcggtggacgccaggcagggcatgaagacccccaacgcacaggaagccgaagggcaacaaaccagggcagctgcaggacgggccactgggtctgcaaacatgacaaagaaaaaagtctcccaaaagaagcagagaggccgaccttcatcccagccccgcaggaacatcgtgggctgcagaatttctcatggatggaaggaaggagatgagcccatcacgcagtggaaaggaaccgttctggatcaggtgcctataaatccctctctttatctggtgaaatatgatggaattgactgtgtctatggactggaacttcacagagatgaaagggttttgtctcttaaaattctttctgacagggtggcatcatctcacattagtgatgccaaccttgcaaataccataattggcaaagcagtggaacatatgtttgagggagagcatggttctaaggatgaatggagggggatggtcttagctcaagcacctatcatgaaagcctggttttatattacctatgagaaagatcctgtcttgtacatgtaccagcttctagatgattataaggaaggtgacctccgcatcatgccagaatccagtgagtctcctccaacagagagggagccaggaggagttgtagatggcctaataggtaagcatgtggaatataccaaagaagatggctccaaaaggatcggcatggtcattcaccaagtggaagccaaaccctctgtgtatttcatcaagtttgatgatgatttccatatctatgtctacgatttggtgaaaaagtcctaactgttagggtaaaatttggcacatgtgtggaaacaaatgtataatttgtagacatgcaaaaaatgttgcctttcagtgtattgaaagcttatggaatccctgataactaaacatctttgccagcattaactgttgttttgctctaaaaaatacaaacttgtgtgtacatg

SEQ ID NO: 185988 - DNA, 725 bp, Homo sapiens
  Payload ID: 16622
  Gene Symbol: SPIN2B
  Gene Name: spindlin family, member 2B
  ENST ID: ENST00000374910
  CDS Start-End: 81-554
ctcgtagcggaggcagcagcgaggtgtccgatttgggcacgtgaggcccgcgatccccggcggtggacgccaggcagggcatgaagacccccaacgcacaggaagccgaagggcaacaaaccagggcagctgcaggacgggccactgggtctgcaaacatgacaaagaaaaaagtctcccaaaagaagcagagaggccgaccttcatcccagccccgcaggaacatcgtgggctgcagaatttctcatggatggaaggaaggagatgagcccatcacgcagtggaaaggaaccgttctggatcagcttctagatgattataaggaaggtgacctccgcatcatgccagaatccagtgagtctcctccaacagagagggagccaggaggagttgtagatggcctaataggtaagcatgtggaatataccaaagaagatggctccaaaaggatcggcatggtcattcaccaagtggaagccaaaccctctgtgtatttcatcaagtttgatgatgatttccatatctatgtctacgatttggtgaaaaagtcctaactgttagggtaaaatttggcacatgtgtggaaacaaatgtataatttgtagacatgcaaaaaatgttgcctttcagtgtattgaaagcttatggaatccctgataactaaacatctttgccagcattaactgttgttttgctctaaaaaatacaaacttgtgtgtacatga

SEQ ID NO: 185989 - DNA, 1205 bp, Homo sapiens
  Payload ID: 16622
  Gene Symbol: SPIN2B
  Gene Name: spindlin family, member 2B
  Uniprot ID: Q9BPZ2
  ENST ID: ENST00000374912
  CDS Start-End: 258-1034
ggagactgccgcggcgacagcagggactggtggaatcccgatgtggctgaggggccgccaccgccagcagggaggcggagggctagcgagccaagcggtggggacgccgctgccttcctctttgcctgtctcgccgccctcctagacacgctcctcatctacggatcctaccctccccgctcttgcaagcattcactcggccggtcgcctgctgaccctccttcgccacaggctcgtagcggaggcagcagcgaggcatgaagacccccaacgcacaggaagccgaagggcaacaaaccagggcagctgcaggacgggccactgggtctgcaaacatgacaaagaaaaaagtctcccaaaagaagcagagaggccgaccttcatcccagccccgcaggaacatcgtgggctgcagaatttctcatggatggaaggaaggagatgagcccatcacgcagtggaaaggaaccgttctggatcaggtgcctataaatccctctctttatctggtgaaatatgatggaattgactgtgtctatggactggaacttcacagagatgaaagggttttgtctcttaaaattctttctgacagggtggcatcatctcacattagtgatgccaaccttgcaaataccataattggcaaagcagtggaacatatgtttgagggagagcatggttctaaggatgaatggagggggatggtcttagctcaagcacctatcatgaaagcctggttttatattacctatgagaaagatcctgtcttgtacatgtaccagcttctagatgattataaggaaggtgacctccgcatcatgccagaatccagtgagtctcctccaacagagagggagccaggaggagttgtagatggcctaataggtaagcatgtggaatataccaaagaagatggctccaaaaggatcggcatggtcattcaccaagtggaagccaaaccctctgtgtatttcatcaagtttgatgatgatttccatatctatgtctacgatttggtgaaaaagtcctaactgttagggtaaaatttggcacatgtgtggaaacaaatgtataatttgtagacatgcaaaaaatgttgcctttcagtgtattgaaagcttatggaatccctgataactaaacatctttgccagcattaactgttgttttgctctaaaaaatacaaacttgtgtgtacatga

SEQ ID NO: 185990 - DNA, 1050 bp, Homo sapiens
  Payload ID: 16622
  Gene Symbol: SPIN2B
  Gene Name: spindlin family, member 2B
  ENST ID: ENST00000434397
  CDS Start-End: 309-1050
actgccgcggcgacagcagggactggtggaatcccgatgtggctgaggggccgccaccgccagcagggaggcggagggctagcgagccaagcggtggggacgccgctgccttcctctttgcctgtctcgccgccctcctagacacgctcctcatctacggatcctaccctccccgctcttgcaagcattcactcggccggtcgcctgctgaccctccttcgccacaggctcgtagcggaggcagcagcgaggtgtccgatttgggcacgtgaggcccgcgatccccggcggtggacgccaggcagggcatgaagacccccaacgcacaggaagccgaagggcaacaaaccagggcagctgcaggacgggccactgggtctgcaaacatgacaaagaaaaaagtctcccaaaagaagcagagaggccgaccttcatcccagccccgcaggaacatcgtgggctgcagaatttctcatggatggaaggaaggagatgagcccatcacgcagtggaaaggaaccgttctggatcaggtgcctataaatccctctctttatctggtgaaatatgatggaattgactgtgtctatggactggaacttcacagagatgaaagggttttgtctcttaaaattctttctgacagggtggcatcatctcacattagtgatgccaaccttgcaaataccataattggcaaagcagtggaacatatgtttgagggagagcatggttctaaggatgaatggagggggatggtcttagctcaagcacctatcatgaaagcctggttttatattacctatgagaaagatcctgtcttgtacatgtaccagcttctagatgattataaggaaggtgacctccgcatcatgccagaatccagtgagtctcctccaacagagagggagccaggaggagttgtagatggcctaataggtaagcatgtggaatataccaaagaagatggctccaaaaggatcggcatggtcattcaccaagtggaagccaaaccctctgtgtatttcatcaagtttgatgatgatttcc

SEQ ID NO: 185991 - DNA, 1100 bp, Homo sapiens
  Payload ID: 16623
  Gene Symbol: SPIN3
  Gene Name: spindlin family, member 3
  Uniprot ID: Q5JUX0
  ENST ID: ENST00000374919
  CDS Start-End: 324-1100
tgcggcgcagcagcgactagtgggagtccgatgtgggagaggggctgcggccaccgccaccgccgccgccaccaggaaggcggaggacgcaggagccaagagcaagggacgccgccacggtcatcttcgcctgccccgccgccctcttagagacactcattgcctatggatcatcctctcccagcttttgcaagcaccgggctgctcgcccgctgattttcctcctccataggctcactgcggaggcaacggcgaggtgtccgatttgtgcacttgaggcccgcaatccgggacggtggggaatctgcgcctcctggccgggcatgaagaccccgtttggaaaggcagctgcagggcagcggtccaggacgggcgctggccacggcagtgtgtctgttaccatgataaagaggaaggctgcacacaagaagcataggagccgacccacctcccagcctcgggggaacatcgtgggctgcagaattcagcacggatggaaagatggagatgaacctctaacacagtggaaaggaaccgttctggatcaggtacctgtaaatccctctctgtatcttatcaaatatgatggatttgactgtgtttatggattggaacttcacagagatgaaagagtgtcatcacttgaagtccttcctaatagagttgcatcatctagaatcagtgatacacacttggcagaaataatggttggcaaagcagtggaacatatttttgagacagaggaaggttccaaaaatgaatggagggggatggtcttagctcaggcacctgtcatgaacacatggttttacattacctatgagaaagatcctgtattatatatgtaccagctcttagatgattataaagatggtgacctccgcatccttcaagattccaatgattctcctctggcagagagggagccaggagaagtcatagacagcctggtaggcaaacaggtggaatacgccaaagacgatggctccaagagaactggcatggtcattcatcaggtagaagcaaaaccctctgtgtacttcatcaaatttgatgatgatttccatatctatgtctacgatttggtaaaaacatcttag

SEQ ID NO: 185992 - DNA, 1620 bp, Homo sapiens
  Payload ID: 16623
  Gene Symbol: SPIN3
  Gene Name: spindlin family, member 3
  Uniprot ID: Q5JUX0
  ENST ID: ENST00000478405
  CDS Start-End: 287-520
agcgactagtgggagtccgatgtgggagaggggctgcggccaccgccaccgccgccgccaccaggaaggcggaggacgcaggagccaagagcaagggacgccgccacggtcatcttcgcctgccccgccgccctcttagagacactcattgcctatggatcatcctctcccagcttttgcaagcaccgggctgctcgcccgctgattttcctcctccataggctcactgcggaggcaacggcgaggtgtccgatttgtgcacttgaggcccgcaatccgggacggcatgaagaccccgtttggaaaggcagctgcagggcagcggtccaggacgggcgctggccacggcagtgtgtctgttaccatgataaagaggaaggctgcacacaagaagcataggagccgacccacctcccagcctcgggggaacatcgtgggctgcagaattcagcacggatggaaagatggagatgaacctctaacacagtggaaaggaaccgttctggatcagctcctttgaataaacctgcccaccaccaagaacccatacatgactttcttttcattgtatcaaagtaatgtgtccaccggtgtgagcaccagcaactcacttcttcctcagacatctctaaagctggaaagattttgagggacaatatggtttccttcaccccacaccaatgttatgaatgagaccagcagaccaacagcaaacacctagaaggaacagctgttcttcatgggtgactgctgtgaaaccaacaggatggcctcttttctatttaatcctaagagtgggcataaggtaaaatattgggtaggtcctttggagttctagactcagtttgagattacagaagatatgctcaacatcctcctttgacctggtcccagtttcaccatatttgctagatgctttatagtctctggtaaggaggtgtacaattctctgattttatttcagtttttagggaattttattttgttcatttcaacaagaaaaattacataaacaggtaacagctccactcaaagctgttttaaatgaacaaaatattggactttgtgaacaaatatgatactttttctttctgcaattattggctagcaatcttattttactaaatctatactgacaaatttaatttggtccatttatttgagtttaaagactatttcaaactctccccagtgaaacagtcatgggccattgctatcctcaaaagaactaaatatataaatagcagctttcctcaaaaaagatgataaagtcttcttttccctttagagcataaatttcagtggcaggtaaaactattttagcaacaatatgctcacttcttccatgatatgtttttcttccctactaagttgaaagtttttctcagtttccatagccactcacaagtttttctctacctaactgaagttgccctcttctgctggtcattaggacattaacttttagaatgatttctgtttcagcctcttgttttgaaggcaggcttttaatttcctcagagaaattgcaatggaacgaaaatttgttctctcttttacatatgtacacttgtataagagatgtaatgtttttaaataaaatttttaattcatgcaaaa

SEQ ID NO: 185993 - DNA, 1670 bp, Homo sapiens
  Payload ID: 16623
  Gene Symbol: SPIN3
  Gene Name: spindlin family, member 3
  Uniprot ID: Q5JUX0
  ENST ID: ENST00000475785
  CDS Start-End: 325-558
ctgcggcgcagcagcgactagtgggagtccgatgtgggagaggggctgcggccaccgccaccgccgccgccaccaggaaggcggaggacgcaggagccaagagcaagggacgccgccacggtcatcttcgcctgccccgccgccctcttagagacactcattgcctatggatcatcctctcccagcttttgcaagcaccgggctgctcgcccgctgattttcctcctccataggctcactgcggaggcaacggcgaggtgtccgatttgtgcacttgaggcccgcaatccgggacggtggggaatctgcgcctcctggccgggcatgaagaccccgtttggaaaggcagctgcagggcagcggtccaggacgggcgctggccacggcagtgtgtctgttaccatgataaagaggaaggctgcacacaagaagcataggagccgacccacctcccagcctcgggggaacatcgtgggctgcagaattcagcacggatggaaagatggagatgaacctctaacacagtggaaaggaaccgttctggatcagctcctttgaataaacctgcccaccaccaagaacccatacatgactttcttttcattgtatcaaagtaatgtgtccaccggtgtgagcaccagcaactcacttcttcctcagacatctctaaagctggaaagattttgagggacaatatggtttccttcaccccacaccaatgttatgaatgagaccagcagaccaacagcaaacacctagaaggaacagctgttcttcatgggtgactgctgtgaaaccaacaggatggcctcttttctatttaatcctaagagtgggcataaggtaaaatattgggtaggtcctttggagttctagactcagtttgagattacagaagatatgctcaacatcctcctttgacctggtcccagtttcaccatatttgctagatgctttatagtctctggtaaggaggtgtacaattctctgattttatttcagtttttagggaattttattttgttcatttcaacaagaaaaattacataaacaggtaacagctccactcaaagctgttttaaatgaacaaaatattggactttgtgaacaaatatgatactttttctttctgcaattattggctagcaatcttattttactaaatctatactgacaaatttaatttggtccatttatttgagtttaaagactatttcaaactctccccagtgaaacagtcatgggccattgctatcctcaaaagaactaaatatataaatagcagctttcctcaaaaaagatgataaagtcttcttttccctttagagcataaatttcagtggcaggtaaaactattttagcaacaatatgctcacttcttccatgatatgtttttcttccctactaagttgaaagtttttctcagtttccatagccactcacaagtttttctctacctaactgaagttgccctcttctgctggtcattaggacattaacttttagaatgatttctgtttcagcctcttgttttgaaggcaggcttttaatttcctcagagaaattgcaatggaacgaaaatttgttctctcttttacatatgtacacttgtataagagatgtaatgtttttaaataaaatttttaattcatgcaaaagcatgtctctaa

SEQ ID NO: 185994 - DNA, 4112 bp, Homo sapiens
  Payload ID: 16624
  Gene Symbol: SPIN4
  Gene Name: spindlin family, member 4
  Uniprot ID: Q56A73
  ENST ID: ENST00000335144
  CDS Start-End: 521-1270
ggtcgccagagtgaagccaagccagctagcgctgcgaagcccaggccgcgcggactccccagagacttgccgccgcctgcgcctttgccgctgcagccatccctcttactccttgcctttcgtccccgtcgtctcctctgccgccgtgccgcagccgcaccagcatcgacaacagctaagtggccgattcggggacttggggtcggggttggggcggacgcaaggcacgaacagcactcgcgagcccgccatctctacgtcagccgccactgctgcagtaacccttctagggcgagagaggaaagcactgtggagaggcacacgctgtcccagtgctcacggttagagttcgagcgtttctgccaaaaccttggtgagagccttgcacttggagaagggagcacagaccaggtctttgagatcgcaaaaaatatatatatcatattgcatagtgttgactttttgtcagtttaatcgaccagggcagcagctttccccaagccctcttaatccctgagctatgtctcctccaaccgtgcctccgatgggggtagatggcgtgtccgcatacctgatgaagaaaaggcacacccacaggaagcaacggcgcaagcccactttcctcactcgtaggaacatcgtgggctgccgcattcaacacggctggaaggaaggcaacgagccagtggagcagtggaagggtactgtgctcgagcaggtttccgtgaagcccactctttacatcattaaatatgatggcaaagatagtgtgtatggactagaactgcaccgcgataagagagttttagcgctagagatccttcctgagagagtgccaactcctcgtatcgattcacgactggcagattccctgattggcaaggcagtggagcatgtgtttgaaggtgaacatggtaccaaggatgaatggaagggtatggtcctggcgcgagctcctgtgatggatacttggttttacatcacctacgagaaagatcctgttctctatatgtacacgctgcttgatgactacaaagatggtgacttacgcattattccagattccaactactatttccctacagcagaacaggagcctggagaggtggtcgacagtctcgtgggcaagcaggtggagcatgccaaagatgacgggtccaagagaactggcatttttatacatcaagtggtggcgaagccatctgtttacttcattaagtttgatgatgatattcacatttatgtctatggtttggtgaaaactccttaaattctttgtgctctttagagaagttgtggatctgttagatgtgaattattttgtgttctcgtagttgtgaacgcagagaagagtttaggtgtcagaaattcaggaaagtggataaattttattgtgccaacaaatcttaccttgactagtttcacaattttgcctcaagtgtactttgctacttttgatattgccttgttctgtaacttaacagttaaattgggtgctaatagaaaattaaaaagtgtttgcaaccattggaacaatgcaaaaatagattaagaaaaattaatggtgtaaacccacaccccgtccttaccccttcctttccttaccttgtttcttcccagaaaacaagtgttgaggatgcgaagtacatccttccacctattttccccatcttcatgcagaaagtatgttctagtagtttctgtaaaaatggcaagccacatgcttttctcacttgacatgtagatgatatctcttcttatcagtagcttcagtctttcttgctctctctggctctctctggccctcactcttactctcttgcactcttgctctccccctccctcccttactctaacagctgaatacacagtacttgttgatgtaccaaaaaggcattcaaccatttcgttattgatcgtcttttatttcctttttttattttttttcaaaataacactgctgtaatacatactggtgcttttatttatataggttggattcccagaaatactatgtaggcatatgtttcagaaatattacaagattactatccaaaatgaaagcgcccgttccagcgtcctctccagcactctttaatgcttgaaaatatgaaaggctaaaaattgcattgtattgcttgttagtttaattgccttttgtctgagttcaaagaggtttgttgttgttgctgtccttgtttctgtttggatttttctctgatttgcctgttcttaccctttgctcatgtatctattgatgtttttcattataaatttgtagaaattcttactacatagtgcatattaatcatttgtagctctaatgtgttatgacgttttcatcttgactttattgatgatatattttcctttaaaatttttaaactttttaggtagacccttatctcttttatagattttggtttcctttttttatcacatggatgcccccacccaaagtcatacaaatattcacctacattttcttctaataactttattatttttaatgtttaaatgtttgatccatctgaaatttatttttgtatatggtgtaagatggggatccagctataacattttgttcacattggatacctgattgtgacatttatttaaaatgttacccattttcaaatttctgagccaatatcatgatttaattatagtggcttcatcgtaagttttagaatccgataaagcaagtcccacttcattagttttttttttctttatataatatgtcctagacattcattttttcatgtgaaaaaatgaaatgcagaattttaataaaattctaattatgatggctgacatcacaattaaaatcctgcatttttgtttagagggctctttaataatattaaatcttagcactcaagagtcttcgtacatcattgaaatcttttggtcttgttattggaatattcttcacgtaagtatatcatagctaactgaatttatttctaagtatttttacagttttatttcatattttgacattgtgaattggtttttttcttctcatttgtaattagctatttttgacaatatagacaacctatagatttttgtatttttatcttctgtctaatgagcttatttaatcattgaaattacagtagatttttaagaatataatattttgggttttctagatatgaaattatttcacctgaacatatagatcattttatttcctcttaatgtttatactgattactgttacattagctggatttttcaaaacaatgttgaagagtgatgacagacgtgactgtcttgttcttaattttcatggaagtaagaatgcaaaatattaatagggaatagtattccctattagtatgacatttacttttggttattagtaggtagtcattaacatgtttaagagtttccgctattcctgttttatagtgttattgctagaagtggttcctgaattttataaaatgccttttcagcatctattgataaaattgtatgattttttttctctttaatttgttgatgtaatgaattagaatggtaggcatttgatgtggaaccaaacttgtatttctggaacaaatactacttggtcattgtgaaataatgatttgctacatgagtggattttatttaccagtatttaatttagaattattgcattttcattccaaagtaaaattgtattttgtccttctgatgctatctttatcaagttttgttattgaagttgtgctagctttaaaaaaatatgaatatgtgagttttcaatttttttcctgtggtctggaataatttaaatagcattagaattatttgtttgttaaaagttagctaggacaaagtgtaaaacaatctaatcctgatgacacttttaatagtagatttttaatcagctttgtgatttctttaatagttattggtttattcaggctttttattaaaaaggtatatacattctctgtgacatacaaagttaaaagttctctattattgctgattgtactggttgttgcttgttgactgtactattcagatggctttatgcttttgtgtattttatgtcacctagatctaattctgaaaacattgtaataaaataattagctataatggta

SEQ ID NO: 185995 - DNA, 4117 bp, Homo sapiens
  Payload ID: 16624
  Gene Symbol: SPIN4
  Gene Name: spindlin family, member 4
  ENST ID: ENST00000374884
  CDS Start-End: 580-1275
gacccggtcgccagagtgaagccaagccagctagcgctgcgaagcccaggccgcgcggactccccagagacttgccgccgcctgcgcctttgccgctgcagccatccctcttactccttgcctttcgtccccgtcgtctcctctgccgccgtgccgcagccgcaccagcatcgacaacagctaagtggccgattcggggacttggggtcggggttggggcggacgcaaggcacgaacagcactcgcgagcccgccatctctacgtcagccgccactgctgcagtaacccttctagggcgagagaggaaagcactgtggagaggcacacgctgtcccagtgctcacggttagagttcgagcgtttctgccaaaaccttggtgagagccttgcacttggagaagggagcacagaccaggtctttgagatcgcaaaaaatatatatatcatattgcatagtgttgactttttgtcagtttaatcgaccagggcagcagctttccccaagccctcttaatccctgagctatgtctcctccaaccgtgcctccgatgggggtagatggcgtgtccgcatacctgatgaagaaaaggcacacccacaggaagcaacggcgcaagcccactttcctcactcgtaggaacatcgtgggctgccgcattcaacacggctggaaggaaggcaacgagccagtggagcagtggaagggtactgtgctcgagcaggtttccgtgaagcccactctttacatcattaaatatgatggcaaagatagtgtgtatggactagaactgcaccgcgataagagagttttagcgctagagatccttcctgagagagtgccaactcctcgtatcgattcacgactggcagattccctgattggcaaggcagtggagcatgtgtttgaaggtgaacatggtaccaaggatgaatggaagggtatggtcctggcgcgagctcctgtgatggatacttggttttacatcacctacgagaaagatcctgttctctatatgtacacgctgcttgatgactacaaagatggtgacttacgcattattccagattccaactactatttccctacagcagaacaggagcctggagaggtggtcgacagtctcgtgggcaagcaggtggagcatgccaaagatgacgggtccaagagaactggcatttttatacatcaagtggtggcgaagccatctgtttacttcattaagtttgatgatgatattcacatttatgtctatggtttggtgaaaactccttaaattctttgtgctctttagagaagttgtggatctgttagatgtgaattattttgtgttctcgtagttgtgaacgcagagaagagtttaggtgtcagaaattcaggaaagtggataaattttattgtgccaacaaatcttaccttgactagtttcacaattttgcctcaagtgtactttgctacttttgatattgccttgttctgtaacttaacagttaaattgggtgctaatagaaaattaaaaagtgtttgcaaccattggaacaatgcaaaaatagattaagaaaaattaatggtgtaaacccacaccccgtccttaccccttcctttccttaccttgtttcttcccagaaaacaagtgttgaggatgcgaagtacatccttccacctattttccccatcttcatgcagaaagtatgttctagtagtttctgtaaaaatggcaagccacatgcttttctcacttgacatgtagatgatatctcttcttatcagtagcttcagtctttcttgctctctctggctctctctggccctcactcttactctcttgcactcttgctctccccctccctcccttactctaacagctgaatacacagtacttgttgatgtaccaaaaaggcattcaaccatttcgttattgatcgtcttttatttcctttttttattttttttcaaaataacactgctgtaatacatactggtgcttttatttatataggttggattcccagaaatactatgtaggcatatgtttcagaaatattacaagattactatccaaaatgaaagcgcccgttccagcgtcctctccagcactctttaatgcttgaaaatatgaaaggctaaaaattgcattgtattgcttgttagtttaattgccttttgtctgagttcaaagaggtttgttgttgttgctgtccttgtttctgtttggatttttctctgatttgcctgttcttaccctttgctcatgtatctattgatgtttttcattataaatttgtagaaattcttactacatagtgcatattaatcatttgtagctctaatgtgttatgacgttttcatcttgactttattgatgatatattttcctttaaaatttttaaactttttaggtagacccttatctcttttatagattttggtttcctttttttatcacatggatgcccccacccaaagtcatacaaatattcacctacattttcttctaataactttattatttttaatgtttaaatgtttgatccatctgaaatttatttttgtatatggtgtaagatggggatccagctataacattttgttcacattggatacctgattgtgacatttatttaaaatgttacccattttcaaatttctgagccaatatcatgatttaattatagtggcttcatcgtaagttttagaatccgataaagcaagtcccacttcattagttttttttttctttatataatatgtcctagacattcattttttcatgtgaaaaaatgaaatgcagaattttaataaaattctaattatgatggctgacatcacaattaaaatcctgcatttttgtttagagggctctttaataatattaaatcttagcactcaagagtcttcgtacatcattgaaatcttttggtcttgttattggaatattcttcacgtaagtatatcatagctaactgaatttatttctaagtatttttacagttttatttcatattttgacattgtgaattggtttttttcttctcatttgtaattagctatttttgacaatatagacaacctatagatttttgtatttttatcttctgtctaatgagcttatttaatcattgaaattacagtagatttttaagaatataatattttgggttttctagatatgaaattatttcacctgaacatatagatcattttatttcctcttaatgtttatactgattactgttacattagctggatttttcaaaacaatgttgaagagtgatgacagacgtgactgtcttgttcttaattttcatggaagtaagaatgcaaaatattaatagggaatagtattccctattagtatgacatttacttttggttattagtaggtagtcattaacatgtttaagagtttccgctattcctgttttatagtgttattgctagaagtggttcctgaattttataaaatgccttttcagcatctattgataaaattgtatgattttttttctctttaatttgttgatgtaatgaattagaatggtaggcatttgatgtggaaccaaacttgtatttctggaacaaatactacttggtcattgtgaaataatgatttgctacatgagtggattttatttaccagtatttaatttagaattattgcattttcattccaaagtaaaattgtattttgtccttctgatgctatctttatcaagttttgttattgaagttgtgctagctttaaaaaaatatgaatatgtgagttttcaatttttttcctgtggtctggaataatttaaatagcattagaattatttgtttgttaaaagttagctaggacaaagtgtaaaacaatctaatcctgatgacacttttaatagtagatttttaatcagctttgtgatttctttaatagttattggtttattcaggctttttattaaaaaggtatatacattctctgtgacatacaaagttaaaagttctctattattgctgattgtactggttgttgcttgttgactgtactattcagatggctttatgcttttgtgtattttatgtcacctagatctaattctgaaaacattgtaataaaataattagctataatggta

SEQ ID NO: 185996 - DNA, 1948 bp, Homo sapiens
  Payload ID: 16625
  Gene Symbol: SPNS1
  Gene Name: spinster homolog 1 (Drosophila)
  Uniprot ID: Q9H2V7
  ENST ID: ENST00000352260
  CDS Start-End: 340-1704
ggtgcagcgcccgggctgagcgacagcaagtgcagcgggctcctaccccgggtgaggggtggcctccgcgtgggatcgtgccctcttcagcccgctcctgtccccgacatcacgtgtattccgcacgtcccctccgcgctgtgtgtctactgagacggggaggcgtgacagggcccgggtcccttctcagtggtgctctgtgcttcagggcaagctccccgtctccgggcgcacttccctcgcctgtgttcggtccatcctcctttctccagcctcctcccctcgcaggtgggatcgtcggtgggaccggagcgcgggcgggcgcggccccccgggaccatggccgggtccgacaccgcgcccttcctcagccaggcggatgacccggacgacgggccagtgcctggcaccccggggttgccagggtccacggggaacccgaagtccgaggagcccgaggtcccggaccaggaggggctgcagcgcatcaccggcctgtctcccggccgttcggctctcatagtggcggtgctgtgctacatcaatctcctgaactacatggaccgcttcaccgtggctgtgttcatctccagttacatggtgttggcacctgtgtttggctacctgggtgacaggtacaatcggaagtatctcatgtgcgggggcattgccttctggtccctggtgacactggggtcatccttcatccccggagagcatttctggctgctcctcctgacccggggcctggtgggggtcggggaggccagttattccaccatcgcgcccactctcattgccgacctctttgtggccgaccagcggagccggatgctcagcatcttctactttgccattccggtgggcagtggtctgggctacattgcaggctccaaagtgaaggatatggctggagactggcactgggctctgagggtgacaccgggtctaggagtggtggccgttctgctgctgttcctggtagtgcgggagccgccaaggggagccgtggagcgccactcagatttgccacccctgaaccccacctcgtggtgggcagatctgagggctctggcaagaaatctcatctttggactcatcacctgcctgaccggagtcctgggtgtgggcctgggtgtggagatcagccgccggctccgccactccaacccccgggctgatcccctggtctgtgccactggcctcctgggctctgcacccttcctcttcctgtcccttgcctgcgcccgtggtagcatcgtggccacttatattttcatcttcattggagagaccctcctgtccatgaactgggccatcgtggccgacattctgctgtacgtggtgatccctacccgacgctccaccgccgaggccttccagatcgtgctgtcccacctgctgggtgatgctgggagcccctacctcattggcctgatctctgaccgcctgcgccggaactggcccccctccttcttgtccgagttccgggctctgcagttctcgctcatgctctgcgcgtttgttggggcactgggcggcgcagccttcctgggcaccgccatcttcattgaggccgaccgccggcgggcacagctgcacgtgcagggcctgctgcacgaagcagggtccacagacgaccggattgtggtgccccagcggggccgctccacccgcgtgcccgtggccagtgtgctcatctgagaggctgccgctcacctacctgcacatctgccacagctggccctgggcccaccccacgaagggcctgggcctaaccccttggcctggcccagcttccagagggaccctgggccgtgtgccagctcccagacactacctgggtagctcaggggaggaggtgggggtccaggagggggatccctctccacaggggcagccccaagggctcggtgctatttgtaacggaataaaatttgtagccaga

SEQ ID NO: 185997 - DNA, 2208 bp, Homo sapiens
  Payload ID: 16625
  Gene Symbol: SPNS1
  Gene Name: spinster homolog 1 (Drosophila)
  Uniprot ID: Q9H2V7
  ENST ID: ENST00000311008
  CDS Start-End: 378-1964
gtcacatgaccggctttaagcaacatggcggctgccgtggtgcagcgcccgggctgagcgacagcaagtgcagcgggctcctaccccgggtgaggggtggcctccgcgtgggatcgtgccctcttcagcccgctcctgtccccgacatcacgtgtattccgcacgtcccctccgcgctgtgtgtctactgagacggggaggcgtgacagggcccgggtcccttctcagtggtgctctgtgcttcagggcaagctccccgtctccgggcgcacttccctcgcctgtgttcggtccatcctcctttctccagcctcctcccctcgcaggtgggatcgtcggtgggaccggagcgcgggcgggcgcggccccccgggaccatggccgggtccgacaccgcgcccttcctcagccaggcggatgacccggacgacgggccagtgcctggcaccccggggttgccagggtccacggggaacccgaagtccgaggagcccgaggtcccggaccaggaggggctgcagcgcatcaccggcctgtctcccggccgttcggctctcatagtggcggtgctgtgctacatcaatctcctgaactacatggaccgcttcaccgtggctggcgtccttcccgacatcgagcagttcttcaacatcggggacagtagctctgggctcatccagaccgtgttcatctccagttacatggtgttggcacctgtgtttggctacctgggtgacaggtacaatcggaagtatctcatgtgcgggggcattgccttctggtccctggtgacactggggtcatccttcatccccggagagcatttctggctgctcctcctgacccggggcctggtgggggtcggggaggccagttattccaccatcgcgcccactctcattgccgacctctttgtggccgaccagcggagccggatgctcagcatcttctactttgccattccggtgggcagtggtctgggctacattgcaggctccaaagtgaaggatatggctggagactggcactgggctctgagggtgacaccgggtctaggagtggtggccgttctgctgctgttcctggtagtgcgggagccgccaaggggagccgtggagcgccactcagatttgccacccctgaaccccacctcgtggtgggcagatctgagggctctggcaagaaatcctagtttcgtcctgtcttccctgggcttcactgctgtggcctttgtcacgggctccctggctctgtgggctccggcattcctgctgcgttcccgcgtggtccttggggagaccccaccctgccttcccggagactcctgctcttcctctgacagtctcatctttggactcatcacctgcctgaccggagtcctgggtgtgggcctgggtgtggagatcagccgccggctccgccactccaacccccgggctgatcccctggtctgtgccactggcctcctgggctctgcacccttcctcttcctgtcccttgcctgcgcccgtggtagcatcgtggccacttatattttcatcttcattggagagaccctcctgtccatgaactgggccatcgtggccgacattctgctgtacgtggtgatccctacccgacgctccaccgccgaggccttccagatcgtgctgtcccacctgctgggtgatgctgggagcccctacctcattggcctgatctctgaccgcctgcgccggaactggcccccctccttcttgtccgagttccgggctctgcagttctcgctcatgctctgcgcgtttgttggggcactgggcggcgcagccttcctgggcaccgccatcttcattgaggccgaccgccggcgggcacagctgcacgtgcagggcctgctgcacgaagcagggtccacagacgaccggattgtggtgccccagcggggccgctccacccgcgtgcccgtggccagtgtgctcatctgagaggctgccgctcacctacctgcacatctgccacagctggccctgggcccaccccacgaagggcctgggcctaaccccttggcctggcccagcttccagagggaccctgggccgtgtgccagctcccagacactacctgggtagctcaggggaggaggtgggggtccaggagggggatccctctccacaggggcagccccaagggctcggtgctatttgtaacggaataaaatttgtagccaga

SEQ ID NO: 185998 - DNA, 2102 bp, Homo sapiens
  Payload ID: 16625
  Gene Symbol: SPNS1
  Gene Name: spinster homolog 1 (Drosophila)
  Uniprot ID: Q9H2V7
  ENST ID: ENST00000323081
  CDS Start-End: 491-1858
gcaacatggcggctgccgtggtgcagcgcccgggctgagcgacagcaagtgcagcgggctcctaccccgggtgaggggtggcctccgcgtgggatcgtgccctcttcagcccgctcctgtccccgacatcacgtgtattccgcacgtcccctccgcgctgtgtgtctactgagacggggaggcgtgacagggcccgggtcccttctcagtggtgctctgtgcttcagggcaagctccccgtctccgggcgcacttccctcgcctgtgttcggtccatcctcctttctccagcctcctcccctcgcaggcggatgacccggacgacgggccagtgcctggcaccccggggttgccagggtccacggggaacccgaagtccgaggagcccgaggtcccggaccaggaggggctgcagcgcatcaccggcctgtctcccggccgttcggctctcatagtggcggtgctgtgctacatcaatctcctgaactacatggaccgcttcaccgtggctggcgtccttcccgacatcgagcagttcttcaacatcggggacagtagctctgggctcatccagaccgtgttcatctccagttacatggtgttggcacctgtgtttggctacctgggtgacaggtacaatcggaagtatctcatgtgcgggggcattgccttctggtccctggtgacactggggtcatccttcatccccggagagcatttctggctgctcctcctgacccggggcctggtgggggtcggggaggccagttattccaccatcgcgcccactctcattgccgacctctttgtggccgaccagcggagccggatgctcagcatcttctactttgccattccggtgggcagtggtctgggctacattgcaggctccaaagtgaaggatatggctggagactggcactgggctctgagggtgacaccgggtctaggagtggtggccgttctgctgctgttcctggtagtgcgggagccgccaaggggagccgtggagcgccactcagatttgccacccctgaaccccacctcgtggtgggcagatctgagggctctggcaagaaatcctagtttcgtcctgtcttccctgggcttcactgctgtggcctttgtcacgggctccctggctctgtgggctccggcattcctgctgcgttcccgcgtggtccttggggagaccccaccctgccttcccggagactcctgctcttcctctgacagtctcatctttggactcatcacctgcctgaccggagtcctgggtgtgggcctgggtgtggagatcagccgccggctccgccactccaacccccgggctgatcccctggtctgtgccactggcctcctgggctctgcacccttcctcttcctgtcccttgcctgcgcccgtggtagcatcgtggccacttatattttcatcttcattggagagaccctcctgtccatgaactgggccatcgtggccgacattctgctgtacgtggtgatccctacccgacgctccaccgccgaggccttccagatcgtgctgtcccacctgctgggtgatgctgggagcccctacctcattggcctgatctctgaccgcctgcgccggaactggcccccctccttcttgtccgagttccgggctctgcagttctcgctcatgctctgcgcgtttgttggggcactgggcggcgcagccttcctgggcaccgccatcttcattgaggccgaccgccggcgggcacagctgcacgtgcagggcctgctgcacgaagcagggtccacagacgaccggattgtggtgccccagcggggccgctccacccgcgtgcccgtggccagtgtgctcatctgagaggctgccgctcacctacctgcacatctgccacagctggccctgggcccaccccacgaagggcctgggcctaaccccttggcctggcccagcttccagagggaccctgggccgtgtgccagctcccagacactacctgggtagctcaggggaggaggtgggggtccaggagggggatccctctccacaggggcagccccaagggctcggtgctatttgtaacggaataaaatttgtagccaga

SEQ ID NO: 185999 - DNA, 2027 bp, Homo sapiens
  Payload ID: 16625
  Gene Symbol: SPNS1
  Gene Name: spinster homolog 1 (Drosophila)
  Uniprot ID: Q9H2V7
  ENST ID: ENST00000334536
  CDS Start-End: 352-1782
ggcggctgccgtggtgcagcgcccgggctgagcgacagcaagtgcagcgggctcctaccccgggtgaggggtggcctccgcgtgggatcgtgccctcttcagcccgctcctgtccccgacatcacgtgtattccgcacgtcccctccgcgctgtgtgtctactgagacggggaggcgtgacagggcccgggtcccttctcagtggtgctctgtgcttcagggcaagctccccgtctccgggcgcacttccctcgcctgtgttcggtccatcctcctttctccagcctcctcccctcgcaggtgggatcgtcggtgggaccggagcgcgggcgggcgcggccccccgggaccatggccgggtccgacaccgcgcccttcctcagccaggcggatgacccggacgacgggccagtgcctggcaccccggggttgccagggtccacggggaacccgaagtccgaggagcccgaggtcccggaccaggaggggctgcagcgcatcaccggcctgtctcccggccgttcggctctcatagtggcggtgctgtgctacatcaatctcctgaactacatggaccgcttcaccgtggctggcgtccttcccgacatcgagcagttcttcaacatcggggacagtagctctgggctcatccagaccgtgttcatctccagttacatggtgttggcacctgtgtttggctacctgggtgacaggtacaatcggaagtatctcatgtgcgggggcattgccttctggtccctggtgacactggggtcatccttcatccccggagagcatttctggctgctcctcctgacccggggcctggtgggggtcggggaggccagttattccaccatcgcgcccactctcattgccgacctctttgtggccgaccagcggagccggatgctcagcatcttctactttgccattccggtgggcagtggtctgggctacattgcaggctccaaagtgaaggatatggctggagactggcactgggctctgagggtgacaccgggtctaggagtggtggccgttctgctgctgttcctggtagtgcgggagccgccaaggggagccgtggagcgccactcagatttgccacccctgaaccccacctcgtggtgggcagatctgagggctctggcaagaaatctcatctttggactcatcacctgcctgaccggagtcctgggtgtgggcctgggtgtggagatcagccgccggctccgccactccaacccccgggctgatcccctggtctgtgccactggcctcctgggctctgcacccttcctcttcctgtcccttgcctgcgcccgtggtagcatcgtggccacttatattttcatcttcattggagagaccctcctgtccatgaactgggccatcgtggccgacattctgctgtacgtggtgatccctacccgacgctccaccgccgaggccttccagatcgtgctgtcccacctgctgggtgatgctgggagcccctacctcattggcctgatctctgaccgcctgcgccggaactggcccccctccttcttgtccgagttccgggctctgcagttctcgctcatgctctgcgcgtttgttggggcactgggcggcgcagccttcctgggcaccgccatcttcattgaggccgaccgccggcgggcacagctgcacgtgcagggcctgctgcacgaagcagggtccacagacgaccggattgtggtgccccagcggggccgctccacccgcgtgcccgtggccagtgtgctcatctgagaggctgccgctcacctacctgcacatctgccacagctggccctgggcccaccccacgaagggcctgggcctaaccccttggcctggcccagcttccagagggaccctgggccgtgtgccagctcccagacactacctgggtagctcaggggaggaggtgggggtccaggagggggatccctctccacaggggcagccccaagggctcggtgctatttgtaacggaataaaatttgtagccagac

SEQ ID NO: 186000 - DNA, 1979 bp, Homo sapiens
  Payload ID: 16625
  Gene Symbol: SPNS1
  Gene Name: spinster homolog 1 (Drosophila)
  ENST ID: ENST00000565975
  CDS Start-End: 9-1730
cgcgtcacatgaccggctttaagcaacatggcggctgccgtggtgcagcgcccgggctgagcgacagcaagtgcagcgggctcctaccccgggtgggatcgtcggtgggaccggagcgcgggcgggcgcggccccccgggaccatggccgggtccgacaccgcgcccttcctcagccaggcggatgacccggacgacgggccagtgcctggcaccccggggttgccagggtccacggggaacccgaagtccgaggagcccgaggtcccggaccaggaggggctgcagcgcatcaccggcctgtctcccggccgttcggctctcatagtggcggtgctgtgctacatcaatctcctgaactacatggaccgcttcaccgtggctggcgtccttcccgacatcgagcagttcttcaacatcggggacagtagctctgggctcatccagaccgtgttcatctccagttacatggtgttggcacctgtgtttggctacctgggtgacaggtacaatcggaagtatctcatgtgcgggggcattgccttctggtccctggtgacactggggtcatccttcatccccggagagcatttctggctgctcctcctgacccggggcctggtgggggtcggggaggccagttattccaccatcgcgcccactctcattgccgacctctttgtggccgaccagcggagccggatgctcagcatcttctactttgccattccggtgggcagtggtctgggctacattgcaggctccaaagtgaaggatatggctggagactggcactgggctctgagggtgacaccgggtctaggagtggtggccgttctgctgctgttcctggtagtgcgggagccgccaaggggagccgtggagcgccactcagatttgccacccctgaaccccacctcgtggtgggcagatctgagggctctggcaagaaatcctagtttcgtcctgtcttccctgggcttcactgctgtggcctttgtcacgggctccctggctctgtgggctccggcattcctgctgcgttcccgcgtggtccttggggagaccccaccctgccttcccggagactcctgctcttcctctgacagtctcatctttggactcatcacctgcctgaccggagtcctgggtgtgggcctgggtgtggagatcagccgccggctccgccactccaacccccgggctgatcccctggtctgtgccactggcctcctgggctctgcacccttcctcttcctgtcccttgcctgcgcccgtggtagcatcgtggccacttatattttcatcttcattggagagaccctcctgtccatgaactgggccatcgtggccgacattctgctgtacgtggtgatccctacccgacgctccaccgccgaggccttccagatcgtgctgtcccacctgctgggtgatgctgggagcccctacctcattggcctgatctctgaccgcctgcgccggaactggcccccctccttcttgtccgagttccgggctctgcagttctcgctcatgctctgcgcgtttgttggggcactgggcggcgcagccttcctgggcaccgccatcttcattgaggccgaccgccggcgggcacagctgcacgtgcagggcctgctgcacgaagcagggtccacagacgaccggattgtggtgccccagcggggccgctccacccgcgtgcccgtggccagtgtgctcatctgagaggctgccgctcacctacctgcacatctgccacagctggccctgggcccaccccacgaagggcctgggcctaaccccttggcctggcccagcttccagagggaccctgggccgtgtgccagctcccagacactacctgggtagctcaggggaggaggtgggggtccaggagggggatccctctccacaggggcagccccaagggctcggtgctatttgtaacggaataaaatttgtagccagacccca

SEQ ID NO: 186001 - DNA, 759 bp, Homo sapiens
  Payload ID: 16625
  Gene Symbol: SPNS1
  Gene Name: spinster homolog 1 (Drosophila)
  ENST ID: ENST00000568388
  CDS Start-End: 332-759
catccatcgcgctgctcaagctccatccatccatttatccatccatccatccatcctttattgagagtaaaaagccgccaaccagaccctgggaggaagacaggatggttcccgagaactagggctgctccttggcttttagagccaggcggatgacccggacgacgggccagtgcctggcaccccggggttgccagggtccacggggaacccgaagtccgaggagcccgaggtcccggaccaggaggggctgcagcgcatcaccggcctgtctcccggccgttcggctctcatagtggcggtgctgtgctacatcaatctcctgaactacatggaccgcttcaccgtggctggcgtccttcccgacatcgagcagttcttcaacatcggggacagtagctctgggctcatccagaccgtgttcatctccagttacatggtgttggcacctgtgtttggctacctgggtgacaggtacaatcggaagtatctcatgtgcgggggcattgccttctggtccctggtgacactggggtcatccttcatccccggagagcatttctggctgctcctcctgacccggggcctggtgggggtcggggaggccagttattccaccatcgcgcccactctcattgccgacctctttgtggccgaccagcggagccggatgctcagcatcttctactttgccattccggtgggcagtggtctgggctacattgcaggctccaaagtgaaggatatggctggagactg

SEQ ID NO: 186002 - DNA, 890 bp, Homo sapiens
  Payload ID: 16625
  Gene Symbol: SPNS1
  Gene Name: spinster homolog 1 (Drosophila)
  ENST ID: ENST00000564476
  CDS Start-End: 1-824
cggacgacgggccagtgcctggcaccccggggttgccagggtccacggggaacccgaagtccgaggagcccgaggtcccggaccaggaggggctgcagcgcatcaccggcctgtctcccggccgttcggctctcatagtggcggtgctgtgctacatcaatctcctgaactacatggaccgcttcaccgtggctggcgtccttcccgacatcgagcagttcttcaacatcggggacagtagctctgggctcatccagaccgtgttcatctccagttacatggtgttggcacctgtgtttggctacctgggtgacaggtacaatcggaagtatctcatgtgcgggggcattgccttctggtccctggtgacactggggtcatccttcatccccggagagcatttctggctgctcctcctgacccggggcctggtgggggtcggggaggccagttattccaccatcgcgcccactctcattgccgacctctttgtggccgaccagcggagccggatgctcagcatcttctactttgccattccggtgggcagtggtctgggctacattgcaggctccaaagtgaaggatatggctggagactggcactgggctctgaggatctctgaccgcctgcgccggaactggcccccctccttcttgtccgagttccgggctctgcagttctcgctcatgctctgcgcgtttgttggggcactgggcggcgcagccttcctgggcaccgccatcttcattgaggccgaccgccggcgggcacagctgcacgtgcagggtcagttaggagctgtgcccggcccagcttcttgatctgcctgtctgtctgtccatctgtctgcccactcctgtgcacctggcagctcagtccacagccct

SEQ ID NO: 186003 - DNA, 780 bp, Homo sapiens
  Payload ID: 16625
  Gene Symbol: SPNS1
  Gene Name: spinster homolog 1 (Drosophila)
  ENST ID: ENST00000568829
  CDS Start-End: 1-539
ctgtgtttggctacctgggtgacaggtacaatcggaagtatctcatgtgcgggggcattgccttctggtccctggtgacactggggtcatccttcatccccggagagattttcatcttcattggagagaccctcctgtccatgaactgggccatcgtggccgacattctgctgtacgtggtgatccctacccgacgctccaccgccgaggccttccagatcgtgctgtcccacctgctgggtgatgctgggagcccctacctcattggcctgatctctgaccgcctgcgccggaactggcccccctccttcttgtccgagttccgggctctgcagttctcgctcatgctctgcgcgtttgttggggcactgggcggcgcagccttcctgggcaccgccatcttcattgaggccgaccgccggcgggcacagctgcacgtgcagggcctgctgcacgaagcagggtccacagacgaccggattgtggtgccccagcggggccgctccacccgcgtgcccgtggccagtgtgctcatctgagaggctgccgctcacctacctgcacatctgccacagctggccctgggcccaccccacgaagggcctgggcctaaccccttggcctggcccagcttccagagggaccctgggccgtgtgccagctcccagacactacctgggtagctcaggggaggaggtgggggtccaggagggggatccctctccacaggggcagccccaagggctcggtgctatttgtaacggaataaaatttgtagcc

SEQ ID NO: 186004 - DNA, 1615 bp, Homo sapiens
  Payload ID: 16625
  Gene Symbol: SPNS1
  Gene Name: spinster homolog 1 (Drosophila)
  ENST ID: ENST00000566059
  CDS Start-End: 1-1615
caggcggatgacccggacgacgggccagtgcctggcaccccggggttgccagggtccacggggaacccgaagtccgaggagcccgaggtcccggaccaggaggggctgcagcgcatcaccggcctgtctcccggccgttcggctctcatagtggcggtgctgtgctacatcaatctcctgaactacatggaccgcttcaccgtggctggcgtccttcccgacatcgagcagttcttcaacatcggggacagtagctctgggctcatccagaccgtgttcatctccagttacatggtgttggcacctgtgtttggctacctgggtgacaggtacaatcggaagtatctcatgtgcgggggcattgccttctggtccctggtgacactggggtcatccttcatccccggagagcatttctggctgctcctcctgacccggggcctggtgggggtcggggaggccagttattccaccatcgcgcccactctcattgccgacctctttgtggccgaccagcggagccggatgctcagcatcttctactttgccattccggtgggcagtggtctgggctacattgcaggctccaaagtgaaggatatggctggagactggcactgggctctgaggccctctgtctcccaggtgacaccgggtctaggagtggtggccgttctgctgctgttcctggtagtgcgggagccgccaaggggagccgtggagcgccactcagatttgccacccctgaaccccacctcgtggtgggcagatctgagggctctggcaagaaatcctagtttcgtcctgtcttccctgggcttcactgctgtggcctttgtcacgggctccctggctctgtgggctccggcattcctgctgcgttcccgcgtggtccttggggagaccccaccctgccttcccggagactcctgctcttcctctgacagtctcatctttggactcatcacctgcctgaccggagtcctgggtgtgggcctgggtgtggagatcagccgccggctccgccactccaacccccgggctgatcccctggtctgtgccactggcctcctgggctctgcacccttcctcttcctgtcccttgcctgcgcccgtggtagcatcgtggccacttatattttcatcttcattggagagaccctcctgtccatgaactgggccatcgtggccgacattctgctgtacgtggtgatccctacccgacgctccaccgccgaggccttccagatcgtgctgtcccacctgctgggtgatgctgggagcccctacctcattggcctggcctgctgcacgaagcagggtccacagacgaccggattgtggtgccccagcggggccgctccacccgcgtgcccgtggccagtgtgctcatctgagaggctgccgctcacctacctgcacatctgccacagctggccctgggcccaccccacgaagggcctgggcctaaccccttggcctggcccagcttccagagggaccctgggccgtgtgccagctcccagacactacctgggtagctcaggggaggaggtgggggtccaggagggggatccctctccacaggggcagccccaagggctcggtgctattt

SEQ ID NO: 186005 - DNA, 829 bp, Homo sapiens
  Payload ID: 16625
  Gene Symbol: SPNS1
  Gene Name: spinster homolog 1 (Drosophila)
  ENST ID: ENST00000567771
  CDS Start-End: 296-829
agtttacaaggctagcagggttggggaatctcaacaaagggcggggcgttgctcaagctccatccgtccgtccgtccatccctccgtccctccaatcctccatccatcgcgctgctcaagctccatccatccatttatccatccatccatccatcctttattgagagtaaaaagccgccaaccagaccctgggaggaagacaggatggttcccgagaactagggctgctccttggcttttagaggtgggatcgtcggtgggaccggagcgcgggcgggcgcggccccccgggaccatggccgggtccgacaccgcgcccttcctcagccaggcggatgacccggacgacgggccagtgcctggcaccccggggttgccagggtccacggggaacccgaagtccgaggagcccgaggtcccggaccaggaggggctgcagcgcatcaccggcctgtctcccggccgttcggctctcatagtggcggtgctgtgctacatcaatctcctgaactacatggaccgcttcaccgtggctggcgtccttcccgacatcgagcagttcttcaacatcggggacagtagctctgggctcatccagaccgtgttcatctccagttacatggtgttggcacctgtgtttggctacctgggtgacaggtacaatcggaagtatctcatgtgcgggggcattgccttctggtccctggtgacactggggtcatccttcatccccggagagcatttctggctgctcctcctgacccggggcctggtgggggtcggggaggccagttattccaccatcgcgcccactctcattgccgacctc

SEQ ID NO: 186006 - DNA, 3447 bp, Homo sapiens
  Payload ID: 16626
  Gene Symbol: SPNS2
  Gene Name: spinster homolog 2 (Drosophila)
  Uniprot ID: Q8IVW8
  ENST ID: ENST00000329078
  CDS Start-End: 211-1860
ggggccgggccgcagctgtcagagccgcggcggcgaacgaggcgcagcgagctgagcggtggcagcgccgcagccggggccggagcgcaggagccgacggggcccgaccaggatggtgcagtggcggctccgcggcgcacgcacgcgctgagcgggcccagcctgggccccgcgccccccgcgccccccgccgccccgatccgggccggcatgatgtgcctggaatgcgcctcggcggcggcgggcggcgcggaggaggaggaggcggacgcggagcggcggcgccggcgccggggggcgcagcgaggggctggcggtagcggttgctgcggggcgcggggcgcgggcggcgctggagtctcggccgcgggcgatgaggtgcagacgctgtcgggcagcgtaaggcgggccccgaccggaccccccggcacccccggcacccccggctgcgcagctactgcaaagggccccggcgctcagcagcccaaaccggccagcttgggccgcgggcggggggcagccgccgccatcctcagcttgggcaacgtgctcaactacctggacaggtacaccgtggcaggcgtccttctggacatccagcagcactttggggtcaaggaccgaggcgccggcctgctgcagtcagtgttcatctgtagcttcatggtggctgcccccatcttcggctacctgggcgaccgcttcaacaggaaggtgattctcagctgcggcattttcttctggtcggccgtcaccttctccagctccttcattccccagcagtacttctggctgctggtcctgtcccgggggctggtgggcatcggggaggccagctactccaccatcgcccccactatcattggcgacctcttcaccaagaacacgcgtacgctcatgctgtccgtcttctacttcgccatcccactgggcagtggcctgggctacattactggctccagcgtgaagcaggcagccggagactggcactgggcattgcgggtgtcccctgtcctgggcatgatcacaggaacactcatcctcattctggtcccagccactaaaaggggtcatgccgaccagctcggggaccagctcaaggcccggacctcatggctccgagatatgaaggccctgattcgaaaccgcagctacgtcttctcctccctggccacgtcggctgtctccttcgccacgggggccctgggcatgtggatcccgctctacctgcaccgcgcccaagttgtgcagaagacagcagagacgtgcaacagcccgccctgtggggccaaggacagcctcatctttggggccatcacctgctttacgggatttctgggcgtggtcacgggggcaggagccacgcgctggtgccgcctgaagacccagcgggccgacccactggtgtgtgccgtgggcatgctgggctctgccatcttcatctgcctgatcttcgtggctgccaagagcagcatcgtaggagcctatatctgtatcttcgtcggggagacgctgctgttttctaactgggccatcactgcagacatcctcatgtacgtggtcatccccacgcggcgcgccactgccgtggccttgcagagcttcacctcccacctgctgggggacgccgggagcccctacctcattggctttatctcagacctgatccgccagagcactaaggactccccgctctgggagttcctgagcctgggctacgcgctcatgctctgccctttcgtcgtggtcctgggcggcatgttcttcctcgccactgcgctcttcttcgtcagcgaccgcgccagggctgagcagcaggtgaaccagctggcgatgccgcccgcatctgtgaaagtctgaggtggtgccattgggacaatgaagaacccacactcccacctcgtctgggaggtgtcctacagcgtccgggaccggctgggctgccccaaagctttctgtgtgatccacggctaggcacccaccctctctggcccaggcctgctgagtggccctggcatcaagaagaggctgtgtcctcagttaccctggaaggatgtgtgtgttggagccacacggttggacaggttcccagccctaggtttgggccgcagggcccctggggccaaggaagaagacagccccaagtgggtgtccggggagagcctggcctgccaccagcttatgtgatcttgggcaagtccctgccctccctggaacgaagggccagggggctggactttcccacacaacttgctgggcaaagcacgatctgcagctttgaagactcaacagaccctggaccatacggagagcaggtggcccaggcctcagggcggcagtcccggctttgaggctcacgcgagggcctggtatgcagggaccactgctcagctgggcctcggaccttggggatattggacgcaacctggcaaatgaagctgggcgcccaagtctctgggtactccctggaggacactgtctcactgtctcgggttggctcccagcctggaggtcccagatggggactgttctgacaagctggcatcaccaggggtgaaggccctggctgcagctgtacaccacctgtgcccccaggctcaaggtctctggcaggtgcacaccagcccaactctgcagggcttctctccctgccaccaccccccaagccaggaccccactccttccccgaggctgagctgagccttttccaggggcagggcccaggagaccattcccagaatccatggggcagtagccagggctccggctgctggaggaagcagctatccacaaagcttcctgccccagagctgaggctgaggccccgggagaggcggcccctacccaaacactggctgctggcattccaccaagtgaccccaggggggggccaggccttcgatcacccacctcccatccatgcacacaccaggatgcagctgccaacttcacaccagccccaacccgctttgggggagcttagccccctgcgtcacccactccctgcacttctgctgcaatcaaggtggttctggtgcgggggtggggtggggggtgaggccttgtggccaatgggggaccccccaagagccagcttggacaatgctcttcttgccccttagttactggctggctgtggcttcagtggtgtgtaagcaggtggaatactcacccaccaagctctggggtaccccgagggcctgacaagaggatggggtgggggtggcatcctccaaagaccagcctccacccccactccagcctcagcggggccccagcgatgttttcttgttgtacaagaaccaggtccgagtgttgcctcctcttccttccggaagccaaactgctcctttattttttagagctgctgattgtgaatctcagagtcttaagagagaagccaaatatattcctcttgtaaatgaagaaataaacctatttaaatca

SEQ ID NO: 186007 - DNA, 846 bp, Homo sapiens
  Payload ID: 16626
  Gene Symbol: SPNS2
  Gene Name: spinster homolog 2 (Drosophila)
  ENST ID: ENST00000571386
  CDS Start-End: 1-846
gccctgggcatgtggatcccgctctacctgcaccgcgcccaagttgtgcagaagacagcagagacgtgcaacagcccgccctgtggggccaaggacagcctcatctttggggccatcacctgctttacgggatttctgggcgtggtcacgggggcaggagccacgcgctggtgccgcctgaagacccagcgggccgacccactggtgtgtgccgtgggcatgctgggctctgccatcttcatctgcctgatcttcgtggctgccaagagcagcatcgtaggagcctatatctgtatcttcgtcggggagacgctgctgttttctaactgggccatcactgcagacatcctcatgtacgtggtcatccccacgcggcgcgccactgccgtggccttgcagagcttcacctcccacctgctgggggacgccgggagcccctacctcattggctttggtgaaccagctggcgatgccgcccgcatctgtgaaagtctgaggtggtgccattgggacaatgaagaacccacactcccacctcgtctgggaggtgtcctacagcgtccgggaccggctgggctgccccaaagctttctgtgtgatccacggctaggcacccaccctctctggcccaggcctgctgagtggccctggcatcaagaagaggctgtgtcctcagttaccctggaaggatgtgtgtgttggagccacacggttggacaggttcccagccctaggtttgggccgcagggcccctggggccaaggaagaagacagccccaagtgggtgtccggggagagcctggcctgccaccagcttatgtgatcttgggcaagtccctgccctcc

SEQ ID NO: 186008 - DNA, 2133 bp, Homo sapiens
  Payload ID: 16627
  Gene Symbol: SPNS3
  Gene Name: spinster homolog 3 (Drosophila)
  Uniprot ID: Q6ZMD2
  ENST ID: ENST00000355530
  CDS Start-End: 281-1819
tgaagctgcaggctagatcaaggggaccacagagttgtccagtccccagggtgggggtgccaggagcccttgtcctccgtagcaggtctcagaggctgacgatggggaaatcgcactggtgaagctgccgtggggtcaggaggaacctgcgataagacgcccaacagttagggcaggtgctttgaggtttggagcctgggaccccacaggaagtgacttcgtgctgagctaatgttgcttcatcctggcgccagtctcaggccaagagctgcaggctggcatggctggggggatgtcagcggagtgccctgagcctgggccaggaggtctgcagggccagtccccagggccaggcaggcagtgtccccctcccatcacgcccacctcctggagcctgcccccgtggagggcctacgtggctgccgccgtcctctgctacatcaacctcctgaattacatgaactggttcatcattgcaggagtgctgctggatatacaggaggttttccagatcagtgacaaccatgctggtttgcttcagactgtcttcgttagctgcctgctgctgtctgcacctgtgtttggctacctgggcgaccgacatagccgcaaggctaccatgagcttcggtatcttgctgtggtcaggagctggcctctctagctccttcatctccccccggtattcttggctcttcttcctgtcccggggcatcgtgggcactggctcggccagctactccaccatcgcgcccaccgtcctgggcgacctcttcgtgagggaccagcgcacccgcgtgctggctgtcttctacatctttatccccgttggaagtggtctgggctacgtgctggggtcggctgtgacgatgctgactgggaactggcgctgggccctccgagtcatgccctgcctggaggccgtggccttgatcctgcttatcctgctggttccagacccaccccggggagctgccgagacacagggggagggggccgtgggaggcttcaggagcagctggtgtgaggacgtcagatacctggggaaaaactggagtttcgtgtggtcgaccctcggagtgaccgccatggcctttgtgactggagccctggggttctgggcccccaagtttctgctcgaggcacgcgtggttcacgggctgcagcctccctgcttccaggagccgtgcagcaaccccgacagcctgatttttggggcactgaccatcatgaccggcgtcattggggtcatcttgggggcagaagctgcgaggaggtacaagaaagtcattccaggagctgagcccctcatctgcgcctccagcctgcttgccacagccccctgcctctacctggctctcgtcctggccccgaccaccctgctggcctcctatgtgttcctgggccttggggagctgcttctgtcctgcaactgggcagtggttgccgacatcctgctgtctgtggtggtgcccagatgccgggggacggcagaggcacttcagatcacggtgggccacatcctgggagacgctggcagcccctatctcacaggacttatctctagtgtcctgcgggccaggcgccctgactcctatctgcagcgcttccgcagcctgcagcagagcttcctgtgctgcgcctttgtcatcgccctggggggcggctgcttcctgctgactgcgctgtacctggagagagacgagacccgggcctggcagcctgtcacagggaccccagacagcaatgatgtggacagcaacgacctggagagacaaggcctactttcgggcgctggcgcctctacagaggagccctgaggtccctgcctacactcgtcctgcctgcaagcctcccgttggtccccacagcagcagtgcctcggttcctctttggctgtcctcggggactccggctgaggcacatctgccacttttgaattcccggctggagagctggcaggaccctgtggctgggctgggaatggagctgtcagcactctgcgtgggaggcctgggcctgtgcctgcatcccgctcaaggctgccccagcctggggtctccagcctggctgctgctgggccctgaataaagagaggccagtacaaagcccatggattttgggcctgtagaca

SEQ ID NO: 186009 - DNA, 1721 bp, Homo sapiens
  Payload ID: 16627
  Gene Symbol: SPNS3
  Gene Name: spinster homolog 3 (Drosophila)
  ENST ID: ENST00000575194
  CDS Start-End: 6-614
ctggcatggctggggggatgtcagcggagtgccctgagcctgggccaggaggtctgcagggccagtccccagggccaggcaggcagtgtccccctcccatcacgcccacctcctggagcctgcccccgtggagggcctacgtggctgccgccgtcctctgctacatcaacctcctgaattacatgaactggttcatcattgcaggagtgctgctggatatacaggaggttttccagatcagtgacaaccatgctggtttgcttcagactgtattcttggctcttcttcctgtcccggggcatcgtgggcactggctcggccagctactccaccatcgcgcccaccgtcctgggcgacctcttcgtgagggaccagcgcacccgcgtgctggctgtcttctacatctttatccccgttggaagtggtctgggctacgtgctggggtcggctgtgacgatgctgactgggaactggcgctgggccctccgagtcatgccctgcctggaggccgtggccttgatcctgcttatcctgctggttccagacccaccccggggagctgccgagacacagggggagggggccgtgggaggcttcaggagcagctggtgtgaggacgtcagatacctggggaaaaactggagtttcgtgtggtcgaccctcggagtgaccgccatggcctttgtgactggagccctggggttctgggcccccaagtttctgctcgaggcacgcgtggttcacgggctgcagcctccctgcttccaggagccgtgcagcaaccccgacagcctgatttttggggcactgaccatcatgaccggcgtcattggggtcatcttgggggcagaagctgcgaggaggtacaagaaagtcattccaggagctgagcccctcatctgcgcctccagcctgcttgccacagccccctgcctctacctggctctcgtcctggccccgaccaccctgctggcctcctatgtgttcctgggccttggggagctgcttctgtcctgcaactgggcagtggttgccgacatcctgctgtctgtggtggtgcccagatgccgggggacggcagaggcacttcagatcacggtgggccacatcctgggagacgctggcagcccctatctcacaggacttatctctagtgtcctgcgggccaggcgccctgactcctatctgcagcgcttccgcagcctgcagcagagcttcctgtgctgcgcctttgtcatcgccctggggggcggctgcttcctgctgactgcgctgtacctggagagagacgagacccgggcctggcagcctgtcacagggaccccagacagcaatgatgtggacagcaacgacctggagagacaaggcctactttcgggcgctggcgcctctacagaggagccctgaggtccctgcctacactcgtcctgcctgcaagcctcccgttggtccccacagcagcagtgcctcggttcctctttggctgtcctcggggactccggctgaggcacatctgccacttttgaattcccggctggagagctggcaggaccctgtggctgggctgggaatggagctgtcagcactctgcgtgggaggcctgggcctgtgcctgcatcccgctcaaggctgccccagcctggggtctccagcctggctgctgctgggccctgaataaagagaggccagtacaaagcccatggattttgggcctgtagaca

SEQ ID NO: 186010 - DNA, 1877 bp, Homo sapiens
  Payload ID: 16628
  Gene Symbol: SPIRE1
  Gene Name: spire-type actin nucleation factor 1
  ENST ID: ENST00000309836
  CDS Start-End: 106-1743
actcagatgctcattgaagaggaggaggaggttgagaaaaggtttctcccatcagtttttatctaattcattcttttgagaggtaaattgggatattcacaatgtatggaaacagagttgtgtgctgctcatctccctactgaatcagatgcaccaaatcattatcaggcagtatgtcgtgcactgtttgcagaaacaatggagctccatacatttctgaccaaaattaagagtgcgaaagagaatcttaagaagattcaagaaatggaaaagagcgatgaatctagcacagacttggaagagctgaaaaacgctgactgggcacgattctgggtacaggtgatgagggatttgaggaatggggtaaaacttaagaaggtccaagagcggcagtacaaccctttgcccattgaatatcagctcaccccttatgagatgttaatggatgacattcgctgcaaaagatacaccttgcgaaaagtgatggtgaatggtgatattccccctcggttaaaaaagagtgctcatgaaatcatcctcgacttcatcagatccagacctcctttaaatccagtctcagccagaaaactgaaaccaactccaccacggccacggagcctccatgaaagaatattagaagaaattaaagcagaaagaaagctgcggcctgtatcaccagaggagattagacgtagcagattagatgtgactacccctgaatctacaaagaatcttgtggagtcatctatggtgaatggaggtttgacatcacaaacaaaagaaaacgggttaagtacctcacagcaggtgcctgcacagcggaagaagctcctcagagccccaactctggccgaactggacagctctgagtctgaggaagaaacgctgcacaagtcgaccagcagcagcagcgtgtctccctctttccctgaagagccagtcctggaggccgtgtccacaaggaagaagcctccaaaattcctgcccatatcatcaacaccccagccagagagacggcagccaccccagagacgacattccattgaaaaggaaacgcctactaacgtgaggcagttcctgccgccttccaggcagagttcccgctctcttgaggaattctgctacccagtggaatgcctcgctcttactgtggaagaagtgatgcatattcgccaggtcctggtgaaggcagagctggaaaaataccaacagtataaagacatctacaccgccttgaaaaaaggaaagctctgcttttgttgccgaaccaggaggttttccttcttcacttggtcttatacctgtcagttctgtaagaggccggtgtgctcacagtgttgcaaaaagatgcggctgccctccaaaccatactccactcttcctatcttttcattgggaccttctgctctgcaaagaggggaaagtagtatgaggtcagaaaaaccctccactgcccatcatcggccacttcggagcattgccaggttctcctcaaaatctaagtctatggacaaatcagatgaagaactccagtttcccaaagagttgatggaggactggagcaccatggaggtgtgtgtggactgcaagaagttcatttcggaaatcatcagttcaagccggcgcagtctggtgttggccaacaaaagggcccgattgaaaaggaaaacgcagtctttctacatgtcctcgccaggcccctcggagtactgcccttcagagaggacgatcagtgagatctgagcctcgtgcctttcagctgcttttgtgctacgagtcagcgtccgtgcgcgaggacactgagccgggctggctctcctttctgtggttttatttaatgggcttgaatttgcattagatcagatttttgccgcatc

SEQ ID NO: 186011 - DNA, 5533 bp, Homo sapiens
  Payload ID: 16628
  Gene Symbol: SPIRE1
  Gene Name: spire-type actin nucleation factor 1
  Uniprot ID: Q08AE8
  ENST ID: ENST00000410092
  CDS Start-End: 180-2408
cgccctcctcttgcccacgcctcccgggcactcgcctggtcccggcggcggcgcgcgcggccgcgttgggcggcggcggttccggggatggtgaggcggcggcgcgcgacgacgatgctccggagctgaggagacgccggcacacggcgcgactgccgagcgcagcgcccacccgcgggatggctcaggcggctggcccggcgggcggcggggagccgcggactgaggcagtgggcggcgaggggccgcgggagcccggggcagccggcggcgcggccgggggctcccgggacgcgctgagcctggaggagatcctgcggctgtacaaccagcccatcaacgaggagcaggcgtgggccgtgtgctaccagtgctgcggttccctgcgcgccgccgcccgccgccgccagccccgccaccgtgtgcgctcggccgcgcagatccgcgtctggagggacggcgccgtcaccctggcgcccgcggccgacgacgcgggagagccgcccccagttgcgggtaaattgggatattcacaatgtatggaaacagaggtcattgaatctttgggaattattatttataaagcactggactatggtttgaaggagaatgaagaaagggaattaagccctcccctagagcagcttatcgatcacatggccaacacggtggaagctgacggtagcaatgatgagggctatgaggctgcagaagaaggcctgggagatgaagatgaaaagagaaaaatctcagctattcggtcatatagagatgtcatgaagttgtgtgctgctcatctccctactgaatcagatgcaccaaatcattatcaggcagtatgtcgtgcactgtttgcagaaacaatggagctccatacatttctgaccaaaattaagagtgcgaaagagaatcttaagaagattcaagaaatggaaaagagcgatgaatctagcacagacttggaagagctgaaaaacgctgactgggcacgattctgggtacaggtgatgagggatttgaggaatggggtaaaacttaagaaggtccaagagcggcagtacaaccctttgcccattgaatatcagctcaccccttatgagatgttaatggatgacattcgctgcaaaagatacaccttgcgaaaagtgatggtgaatggtgatattccccctcggttaaaaaagagtgctcatgaaatcatcctcgacttcatcagatccagacctcctttaaatccagtctcagccagaaaactgaaaccaactccaccacggccacggagcctccatgaaagaatattagaagaaattaaagcagaaagaaagctgcggcctgtatcaccagaggagattagacgtagcagattagatgtgactacccctgaatctacaaagaatcttgtggagtcatctatggtgaatggaggtttgacatcacaaacaaaagaaaacgggttaagtacctcacagcaggtgcctgcacagcggaagaagctcctcagagccccaactctggccgaactggacagctctgagtctgaggaagaaacgctgcacaagtcgaccagcagcagcagcgtgtctccctctttccctgaagagccagtcctggaggccgtgtccacaaggaagaagcctccaaaattcctgcccatatcatcaacaccccagccagagagacggcagccaccccagagacgacattccattgaaaaggaaacgcctactaacgtgaggcagttcctgccgccttccaggcagagttcccgctctcttgaggaattctgctacccagtggaatgcctcgctcttactgtggaagaagtgatgcatattcgccaggtcctggtgaaggcagagctggaaaaataccaacagtataaagacatctacaccgccttgaaaaaaggaaagctctgcttttgttgccgaaccaggaggttttccttcttcacttggtcttatacctgtcagttctgtaagaggccggtgtgctcacagtgttgcaaaaagatgcggctgccctccaaaccatactccactcttcctatcttttcattgggaccttctgctctgcaaagaggggaaagtagtatgaggtcagaaaaaccctccactgcccatcatcggccacttcggagcattgccaggttctcctcaaaatctaagtctatggacaaatcagatgaagaactccagtttcccaaagagttgatggaggactggagcaccatggaggtgtgtgtggactgcaagaagttcatttcggaaatcatcagttcaagccggcgcagtctggtgttggccaacaaaagggcccgattgaaaaggaaaacgcagtctttctacatgtcctcgccaggcccctcggagtactgcccttcagagaggacgatcagtgagatctgagcctcgtgcctttcagctgcttttgtgctacgagtcagcgtccgtgcgcgaggacactgagccgggctggctctcctttctgtggttttatttaatgggcttgaatttgcattagatcagatttttgccgcatcacattgttccacagactgaatgctgtgttcgtatcgattgatgaaacgtgacaggtccgccaattgctcgtttgcactgagagaggacaacagtttgaaacttacttttgtgtgtgtgtggctttggaagccagtagctacttccttagttcagttctttactgttcctcgaataatctcctgactaaggcaaaaaaaaaaagcttctcctacgagaatcagtctaacagagatgccgatgtcagcacagccctaagcagtaagtcatattggcatttccacgtgactgtgtttctatcccgtgtacagagagatccagagccctacactccacgacctgggggctcacagcacagaacctagaagcacctgctgacactcttcaactgatttttaaatgttgttgcttggagataaaaattacataagggactttttgcctgcattctagtgcaaaacatctgaagagctgtacacccacaagggtgactatttcccctgagtggccgtgttgtcccagtgccctggttcagtgtctcctgagtggatgacaggtcttcattctctatcttgaatgtattatggttactaatagttttataatggaggtctaagaattaaagttgtgtgggagtttcaggacaaaggaaggctaaaagtttgtcaagacgttgagcgtattttggttacctatgagaagggttgtgacagtgtacagtggcagctgttggccacgctgcagaaatgagctggagctcatgggttttcagctacatttttcataactttgtagtacatccatcttgagtaaattaagccacaatttggtacctagggtctcaaactaaaatttatttttataaatgaattttaaaagaaaaaatatctacttcttttaaagttagaagaaaattaacctgctgacaggcaacatttttggggtgctttctgcactagttttccttgtaaatgatttgagtgagtaggtttggtttctgacgaaagtagactggagggtagcattgtatgcctcaaatgtctcagtgtgtttggctcatacgtgggctatactgtattattttggtatgcttacaaatgactaaccaatcaaattgtcattaatgtttggaaaatctgttaatgcacatgcacaataatttcctgaaagccataggacatgtctgtagtcagcaccacgatagcaccgtttcatgaaaggcatggcggctgcatttcataccacatcaaaatacagtaacatttctatactaaattaacagtaatacctcaaaactgctccggtagtagtttttaatggattgaaatttacagtttagtaaaaggcttaaaattacttatacttatgaaataaactttaccagttgactaaaataatgcatgttaacagttggtctgtatttgcatgtaaaagtgggccaccagagaacccttattgattacttaagtgtttacattattttaaagactcctgtttaagagctttcagaattgtactgggtgaatctcatttataaaacttcctaagagactatctgaactctatactccagacagttaggtgggagtataaatctaccccttttgatgaccccaggcttgagtttttaaaatgactacccagaagggcacaagggggaaggaaatggtatttgtatatgtatataaatatgcacctaggagaatgtgctttttaaaataatgactactgtttttattaaaacataagaaactacacccccaaaataagactttcattcacattcacaaagcaaacatctagtacatgtctttcacttcactttatgatagtgtattggatgatttgggcattacgatcacctcttaccacagcacagaacatacattcttcaacagcattaacggagtttgccaagtgcattaaagaggtcacgtggagggtacgttcatatgaaacaatctgcagaaagtggggtaagaaagggcacatggcacagttaaagttgtagaaatcaaattactatcattttttgttgccaaaacaaagtcttacatttaacccccctttctaccacccccctccacacttcacgtcagctacatagtttccacagggtaattcactaagagcttgtggagcttggttttaaaatccttagcctggtctgactttaggcatagcttccagttcttccttccgtgtcctggtttcttgttcagttttacttctaatccaacaacaaaagaaatgtctggctggtctcagctagagtctgatgtgtcttagagcatgtgtgcgtatctgaaccatcatccctgctctcatctcagctccctccaggcctgagcaccggttccttttgtcccatacgtcatgaagtcacactattgggaaacctgtgcttccctctccatggcttaactccctgtcagtgtcggagtgtataagaatgcttgtaaatactgtaatatatttattaatatttgaaaggcattcattcagtggacagtgggaattaactctcccaaggcaagtgaaaatgaatgattgacgtacgttgatttaacaatcttactagattttaattcttaaggatttcaaatgaaaccagaaggtggttatgtaagaggcttaaaatgatcttatgtttaaagagattctgttattagcaccatgaactcgtactatgaaatttttaagccttttatttttctaactatattactgtaggactggatattaggtgtcatataggaaacacaaaagtttattgctgtttgctaaagcaaaatagcagaaaattttgtatatgcaaaactgttgaaggaccatagagaaatgtgtactactgacggggcttttactaggcttcctgcgtgtgtaaaagtcgaggtattgctggcattcagggtgacatgatggtactaaatgttttccattaaagtcttctattttaaaatttagagaaaaataaaatggctttccatcag

SEQ ID NO: 186012 - DNA, 5665 bp, Homo sapiens
  Payload ID: 16628
  Gene Symbol: SPIRE1
  Gene Name: spire-type actin nucleation factor 1
  Uniprot ID: Q08AE8
  ENST ID: ENST00000409402
  CDS Start-End: 269-2539
aggcggggcggggcggggcggggcgccggacgccatcgcgtcgctaccggccggcggctgtctgaccgggactgcagccgtgtcctcgccgccctcctcttgcccacgcctcccgggcactcgcctggtcccggcggcggcgcgcgcggccgcgttgggcggcggcggttccggggatggtgaggcggcggcgcgcgacgacgatgctccggagctgaggagacgccggcacacggcgcgactgccgagcgcagcgcccacccgcgggatggctcaggcggctggcccggcgggcggcggggagccgcggactgaggcagtgggcggcgaggggccgcgggagcccggggcagccggcggcgcggccgggggctcccgggacgcgctgagcctggaggagatcctgcggctgtacaaccagcccatcaacgaggagcaggcgtgggccgtgtgctaccagtgctgcggttccctgcgcgccgccgcccgccgccgccagccccgccaccgtgtgcgctcggccgcgcagatccgcgtctggagggacggcgccgtcaccctggcgcccgcggccgacgacgcgggagagccgcccccagttgcgggtaaattgggatattcacaatgtatggaaacagaggtcattgaatctttgggaattattatttataaagcactggactatggtttgaaggagaatgaagaaagggaattaagccctcccctagagcagcttatcgatcacatggccaacacggtggaagctgacggtagcaatgatgagggctatgaggctgcagaagaaggcctgggagatgaagatgaaaagagaaaaatctcagctattcggtcatatagagatgtcatgaagttgtgtgctgctcatctccctactgaatcagatgcaccaaatcattatcaggcagtatgtcgtgcactgtttgcagaaacaatggagctccatacatttctgaccaaaattaagagtgcgaaagagaatcttaagaagattcaagaaatggaaaagagcgatgaatctagcacagacttggaagagctgaaaaacgctgactgggcacgattctgggtacaggtgatgagggatttgaggaatggggtaaaacttaagaaggtccaagagcggcagtacaaccctttgcccattgaatatcagctcaccccttatgagatgttaatggatgacattcgctgcaaaagatacaccttgcgaaaagtgatggtgaatggtgatattccccctcggttaaaaaagagtgctcatgaaatcatcctcgacttcatcagatccagacctcctttaaatccagtctcagccagaaaactgaaaccaactccaccacggccacggagcctccatgaaagaatattagaagaaattaaagcagaaagaaagctgcggcctgtatcaccagaggagattagacgtagcagattagcaatgcggccacttagcatgtcttacagttttgacttgtcagatgtgactacccctgaatctacaaagaatcttgtggagtcatctatggtgaatggaggtttgacatcacaaacaaaagaaaacgggttaagtacctcacagcaggtgcctgcacagcggaagaagctcctcagagccccaactctggccgaactggacagctctgagtctgaggaagaaacgctgcacaagtcgaccagcagcagcagcgtgtctccctctttccctgaagagccagtcctggaggccgtgtccacaaggaagaagcctccaaaattcctgcccatatcatcaacaccccagccagagagacggcagccaccccagagacgacattccattgaaaaggaaacgcctactaacgtgaggcagttcctgccgccttccaggcagagttcccgctctcttgaggaattctgctacccagtggaatgcctcgctcttactgtggaagaagtgatgcatattcgccaggtcctggtgaaggcagagctggaaaaataccaacagtataaagacatctacaccgccttgaaaaaaggaaagctctgcttttgttgccgaaccaggaggttttccttcttcacttggtcttatacctgtcagttctgtaagaggccggtgtgctcacagtgttgcaaaaagatgcggctgccctccaaaccatactccactcttcctatcttttcattgggaccttctgctctgcaaagaggggaaagtagtatgaggtcagaaaaaccctccactgcccatcatcggccacttcggagcattgccaggttctcctcaaaatctaagtctatggacaaatcagatgaagaactccagtttcccaaagagttgatggaggactggagcaccatggaggtgtgtgtggactgcaagaagttcatttcggaaatcatcagttcaagccggcgcagtctggtgttggccaacaaaagggcccgattgaaaaggaaaacgcagtctttctacatgtcctcgccaggcccctcggagtactgcccttcagagaggacgatcagtgagatctgagcctcgtgcctttcagctgcttttgtgctacgagtcagcgtccgtgcgcgaggacactgagccgggctggctctcctttctgtggttttatttaatgggcttgaatttgcattagatcagatttttgccgcatcacattgttccacagactgaatgctgtgttcgtatcgattgatgaaacgtgacaggtccgccaattgctcgtttgcactgagagaggacaacagtttgaaacttacttttgtgtgtgtgtggctttggaagccagtagctacttccttagttcagttctttactgttcctcgaataatctcctgactaaggcaaaaaaaaaaagcttctcctacgagaatcagtctaacagagatgccgatgtcagcacagccctaagcagtaagtcatattggcatttccacgtgactgtgtttctatcccgtgtacagagagatccagagccctacactccacgacctgggggctcacagcacagaacctagaagcacctgctgacactcttcaactgatttttaaatgttgttgcttggagataaaaattacataagggactttttgcctgcattctagtgcaaaacatctgaagagctgtacacccacaagggtgactatttcccctgagtggccgtgttgtcccagtgccctggttcagtgtctcctgagtggatgacaggtcttcattctctatcttgaatgtattatggttactaatagttttataatggaggtctaagaattaaagttgtgtgggagtttcaggacaaaggaaggctaaaagtttgtcaagacgttgagcgtattttggttacctatgagaagggttgtgacagtgtacagtggcagctgttggccacgctgcagaaatgagctggagctcatgggttttcagctacatttttcataactttgtagtacatccatcttgagtaaattaagccacaatttggtacctagggtctcaaactaaaatttatttttataaatgaattttaaaagaaaaaatatctacttcttttaaagttagaagaaaattaacctgctgacaggcaacatttttggggtgctttctgcactagttttccttgtaaatgatttgagtgagtaggtttggtttctgacgaaagtagactggagggtagcattgtatgcctcaaatgtctcagtgtgtttggctcatacgtgggctatactgtattattttggtatgcttacaaatgactaaccaatcaaattgtcattaatgtttggaaaatctgttaatgcacatgcacaataatttcctgaaagccataggacatgtctgtagtcagcaccacgatagcaccgtttcatgaaaggcatggcggctgcatttcataccacatcaaaatacagtaacatttctatactaaattaacagtaatacctcaaaactgctccggtagtagtttttaatggattgaaatttacagtttagtaaaaggcttaaaattacttatacttatgaaataaactttaccagttgactaaaataatgcatgttaacagttggtctgtatttgcatgtaaaagtgggccaccagagaacccttattgattacttaagtgtttacattattttaaagactcctgtttaagagctttcagaattgtactgggtgaatctcatttataaaacttcctaagagactatctgaactctatactccagacagttaggtgggagtataaatctaccccttttgatgaccccaggcttgagtttttaaaatgactacccagaagggcacaagggggaaggaaatggtatttgtatatgtatataaatatgcacctaggagaatgtgctttttaaaataatgactactgtttttattaaaacataagaaactacacccccaaaataagactttcattcacattcacaaagcaaacatctagtacatgtctttcacttcactttatgatagtgtattggatgatttgggcattacgatcacctcttaccacagcacagaacatacattcttcaacagcattaacggagtttgccaagtgcattaaagaggtcacgtggagggtacgttcatatgaaacaatctgcagaaagtggggtaagaaagggcacatggcacagttaaagttgtagaaatcaaattactatcattttttgttgccaaaacaaagtcttacatttaacccccctttctaccacccccctccacacttcacgtcagctacatagtttccacagggtaattcactaagagcttgtggagcttggttttaaaatccttagcctggtctgactttaggcatagcttccagttcttccttccgtgtcctggtttcttgttcagttttacttctaatccaacaacaaaagaaatgtctggctggtctcagctagagtctgatgtgtcttagagcatgtgtgcgtatctgaaccatcatccctgctctcatctcagctccctccaggcctgagcaccggttccttttgtcccatacgtcatgaagtcacactattgggaaacctgtgcttccctctccatggcttaactccctgtcagtgtcggagtgtataagaatgcttgtaaatactgtaatatatttattaatatttgaaaggcattcattcagtggacagtgggaattaactctcccaaggcaagtgaaaatgaatgattgacgtacgttgatttaacaatcttactagattttaattcttaaggatttcaaatgaaaccagaaggtggttatgtaagaggcttaaaatgatcttatgtttaaagagattctgttattagcaccatgaactcgtactatgaaatttttaagccttttatttttctaactatattactgtaggactggatattaggtgtcatataggaaacacaaaagtttattgctgtttgctaaagcaaaatagcagaaaattttgtatatgcaaaactgttgaaggaccatagagaaatgtgtactactgacggggcttttactaggcttcctgcgtgtgtaaaagtcgaggtattgctggcattcagggtgacatgatggtactaaatgttttccattaaagtcttctattttaaaatttagagaaaaataaaatggctttccatcaga

SEQ ID NO: 186013 - DNA, 701 bp, Homo sapiens
  Payload ID: 16628
  Gene Symbol: SPIRE1
  Gene Name: spire-type actin nucleation factor 1
  ENST ID: ENST00000449797
  CDS Start-End: 109-701
atcccagttgagaaccactgctctagcaggtggtgcccaggattgtgttcagggtagagaagtggattctggctgtaatcctcaagtaaattgggatattcacaatgtatggaaacagaggtcattgaatctttgggaattattatttataaagcactggactatggtttgaaggagaatgaagaaagggaattaagccctcccctagagcagcttatcgatcacatggccaacacggtggaagctgacggtagcaatgatgagggctatgaggctgcagaagaaggcctgggagatgaagatgaaaagagaaaaatctcagctattcggtcatatagagatgtcatgaagttgtgtgctgctcatctccctactgaatcagatgcaccaaatcattatcaggcagtatgtcgtgcactgtttgcagaaacaatggagctccatacatttctgaccaaaattaagagtgcgaaagagaatcttaagaagattcaagaaatggaaaagagcgatgaatctagcacagacttggaagagctgaaaaacgctgactgggcacgattctgggtacaggtgatgagggatttgaggaatggggtaaaacttaagaaggtccaagagcggcagtacaaccctttgcccattgaatatcagctcaccccttatgagatgttaatggatgacattcgctgcaaaagata

SEQ ID NO: 186014 - DNA, 2109 bp, Homo sapiens
  Payload ID: 16628
  Gene Symbol: SPIRE1
  Gene Name: spire-type actin nucleation factor 1
  Uniprot ID: Q08AE8
  ENST ID: ENST00000440472
  CDS Start-End: 202-1578
gtgggctaggtgtgagggtaaattgggatattcacaatgtatggaaacagagcctatttaatagcagtaaataacatatgaaagccactattaactgtcattgaatctttgggaattattatttataaagcactggactatggtttgaaggagaatgaagaaagggaattaagccctcccctagagcagcttatcgatcacatggccaacacggtggaagctgacggtagcaatgatgagggctatgaggctgcagaagaaggcctgggagatgaagatgaaaagagaaaaatctcagctattcggtcatatagagatgtcatgaagttgtgtgctgctcatctccctactgaatcagatgcaccaaatcattatcaggcagtatgtcgtgcactgtttgcagaaacaatggagctccatacatttctgaccaaaattaagagtgcgaaagagaatcttaagaagattcaagaaatggaaaagagcgatgaatctagcacagacttggaagagctgaaaaacgctgactgggcacgattctgggtacaggtgatgagggatttgaggaatggggtaaaacttaagaaggtccaagagcggcagtacaaccctttgcccattgaatatcagctcaccccttatgagatgttaatggatgacattcgctgcaaaagatacaccttgcgaaaagtgatggtgaatggtgatattccccctcggttaaaaaagagtgctcatgaaatcatcctcgacttcatcagatccagacctcctttaaatccagtctcagccagaaaactgaaaccaactccaccacggccacggagcctccatgaaagaatattagaagaaattaaagcagaaagaaagctgcggcctgtatcaccagaggagattagacgtagcagattagatgtgactacccctgaatctacaaagaatcttgtggagtcatctatggtgaatggaggtttgacatcacaaacaaaagaaaacgggttaagtacctcacagcaggtgcctgcacagcggaagaagctcctcagagccccaactctggccgaactggacagctctgagtctgaggaagaaacgctgcacaagtcgaccagcagcagcagcgtgtctccctctttccctgaagagccagtcctggaggccgtgtccacaaggaagaagcctccaaaattcctgcccatatcatcaacaccccagccagagagacggcagccaccccagagacgacattccattgaaaaggaaacgcctactaacgtgaggcagttcctgccgccttccaggcagagttcccgctctcttgaggaattctgctacccagtggaatgcctcgctcttactgtggaagaagtgatgcatattcgccaggtcctggtgaaggcagagctggaaaaataccaacagtataaagacatctacaccgccttgaaaaaaggaaagctctgcttttgttgccgaaccaggaggttttccttcttcacttggtcttatacctgtcagttctgtaagagtgactgcctctttaacggtactgctcattgccagttttatttgggataatagatgcggctgccctccaaaccatactccactcttcctatcttttcattgggaccttctgctctgcaaagaggggaaagtagtatgaggtcagaaaaaccctccactgcccatcatcggccacttcggagcattgccaggttctcctcaaaatctaagtctatggacaaatcagatgaagaactccagtttcccaaagagttgatggaggactggagcaccatggaggtgtgtgtggactgcaagaagttcatttcggaaatcatcagttcaagccggcgcagtctggtgttggccaacaaaagggcccgattgaaaaggaaaacgcagtctttctacatgtcctcgccaggcccctcggagtactgcccttcagagaggacgatcagtgagatctgagcctcgtgcctttcagctgcttttgtgctacgagtcagcgtccgtgcgcgaggacactgagccgggctggctctcctttctgtggttttatttaatgggcttgaatttgcattagatcagatttttgccgca

SEQ ID NO: 186015 - DNA, 2107 bp, Homo sapiens
  Payload ID: 16628
  Gene Symbol: SPIRE1
  Gene Name: spire-type actin nucleation factor 1
  Uniprot ID: Q08AE8
  ENST ID: ENST00000453447
  CDS Start-End: 110-1978
gtttactcagatgctcattgaagaggaggaggaggttgagaaaaggtttctcccatcagtttttatctaattcattcttttgagaggtaaattgggatattcacaatgtatggaaacagaggtcattgaatctttgggaattattatttataaagcactggactatggtttgaaggagaatgaagaaagggaattaagccctcccctagagcagcttatcgatcacatggccaacacggtggaagctgacggtagcaatgatgagggctatgaggctgcagaagaaggcctgggagatgaagatgaaaagagaaaaatctcagctattcggtcatatagagatgtcatgaagttgtgtgctgctcatctccctactgaatcagatgcaccaaatcattatcaggcagtatgtcgtgcactgtttgcagaaacaatggagctccatacatttctgaccaaaattaagagtgcgaaagagaatcttaagaagattcaagaaatggaaaagagcgatgaatctagcacagacttggaagagctgaaaaacgctgactgggcacgattctgggtacaggtgatgagggatttgaggaatggggtaaaacttaagaaggtccaagagcggcagtacaaccctttgcccattgaatatcagctcaccccttatgagatgttaatggatgacattcgctgcaaaagatacaccttgcgaaaagtgatggtgaatggtgatattccccctcggttaaaaaagagtgctcatgaaatcatcctcgacttcatcagatccagacctcctttaaatccagtctcagccagaaaactgaaaccaactccaccacggccacggagcctccatgaaagaatattagaagaaattaaagcagaaagaaagctgcggcctgtatcaccagaggagattagacgtagcagattagatgtgactacccctgaatctacaaagaatcttgtggagtcatctatggtgaatggaggtttgacatcacaaacaaaagaaaacgggttaagtacctcacagcaggtgcctgcacagcggaagaagctcctcagagccccaactctggccgaactggacagctctgagtctgaggaagaaacgctgcacaagtcgaccagcagcagcagcgtgtctccctctttccctgaagagccagtcctggaggccgtgtccacaaggaagaagcctccaaaattcctgcccatatcatcaacaccccagccagagagacggcagccaccccagagacgacattccattgaaaaggaaacgcctactaacgtgaggcagttcctgccgccttccaggcagagttcccgctctcttgaggaattctgctacccagtggaatgcctcgctcttactgtggaagaagtgatgcatattcgccaggtcctggtgaaggcagagctggaaaaataccaacagtataaagacatctacaccgccttgaaaaaaggaaagctctgcttttgttgccgaaccaggaggttttccttcttcacttggtcttatacctgtcagttctgtaagaggccggtgtgctcacagtgttgcaaaaagatgcggctgccctccaaaccatactccactcttcctatcttttcattgggaccttctgctctgcaaagaggggaaagtagtatgaggtcagaaaaaccctccactgcccatcatcggccacttcggagcattgccaggttctcctcaaaatctaagtctatggacaaatcagatgaagaactccagtttcccaaagagttgatggaggactggagcaccatggaggtgtgtgtggactgcaagaagttcatttcggaaatcatcagttcaagccggcgcagtctggtgttggccaacaaaagggcccgattgaaaaggaaaacgcagtctttctacatgtcctcgccaggcccctcggagtactgcccttcagagaggacgatcagtgagatctgagcctcgtgcctttcagctgcttttgtgctacgagtcagcgtccgtgcgcgaggacactgagccgggctggctctcctttctgtggttttatttaatgggcttgaatttgcattagatcagatttttgcc

SEQ ID NO: 186016 - DNA, 863 bp, Homo sapiens
  Payload ID: 16628
  Gene Symbol: SPIRE1
  Gene Name: spire-type actin nucleation factor 1
  ENST ID: ENST00000592156
  CDS Start-End: 1-367
ggatgacattcgctgcaaaagatacaccttgcgaaaagtgatggtgaatggtgatattccccctcggttaaaaaagagtgctcatgaaatcatcctcgacttcatcagatccagacctcctttaaatccagtctcagccagaaaactgaaaccaactccaccacggccacggagcctccatgaaagaatattagaagaaattaaagcagaaagaaagctgcggcctgtatcaccagaggagattagacgtagcagattaggaggaattctgctacccagtggaatgcctcgctcttactgtggaagaagtgatgcatattcgccaggtcctggtgaaggcagagctggaaaaataccaacagtataaagacatctacaccgccttgaaaaaaggaaagctctgcttttgttgccgaaccaggaggttttccttcttcacttggtcttatacctgtcagttctgtaagaggccggtgtgctcacagtgttgcaaaaagatgcggctgccctccaaaccatactccactcttcctatcttttcattgggaccttctgctctgcaaagaggggaaagtagtatgaggtcagaaaaaccctccactgcccatcatcggccacttcggagcattgccaggttctcctcaaaatctaagtctatggacaaatcagatgaagaactccagtttcccaaagagttgatggaggactggagcaccatggaggtgtgtgtggactgcaagaagttcatttcggaaatcatcagttcaagccggcgcagtctggtgttggccaacaaaagggcccgattgaaaaggaaaacgcagtctttctacatgtcctcgccaggcccctcggagtactgc

SEQ ID NO: 186017 - DNA, 546 bp, Homo sapiens
  Payload ID: 16628
  Gene Symbol: SPIRE1
  Gene Name: spire-type actin nucleation factor 1
  ENST ID: ENST00000497844
  CDS Start-End: 105-546
agatgctcattgaagaggaggaggaggttgagaaaaggtttctcccatcagtttttatctaattcattcttttgagaggattggggcataagtgaggataatatatgtcaagtggcaagacttgctgtatagcaggtaaattgggatattcacaatgtatggaaacagaggtcattgaatctttgggaattattatttataaagcactggactatggtttgaaggagaatgaagaaagggaattaagccctcccctagagcagcttatcgatcacatggccaacacggtggaagctgacggtagcaatgatgagggctatgaggctgcagaagaaggcctgggagatgaagatgaaaagagaaaaatctcagctattcggtcatatagagatgtcatgaagttgtgtgctgctcatctccctactgaatcagatgcaccaaatcattatcaggcagtatgtcgtgcactgtttgcagaaacaatggagctccatacatttctgaccaaaattaagagtgcgaaagagaatcttaagaagattcaag

SEQ ID NO: 186018 - DNA, 536 bp, Homo sapiens
  Payload ID: 16628
  Gene Symbol: SPIRE1
  Gene Name: spire-type actin nucleation factor 1
  ENST ID: ENST00000462226
  CDS Start-End: 170-536
attgaagaggaggaggaggttgagaaaaggtttctcccatcagtttttatctaattcattcttttgagaggcaagtctattaaaaacatagaaaaacaatctaccctcacttttagaaagttgatggaaatgtcaaaatgcttaaggtaaattgggatattcacaatgtatggaaacagaggtcattgaatctttgggaattattatttataaagcactggactatggtttgaaggagaatgaagaaagggaattaagccctcccctagagcagcttatcgatcacatggccaacacggtggaagctgacggtagcaatgatgagggctatgaggctgcagaagaaggcctgggagatgaagatgaaaagagaaaaatctcagctattcggtcatatagagatgtcatgaagttgtgtgctgctcatctccctactgaatcagatgcaccaaatcattatcaggcagtatgtcgtgcactgtttgcagaaacaatggagctccatacatttctgaccaaaattaagagtgcgaaag

SEQ ID NO: 186019 - DNA, 4995 bp, Homo sapiens
  Payload ID: 16628
  Gene Symbol: SPIRE1
  Gene Name: spire-type actin nucleation factor 1
  ENST ID: ENST00000626255
  CDS Start-End: 1-1869
atggaactagaggtcattgaatctttgggaattattatttataaagcactggactatggtttgaaggagaatgaagaaagggaattaagccctcccctagagcagcttatcgatcacatggccaacacggtggaagctgacggtagcaatgatgagggctatgaggctgcagaagaaggcctgggagatgaagatgaaaagagaaaaatctcagctattcggtcatatagagatgtcatgaagttgtgtgctgctcatctccctactgaatcagatgcaccaaatcattatcaggcagtatgtcgtgcactgtttgcagaaacaatggagctccatacatttctgaccaaaattaagagtgcgaaagagaatcttaagaagattcaagaaatggaaaagagcgatgaatctagcacagacttggaagagctgaaaaacgctgactgggcacgattctgggtacaggtgatgagggatttgaggaatggggtaaaacttaagaaggtccaagagcggcagtacaaccctttgcccattgaatatcagctcaccccttatgagatgttaatggatgacattcgctgcaaaagatacaccttgcgaaaagtgatggtgaatggtgatattccccctcggttaaaaaagagtgctcatgaaatcatcctcgacttcatcagatccagacctcctttaaatccagtctcagccagaaaactgaaaccaactccaccacggccacggagcctccatgaaagaatattagaagaaattaaagcagaaagaaagctgcggcctgtatcaccagaggagattagacgtagcagattagatgtgactacccctgaatctacaaagaatcttgtggagtcatctatggtgaatggaggtttgacatcacaaacaaaagaaaacgggttaagtacctcacagcaggtgcctgcacagcggaagaagctcctcagagccccaactctggccgaactggacagctctgagtctgaggaagaaacgctgcacaagtcgaccagcagcagcagcgtgtctccctctttccctgaagagccagtcctggaggccgtgtccacaaggaagaagcctccaaaattcctgcccatatcatcaacaccccagccagagagacggcagccaccccagagacgacattccattgaaaaggaaacgcctactaacgtgaggcagttcctgccgccttccaggcagagttcccgctctcttgaggaattctgctacccagtggaatgcctcgctcttactgtggaagaagtgatgcatattcgccaggtcctggtgaaggcagagctggaaaaataccaacagtataaagacatctacaccgccttgaaaaaaggaaagctctgcttttgttgccgaaccaggaggttttccttcttcacttggtcttatacctgtcagttctgtaagaggccggtgtgctcacagtgttgcaaaaagatgcggctgccctccaaaccatactccactcttcctatcttttcattgggaccttctgctctgcaaagaggggaaagtagtatgaggtcagaaaaaccctccactgcccatcatcggccacttcggagcattgccaggttctcctcaaaatctaagtctatggacaaatcagatgaagaactccagtttcccaaagagttgatggaggactggagcaccatggaggtgtgtgtggactgcaagaagttcatttcggaaatcatcagttcaagccggcgcagtctggtgttggccaacaaaagggcccgattgaaaaggaaaacgcagtctttctacatgtcctcgccaggcccctcggagtactgcccttcagagaggacgatcagtgagatctgagcctcgtgcctttcagctgcttttgtgctacgagtcagcgtccgtgcgcgaggacactgagccgggctggctctcctttctgtggttttatttaatgggcttgaatttgcattagatcagatttttgccgcatcacattgttccacagactgaatgctgtgttcgtatcgattgatgaaacgtgacaggtccgccaattgctcgtttgcactgagagaggacaacagtttgaaacttacttttgtgtgtgtgtggctttggaagccagtagctacttccttagttcagttctttactgttcctcgaataatctcctgactaaggcaaaaaaaaaaagcttctcctacgagaatcagtctaacagagatgccgatgtcagcacagccctaagcagtaagtcatattggcatttccacgtgactgtgtttctatcccgtgtacagagagatccagagccctacactccacgacctgggggctcacagcacagaacctagaagcacctgctgacactcttcaactgatttttaaatgttgttgcttggagataaaaattacataagggactttttgcctgcattctagtgcaaaacatctgaagagctgtacacccacaagggtgactatttcccctgagtggccgtgttgtcccagtgccctggttcagtgtctcctgagtggatgacaggtcttcattctctatcttgaatgtattatggttactaatagttttataatggaggtctaagaattaaagttgtgtgggagtttcaggacaaaggaaggctaaaagtttgtcaagacgttgagcgtattttggttacctatgagaagggttgtgacagtgtacagtggcagctgttggccacgctgcagaaatgagctggagctcatgggttttcagctacatttttcataactttgtagtacatccatcttgagtaaattaagccacaatttggtacctagggtctcaaactaaaatttatttttataaatgaattttaaaagaaaaaatatctacttcttttaaagttagaagaaaattaacctgctgacaggcaacatttttggggtgctttctgcactagttttccttgtaaatgatttgagtgagtaggtttggtttctgacgaaagtagactggagggtagcattgtatgcctcaaatgtctcagtgtgtttggctcatacgtgggctatactgtattattttggtatgcttacaaatgactaaccaatcaaattgtcattaatgtttggaaaatctgttaatgcacatgcacaataatttcctgaaagccataggacatgtctgtagtcagcaccacgatagcaccgtttcatgaaaggcatggcggctgcatttcataccacatcaaaatacagtaacatttctatactaaattaacagtaatacctcaaaactgctccggtagtagtttttaatggattgaaatttacagtttagtaaaaggcttaaaattacttatacttatgaaataaactttaccagttgactaaaataatgcatgttaacagttggtctgtatttgcatgtaaaagtgggccaccagagaacccttattgattacttaagtgtttacattattttaaagactcctgtttaagagctttcagaattgtactgggtgaatctcatttataaaacttcctaagagactatctgaactctatactccagacagttaggtgggagtataaatctaccccttttgatgaccccaggcttgagtttttaaaatgactacccagaagggcacaagggggaaggaaatggtatttgtatatgtatataaatatgcacctaggagaatgtgctttttaaaataatgactactgtttttattaaaacataagaaactacacccccaaaataagactttcattcacattcacaaagcaaacatctagtacatgtctttcacttcactttatgatagtgtattggatgatttgggcattacgatcacctcttaccacagcacagaacatacattcttcaacagcattaacggagtttgccaagtgcattaaagaggtcacgtggagggtacgttcatatgaaacaatctgcagaaagtggggtaagaaagggcacatggcacagttaaagttgtagaaatcaaattactatcattttttgttgccaaaacaaagtcttacatttaacccccctttctaccacccccctccacacttcacgtcagctacatagtttccacagggtaattcactaagagcttgtggagcttggttttaaaatccttagcctggtctgactttaggcatagcttccagttcttccttccgtgtcctggtttcttgttcagttttacttctaatccaacaacaaaagaaatgtctggctggtctcagctagagtctgatgtgtcttagagcatgtgtgcgtatctgaaccatcatccctgctctcatctcagctccctccaggcctgagcaccggttccttttgtcccatacgtcatgaagtcacactattgggaaacctgtgcttccctctccatggcttaactccctgtcagtgtcggagtgtataagaatgcttgtaaatactgtaatatatttattaatatttgaaaggcattcattcagtggacagtgggaattaactctcccaaggcaagtgaaaatgaatgattgacgtacgttgatttaacaatcttactagattttaattcttaaggatttcaaatgaaaccagaaggtggttatgtaagaggcttaaaatgatcttatgtttaaagagattctgttattagcaccatgaactcgtactatgaaatttttaagccttttatttttctaactatattactgtaggactggatattaggtgtcatataggaaacacaaaagtttattgctgtttgctaaagcaaaatagcagaaaattttgtatatgcaaaactgttgaaggaccatagagaaatgtgtactactgacggggcttttactaggcttcctgcgtgtgtaaaagtcgaggtattgctggcattcagggtgacatgatggtactaaatgttttccattaaagtcttctattttaaaatttagagaaaaataaaatggctttccatcaga

SEQ ID NO: 186020 - DNA, 3235 bp, Homo sapiens
  Payload ID: 16629
  Gene Symbol: SPIRE2
  Gene Name: spire-type actin nucleation factor 2
  Uniprot ID: Q8WWL2
  ENST ID: ENST00000378247
  CDS Start-End: 44-2188
atggacgcgggtccggcgcgcgggaggcgatgacggccccgccatggcccgggcgggcagctgcggcggcgccgcggcgggcgcagggcggccggagccctgggagctgtccctggaggaggtgctgaaggcctacgagcagccgctcaacgaggagcaggcgtgggccgtgtgcttccagggctgccgcgggctgcggggctcgccgggccggcgcctgcgggataccggggacctcctgctgcgcggggacggctcggtcggggcgcgggagcccgaggccgcggaacctgcaaccatggtcgtgccactagccagctcggaagcccagaccgtgcagtccctcggcttcgccatctaccgcgcgctggactgggggctggacgagagcgaggagcgcgaactcagccctcagctggagcggctcatcgacctcatggccaacaacgacagcgaggacagcggctgcggtgccgccgatgagggctacgggggtcccgaggaggaggaggaggccgagggcgtcccccgcagcgtgcgcacctttgcccaggccatgcggctgtgcgcggcgcggctgaccgacccccggggcgcacaggcgcattaccaggccgtgtgccgcgcgctcttcgtggagacgctggagctgcgggccttcctggccagggtccgggaggccaaggagatgctgcagaagcttcgggaggacgagccgcatctggagacgcctcgggcagagctggacagcctgggtcacacagactgggcccgactgtgggttcagctcatgcgggagctccgccgcggagtgaagctgaagaaggtgcaagagcaggagttcaaccccctccccaccgagttccagctcacgcccttcgagatgctgatgcaggacatccgggcccggaactacaagctgcgcaaggtcatggtggatggggacatcccgccccgggtgaagaaggacgctcacgagctcatcctggactttatccgctcacggcctccactgaagcaggtctctgagaggcggctgcgcccgttgccaccaaagcaaaggtccctgcatgagaagatcctggaggagatcaagcaggagcggaggctgcgcccggtgcggggcgagggctgggctgcccgcgggtttggctctctgccctgcatcctcaacgcctgctccggagatgccaagtccacctcctgcatcaacctgtcagtcacagatgctgggggcagcgcccagcgcccgcggccccgcgtgctgctcaaggcgcctaccttggctgaaatggaagagatgaatacatctgaggaagaagagtctccgtgtggggaggtgacgctgaaacgggaccgctccttctcagagcatgacctggcccagctccgaagtgaggtggcctctggcctgcagtcggccacccaccccccaggagggacggagccaccacggccccgagctggcagtgcgcatgtgtggaggcccggctcccgagaccagggtacctgtcccgcgagtgtctctgaccccagccaccccctactcagcaaccggggctcctcgggggacagacccgaggcctccatgacccccgatgccaaacacctgtggctggagttcagccaccccgtggagagcctggcgctgactgtggaagaggtgatggacgtgcgccgtgtgctggtgaaggccgagatggaaaagtttttgcagaacaaggagctcttcagcagtctgaagaaggggaagatttgctgctgctgccgggccaagttcccgctgttctcgtggccgcccagctgtctcttctgcaagagagccgtctgcacttcctgtagcataaagatgaagatgccttctaagaaatttggacacatccctgtctacacactgggctttgagagtcctcagagggtatcagctgccaaaaccgcgccaatccagagaagagacatctttcagtctctgcaagggccacagtggcagagcgtggaggaggcgttcccccacatctactcccacggctgtgtcctgaaggatgtctgcagtgagtgcaccagctttgtggcagacgtggtgcgttccagccgcaagagcgtggacgtcctcaacactacgccacgacgcagtcgccagacccaatccctctacatccctaacaccaggactcttgacttcaagtgacagccccaggtggccaggcctccaggaggcaccaggcaggccctgtatcaggctaggacgctctgagctgtgcatgtacatatatacatatatagatacatttataatatatacacacagtctatatatttatatacactgtttcctggccccagagctcatttgggttcaggcgcacttcaaaaccctccctgggggaggctgtttcttctcaggattccttgccagggaggaaggggagggaacagggtgggttttctcactgaagagagaaagcagaaggttctagatcctggcacagactgcatcccatgttcccatgctcttctccgtccccaggaatgcgaacggcagtttcccttccccagtggacgtctaggtggggacagggtatcttggctcccagctggaccagagtgccctgcttgcctctgctctccctttgtggggactcaggcagcagaggcatctgggaagtctctgagtaggcagggtcctcctgggaggcacccccacctgtttgaaaggtctggccaggcgtggtggttcaggcctgtaattccagcactttgggaggccgaggagggaggatcacctgaggtcaggagtttgagaccagcctggccaacatgatgaaatgttgtctctactgaaaatgcaaaaattagccaggtatagtggcaggaacctgtaatcccagctacaggggaggctgaggcaggagaatcgcttgaacccgggaggtgtaggttgcagtgagccgagattgcaccactgcactccagcctgggcgacagagcgagactctgtctcgaaaaaaaaaaaggtccgtgccaagctgctccctgcccttgccctttccctttccctggggtccaaaccacatgtgtcctgcctctcctggccctaccacattctggtgctgtcctcactcgcccctggcccagaggctcctgaagatgctgggcggtcctggcacagggaggagcagctctgtaaatctgtgcacatggccactcttggcctaataaaggaggtctcacagtc

SEQ ID NO: 186021 - DNA, 2172 bp, Homo sapiens
  Payload ID: 16629
  Gene Symbol: SPIRE2
  Gene Name: spire-type actin nucleation factor 2
  Uniprot ID: Q8WWL2
  ENST ID: ENST00000393062
  CDS Start-End: 53-2053
cgcggctgcatggacgcgggtccggcgcgcgggaggcgatgacggccccgccatggcccgggcgggcagctgcggcggcgccgcggcgggcgcagggcggccggagccctgggagctgtccctggaggaggtgctgaaggcctacgagcagccgctcaacgaggagcaggcgtgggccgtgtgcttccagggctgccgcgggctgcggggctcgccgggccggcgcctgcgggataccggggacctcctgctgcgcggggacggctcggtcggggcgcgggagcccgaggccgcggaacctgcaaccatggtcgtgccactagccagctcggaagcccagaccgtgcagtccctcggcttcgccatctaccgcgcgctggactgggggctggacgagagcgaggagcgcgaactcagccctcagctggagcggctcatcgacctcatggccaacaacgacagcgaggacagcggctgcggtgccgccgatgagggctacgggggtcccgaggaggaggaggaggccgagggcgtcccccgcagcgtgcgcacctttgcccaggccatgcggctgtgcgcggcgcggctgaccgacccccggggcgcacaggcgcattaccaggccgtgtgccgcgcgctcttcgtggagacgctggagctgcgggccttcctggccagggtccgggaggccaaggagatgctgcagaagcttcgggaggacgagccgcatctggagacgcctcgggcagagctggacagcctgggtcacacagactgggcccgactgtgggttcagctcatgcgggagctccgccgcggagtgaagctgaagaaggtgcaagagcaggagttcaaccccctccccaccgagttccagctcacgcccttcgagatgctgatgcaggacatccgggcccggaactacaagctgcgcaaggtcatggtggatggggacatcccgccccgggtgaagaaggacgctcacgagctcatcctggactttatccgctcacggcctccactgaagcaggtctctgagaggcggctgcgcccgttgccaccaaagcaaaggtccctgcatgagaagatcctggaggagatcaagcaggagcggaggctgcgcccggtgcggggcgagggctgggctgcccgcgggtttggctctctgccctgcatcctcaacgcctgctccggagatgccaagtccacctcctgcatcaacctgtcagtcacagatgctgggggcagcgcccagcgcccgcggccccgcgtgctgctcaaggcgcctaccttggctgaaatggaagagatgaatacatctgaggaagaagagtctccgtgtggggaggtgacgctgaaacgggaccgctccttctcagagcatgacctggcccagctccgaagtgaggtggcctctggcctgcagtcggccacccaccccccaggagggacggagccaccacggccccgagctggcagtgcgcatgtgtggaggcccggctcccgagaccagggtacctgtcccgcgagtgtctctgaccccagccaccccctactcagcaaccggggctcctcgggggacagacccgaggcctccatgacccccgatgccaaacacctgtggctggagttcagccaccccgtggagagcctggcgctgactgtggaagaggtgatggacgtgcgccgtgtgctggtgaaggccgagatggaaaagtttttgcagaacaaggagctcttcagcagtctgaagaaggggaagatttgctgctgctgccgggccaagttcccgctgttctcgtggccgcccagctgtctcttctgcaagaggtctctgcaagggccacagtggcagagcgtggaggaggcgttcccccacatctactcccacggctgtgtcctgaaggatgtctgcagtgagtgcaccagctttgtggcagacgtggtgcgttccagccgcaagagcgtggacgtcctcaacactacgccacgacgcagtcgccagacccaatccctctacatccctaacaccaggactcttgacttcaagtgacagccccaggtggccaggcctccaggaggcaccaggcaggccctgtatcaggctaggacgctctgagctgtgcatgtacatatatacatatatagatacatttataatatatacacaca

SEQ ID NO: 186022 - DNA, 1823 bp, Homo sapiens
  Payload ID: 16629
  Gene Symbol: SPIRE2
  Gene Name: spire-type actin nucleation factor 2
  ENST ID: ENST00000563972
  CDS Start-End: 5-304
cgccatggcccgggcgggcagctgcggcggcgccgcggcgggcgcagggcggccggagccctgggagctgtccctggaggaggtgctgaaggcctacgagcagccgctcaacgaggagcaggcgtgggccgtgtgcttccagggctgccgcgggctgcggggctcgccgggccggcgcctgcgggataccggggacctcctgctgcgcggggacggctcggtcggggcgcgggagcccgaggccgcggaacctgcaaccatggtcgtgccactagccagctcggaagcccagctgcacagatgaggggcacagctgacgtctgcagggccggcctcccagacacagagccggggtcagggagacgacttcaggtgcaaacaggaaaaatcagcctggtgaccagtgccccgaaaccccacccgaccaaaactggaacctcaccgcagggcagggccttcctctcccattcacctgccctgaagtcatgtctggaacgtcatgtttccactttctactgcctttttagttttctttctttgttttttttgcttttgttcattttattttattttattgttttgagatggagtcgcgctctgtcgcccaggctggagtgcagtggtgtgatctcggcttactgcaagctccgcctcccgggttcacacctttctcctgcctcagcctcccaagtagctgggactactggtgcccgccaccacgcccggctaatttttttctatttttagtagagacggggtttcaccgtgttagccaggatggtcttgatgtcctgaccttgtgattcacctgcctcggcctcccaaagtgctgggattacaggagtgagccaccgcgcccggccttattttattttttaatagagatgtctcactatgttgcccggactagtctcaaactcctgggctcaagccatcctcccacttggcctcccaaagtgctgggattacagttctgagccactgtgcctggcctctttttttttttgagatagaatctccctctgtcacccaggttggactgcagtggtgcgatctcagctcactgcaacctcggctagttgcagcgcaacctccgtctcctgggttcaagcaattctcctgcctcagcctcccgagtagctgagattacaggcgcatgccaccacgcctggctaatttttgtgtttttttttgtttttgagacagagtctctctctgtcaccaggctggagtgcagtggcgtgatcttggctcactgcaacctccgcctcccgggttcacgccattctcctggccagcctctcaagtagctgggactacaggcgcccgccaccatgcccggctaatttttgtatttttagtagaagtggggtttcaccatgttggccaggatggtctcaaactcctgacctcatgattcacccacctcagcctcccaaactgctgggattacaggtgtgagccatcacgcccagcctttttttttttttttttagatctaccctcttgttgcccagggggagtccagtggcgtgatcttggctcactgcaaccgccgcctcccgggttcaagcaattctcctgcctcagtctcccgagtgtcttctgtcttttgtaaaagtttttcatgcccaagtgagattaattgtttaaaaaaaaaaaaacaagaagaaaacaacatagatttaccgcaagacctattgatatattattaaacatggtggtatacccagggtgggtgtgacacagaccaaaagaggctgtgtgttctgttgttgataatttaaaaacaataataaaaccgaagtctatgtcaccacaaa

SEQ ID NO: 186023 - DNA, 1369 bp, Homo sapiens
  Payload ID: 16629
  Gene Symbol: SPIRE2
  Gene Name: spire-type actin nucleation factor 2
  ENST ID: ENST00000566337
  CDS Start-End: 1-123
gggctgcggggctcgccgggccggcgcctgcgggataccggggacctcctgctgcgcggggacggctcggtcggggcgcgggagcccgaggccgcggttgaagaggtcagaaacccaggatgatccacctgtcaggggtcagcacctggaccctcaactgccactgtaagctcctctcggtacatgctcacaggttctggggttagaacacagacagctttaggggccgtgattctgccgactgcagcggaccgggggccgagaatctgagggagtgcccacaacccacctccagatcctcctccactgtctccagaacctgcaaccatggtcgtgccactagccagctcggaagcccagaccgtgcagtccctcggcttcgccatctaccgcgcgctggactgggggctggacgagagcgaggagcgcgaactcagccctcagctggagcggctcatcgacctcatggccaacaacgacagcgaggacagcggctgcggtgccgccgatgagggctacgggggtcccgaggaggaggaggaggccgagggcgtcccccgcagcgtgcgcacctttgcccaggccatgcggctgtgcgcggcgcggctgaccgacccccggggcgcacaggcgcattaccaggccgtgtgccgcgcgctcttcgtggagacgctggagctgcgggccttcctggccagggtccgggaggccaaggagatgctgcagaagcttcgggaggacgagccgcatctggagacgcctcgggcagagctggacagcctgggtcacacagactgggcccgactgtgggttcagctcatgcgggagctccgccgcggagtgaagctgaagaaggtgcaagagcaggagttcaaccccctccccaccgagttccagctcacgcccttcgagatgctgatgcaggacatccgggcccggaactacaagctgcgcaaggtcatggtggatggggacatcccgccccgggtgaagaaggacgctcacgagctcatcctggactttatccgctcacggcctccactgaagcaggtctctgagaggcggctgcgcccgttgccaccaaagcaaaggtccctgcatgagaagatcctggaggagatcaagcaggagcggaggctgcgcccggtgcggggcgagggctgggctgcccgcgggtttggctctctgccctgcatcctcaacgcctgctccggagatgccaagtccacctcctgcatcaacctgtcagtcacagatgctgggggcagcgcccagcgcccgcggccccgcgtgctgctcaaggcgcctaccttggctgaaatggaagagatgaatacatctgaggaagaagagtctccgtgtggggagg

SEQ ID NO: 186024 - DNA, 3120 bp, Homo sapiens
  Payload ID: 16630
  Gene Symbol: SPSB1
  Gene Name: splA/ryanodine receptor domain and SOCS box containing 1
  Uniprot ID: Q96BD6
  ENST ID: ENST00000328089
  CDS Start-End: 342-1163
gctttttctcctccgcacagaagtcgcgctcgggcagcctgcgcgctcgcagcaggaaccaggctccaggcgccggcgccggggccggggccgcggggaggaggcgacttcgctccctgcggcgggcgcggcccgggcgcccgagcctcctcggccttggagagcagcggcggcggcggcaccccgggcgcggcaatactgaacactgcgcagcttgcagaggtctcctggcagccctcattaggaattctgtctggccccgatcagaatactggagacgagaccacgagattgatgagtttgccttgggagtcggtaagaaggtgaagccaggggcgaacatgggtcagaaggtcactggagggatcaagactgtggacatgagggaccccacgtacaggcccctgaagcaggagctccagggtctggattactgcaagcccacccggctggatctgctactggacatgccccctgtgtcctatgatgtccagctgctgcattcatggaacaacaacgaccgatcgctcaatgtctttgtgaaggaggacgacaagctcatctttcaccggcatccggtggcccagagcacggacgctatcaggggcaaagtcgggtatacccgtgggctgcacgtgtggcagatcacgtgggccatgagacagcggggcacacacgccgtggtgggggtggcgacggcagacgcccccctgcactctgtcgggtacacaaccctcgtggggaataaccacgagtcctggggctgggacttggggcgcaaccggctctaccacgatggcaagaaccagccaagcaaaacatacccagcctttctggaaccagatgagacattcattgtccctgactccttcctggtagccctggacatggacgacgggactctgagcttcattgtggatggacagtacatgggagtggcttttcggggactcaagggcaaaaaactgtatcctgtagtgagtgccgtctggggccactgtgagatccgaatgcgctacttgaacggactcgatcccgagccgctgccgctcatggatttgtgccgtcgctcggtgcgcctggccctggggagggagcgcctgggggagatccacacgctgccgctgccggcttccctcaaggcctacctcctctaccagtgacgttcgccatcataccgccagcgcgacagccacctggtgccaactcactgagccgcctgccgctggggccgccgcaccctgcaccttggaccggcatccgtagccatggacagaggtccctggtcttccctcatcctccgtggctgcctccatgggacaaggaccgattccaacacaggctcctctttcccccttcccgacatcagcagaaggcagcatccctgcatgccgtccgtatacaacccctctttgaaaaaagacacagagaataaactcctacgaaagccctacattgagctccaatctgctcggggtgggacgggtgcttcccacacctctgggagaaggctgcagccacctgggggtcccagggtggtgggggtggcaggtggtaccacagctctgagagcagataccaggggtactaagaggtgcttagacaagggctggtgcccggcccagggtgcccagcggggccatgccatggcagataaagctcaggacgtcaaaaactcaccatggaccccaaggcagaaaccaagaactgtctgcaggcaaataagcacccagcacccatcctggctgccggtgccccgtaccctgtatttattcttttaacaataacaaaagccatttatttattccatctagaaaggaaaccctgtttcagtcccctctctctggctgttctgttactttccttccacctgtgccctccctgggatatgtatgcctcgcccgccctccctgggcacatgtgcacacgtgcccaggcacaagtatgtctctgggtcccttgccctgcagtttccagggggctctgctccaagttccctagcgggcccctcagggagaaatagcctcacgtgcaatctgggtgtcttcgggggcccgtctggaagggctgcagcaattcccctgtgtctccaggtaaccagctaactcttgggctcaggcacccttgcacagggttgcatttctttagtcttctgtgggtcttttgatgtgggtttgattttgcttttgcttttctagctgagatttcccaagtgcatcctcagaagctctgggtgtgccagaggacccccagaactaagaagggagggcgagtgggtctccattccccgagaagccgggggcagggtgggatggggaagaccaggagcagagtcgagcctcacagaagccagcgcgggtctctgctcagcaccccagccggggctctggacccagggtaacagccccagttcatcccaacccctctcagagcctcaagaggggtagctcggctgccggaagagaggggtgccctatccctggcaacccctccacgtagcgtaccccagcacctgccaccgcctttgccatttctttgagcttgaagttaactctcttagagtctaactttggttcatttctgcacaggtacaatagatgactttatttgtttaaaatgtttaatatatatacatacatatatatatatttgtctgtaagaattatgttttaaacagctgctgtagagtacctttttttaagtaaatcttacagtggagtatattttttaaagcacaaaattggtgccaagactgggtgagaaatgtacattacccccttattattttgacggttttttttttcggggcaggggaccttacctgtaagacttttaaagattttcctccctcctgtttcaggtgggtcacattctgatgaatgtttcccttgtacagatcccagcttatggccttgacccagccgtcctcacagatgccgggtgaccctctagctctctctgcatctcccaccccccgacaccctgggaccctcgaccccacccttctttcctaccagcccagagccttgtggcttgtacagttttgaaactcccgttctattttatgatggttgataatagtcagtaacctaataaaggaacgtttgttaaaatatcaaa

SEQ ID NO: 186025 - DNA, 1439 bp, Homo sapiens
  Payload ID: 16630
  Gene Symbol: SPSB1
  Gene Name: splA/ryanodine receptor domain and SOCS box containing 1
  Uniprot ID: Q96BD6
  ENST ID: ENST00000357898
  CDS Start-End: 330-1151
ccctctctggaacactgtctccactgagttttaggtaagtgtgtgacagacaaacgagcagaagcttggagaagctcagggtggatcttggtggccggagctactgtctcggcgcatgagcttggaagcttcaggaagcagggctggggaagcaccctccaggctgcagttccagggaaggcaatactgaacactgcgcagcttgcagaggtctcctggcagccctcattaggaattctgtctggccccgatcagaatactggagacgagaccacgagattgatgagtttgccttgggagtcggtaagaaggtgaagccaggggcgaacatgggtcagaaggtcactggagggatcaagactgtggacatgagggaccccacgtacaggcccctgaagcaggagctccagggtctggattactgcaagcccacccggctggatctgctactggacatgccccctgtgtcctatgatgtccagctgctgcattcatggaacaacaacgaccgatcgctcaatgtctttgtgaaggaggacgacaagctcatctttcaccggcatccggtggcccagagcacggacgctatcaggggcaaagtcgggtatacccgtgggctgcacgtgtggcagatcacgtgggccatgagacagcggggcacacacgccgtggtgggggtggcgacggcagacgcccccctgcactctgtcgggtacacaaccctcgtggggaataaccacgagtcctggggctgggacttggggcgcaaccggctctaccacgatggcaagaaccagccaagcaaaacatacccagcctttctggaaccagatgagacattcattgtccctgactccttcctggtagccctggacatggacgacgggactctgagcttcattgtggatggacagtacatgggagtggcttttcggggactcaagggcaaaaaactgtatcctgtagtgagtgccgtctggggccactgtgagatccgaatgcgctacttgaacggactcgatcccgagccgctgccgctcatggatttgtgccgtcgctcggtgcgcctggccctggggagggagcgcctgggggagatccacacgctgccgctgccggcttccctcaaggcctacctcctctaccagtgacgttcgccatcataccgccagcgcgacagccacctggtgccaactcactgagccgcctgccgctggggccgccgcaccctgcaccttggaccggcatccgtagccatggacagaggtccctggtcttccctcatcctccgtggctgcctccatgggacaaggaccgattccaacacaggctcctctttcccccttcccgacatcagcagaaggcagcatccctgcatgccgtccgtatacaacccctctttgaaaaaagacacagagaataaactcctacgaaagccc

SEQ ID NO: 186026 - DNA, 1007 bp, Homo sapiens
  Payload ID: 16630
  Gene Symbol: SPSB1
  Gene Name: splA/ryanodine receptor domain and SOCS box containing 1
  Uniprot ID: Q96BD6
  ENST ID: ENST00000377399
  CDS Start-End: 186-1007
tcctgctcaccggttgtttgtctttccgtccattaggcaatactgaacactgcgcagcttgcagaggtctcctggcagccctcattaggaattctgtctggccccgatcagaatactggagacgagaccacgagattgatgagtttgccttgggagtcggtaagaaggtgaagccaggggcgaacatgggtcagaaggtcactggagggatcaagactgtggacatgagggaccccacgtacaggcccctgaagcaggagctccagggtctggattactgcaagcccacccggctggatctgctactggacatgccccctgtgtcctatgatgtccagctgctgcattcatggaacaacaacgaccgatcgctcaatgtctttgtgaaggaggacgacaagctcatctttcaccggcatccggtggcccagagcacggacgctatcaggggcaaagtcgggtatacccgtgggctgcacgtgtggcagatcacgtgggccatgagacagcggggcacacacgccgtggtgggggtggcgacggcagacgcccccctgcactctgtcgggtacacaaccctcgtggggaataaccacgagtcctggggctgggacttggggcgcaaccggctctaccacgatggcaagaaccagccaagcaaaacatacccagcctttctggaaccagatgagacattcattgtccctgactccttcctggtagccctggacatggacgacgggactctgagcttcattgtggatggacagtacatgggagtggcttttcggggactcaagggcaaaaaactgtatcctgtagtgagtgccgtctggggccactgtgagatccgaatgcgctacttgaacggactcgatcccgagccgctgccgctcatggatttgtgccgtcgctcggtgcgcctggccctggggagggagcgcctgggggagatccacacgctgccgctgccggcttccctcaaggcctacctcctctaccagtga

SEQ ID NO: 186027 - DNA, 822 bp, Homo sapiens
  Payload ID: 16630
  Gene Symbol: SPSB1
  Gene Name: splA/ryanodine receptor domain and SOCS box containing 1
  ENST ID: ENST00000450402
  CDS Start-End: 217-822
cctctctccatttctctgaaaatgaactacacagtttgggggtgagttggcaggggctgcttcctgagcaatactgaacactgcgcagcttgcagaggtctcctggcagccctcattaggaattctgtctggccccgatcagaatactggagacgagaccacgagattgatgagtttgccttgggagtcggtaagaaggtgaagccaggggcgaacatgggtcagaaggtcactggagggatcaagactgtggacatgagggaccccacgtacaggcccctgaagcaggagctccagggtctggattactgcaagcccacccggctggatctgctactggacatgccccctgtgtcctatgatgtccagctgctgcattcatggaacaacaacgaccgatcgctcaatgtctttgtgaaggaggacgacaagctcatctttcaccggcatccggtggcccagagcacggacgctatcaggggcaaagtcgggtatacccgtgggctgcacgtgtggcagatcacgtgggccatgagacagcggggcacacacgccgtggtgggggtggcgacggcagacgcccccctgcactctgtcgggtacacaaccctcgtggggaataaccacgagtcctggggctgggacttggggcgcaaccggctctaccacgatggcaagaaccagccaagcaaaacatacccagcctttctggaaccagatgagacattcattgtccctgactccttcctggtagccctggacatggacgacgggactctgagcttcattgtggatggacagtacatgggagtggcttttcgg

SEQ ID NO: 186028 - DNA, 1236 bp, Homo sapiens
  Payload ID: 16631
  Gene Symbol: SPSB2
  Gene Name: splA/ryanodine receptor domain and SOCS box containing 2
  Uniprot ID: Q99619
  ENST ID: ENST00000524270
  CDS Start-End: 188-979
ggccggcggtctgcgccctgcgcgcctcggcttctttccgcccggctccttcagaggcccggcgacctccagggctgggaagtcaaccgagctcccttccaggtcaatccaaactggagctcaactttcagaagagaaagacgccccagcaagcctctttcggggagtcctctagctcctcacctccatgggccagacagctctggcagggggcagcagcagcacccccacgccacaggccctgtaccctgacctctcctgtcccgagggcttggaagagctgctgtctgcaccccctcctgacctgggggcccagcggcgccacggttggaaccccaaagactgttcagagaacatcgaggtcaaggaaggagggttgtactttgagcggcggcccgtggcccagagcactgatggggcccggggtaagaggggctattcaaggggcctgcacgcctgggagatcagctggcccctagagcagaggggcacgcatgccgtggtgggcgtggccacggccctcgccccgctgcagactgaccactacgcggcgctgctgggcagcaacagcgagtcgtggggctgggacatcgggcgggggaagctgtaccatcagagcaaggggcccggagccccccagtatccagcgggaactcagggtgagcagctggaggtgccagagagactgctggtggttctggacatggaggagggaactctgggctacgctattgggggcacctacctggggccagcattccgcggactgaagggcaggaccctctatccggcagtaagcgctgtctggggccagtgccaggtccgcatccgctacctgggcgaaaggagagcggagccacactcccttctgcacctgagccgcctgtgtgtgcgccacaacctgggggatacccggctcggccaggtgtctgccctgcccttgccccctgccatgaagcgctacctgctctaccagtgagccctgtgataccacagactgtgctgaggtcttgccaccacccctccccttggggaggtggggaggcactgctggcctagaccagctgctgaaagctggtgaggctgagcccctaccccaacccaagctctgcggaaatcaacagccccagagccacttggagggaggaagaaagggagccggcgttcaaggctatgacagtctgctacgcaaaacattttttcaagtaaaaatagtaagagatgttgttatagaaa

SEQ ID NO: 186029 - DNA, 679 bp, Homo sapiens
  Payload ID: 16631
  Gene Symbol: SPSB2
  Gene Name: splA/ryanodine receptor domain and SOCS box containing 2
  ENST ID: ENST00000432205
  CDS Start-End: 433-679
agacaaggtttccctctgtaacccaggctggagtgcagtggaacttctgagctcaagtagtcttcacatctcagccttccaagtagctgtgactagagcttgtgacagtccagccccttcagcctggagttccacctaccagtccccacatgtgctgtctctcaccaaggttgccagtgacctctgaccaaaacaatcttgggcgcaggagttagtcgctcaggcggctcaaaggtcttgacggtggagaacaccatccccagggattcccgacgcggtgatgccatcaaagcgttaattctgagatgggcctgcccgggtgcggactctgccgcactcccttccaggtcaatccaaactggagctcaactttcagaagagaaagacgccccagcaagcctctttcggggagtcctctagctcctcacctccatgggccagacagctctggcagggggcagcagcagcacccccacgccacaggccctgtaccctgacctctcctgtcccgagggcttggaagagctgctgtctgcaccccctcctgacctgggggcccagcggcgccacggttggaaccccaaagactgttcagagaacatcgaggtcaaggaaggagggttgtactttgagcggcggcccgtggcccagagcactgatggggcccggggtaagaggg

SEQ ID NO: 186030 - DNA, 1205 bp, Homo sapiens
  Payload ID: 16631
  Gene Symbol: SPSB2
  Gene Name: splA/ryanodine receptor domain and SOCS box containing 2
  Uniprot ID: Q99619
  ENST ID: ENST00000523102
  CDS Start-End: 157-948
cagaggcccggcgacctccagggctgggaagtcaaccgaggttcgggggcagcggcgagggctccgggcgagtcaatccaaactggagctcaactttcagaagagaaagacgccccagcaagcctctttcggggagtcctctagctcctcacctccatgggccagacagctctggcagggggcagcagcagcacccccacgccacaggccctgtaccctgacctctcctgtcccgagggcttggaagagctgctgtctgcaccccctcctgacctgggggcccagcggcgccacggttggaaccccaaagactgttcagagaacatcgaggtcaaggaaggagggttgtactttgagcggcggcccgtggcccagagcactgatggggcccggggtaagaggggctattcaaggggcctgcacgcctgggagatcagctggcccctagagcagaggggcacgcatgccgtggtgggcgtggccacggccctcgccccgctgcagactgaccactacgcggcgctgctgggcagcaacagcgagtcgtggggctgggacatcgggcgggggaagctgtaccatcagagcaaggggcccggagccccccagtatccagcgggaactcagggtgagcagctggaggtgccagagagactgctggtggttctggacatggaggagggaactctgggctacgctattgggggcacctacctggggccagcattccgcggactgaagggcaggaccctctatccggcagtaagcgctgtctggggccagtgccaggtccgcatccgctacctgggcgaaaggagagcggagccacactcccttctgcacctgagccgcctgtgtgtgcgccacaacctgggggatacccggctcggccaggtgtctgccctgcccttgccccctgccatgaagcgctacctgctctaccagtgagccctgtgataccacagactgtgctgaggtcttgccaccacccctccccttggggaggtggggaggcactgctggcctagaccagctgctgaaagctggtgaggctgagcccctaccccaacccaagctctgcggaaatcaacagccccagagccacttggagggaggaagaaagggagccggcgttcaaggctatgacagtctgctacgcaaaacattttttcaagtaaaaatagtaagagatgttgttatagaaa

SEQ ID NO: 186031 - DNA, 1496 bp, Homo sapiens
  Payload ID: 16631
  Gene Symbol: SPSB2
  Gene Name: splA/ryanodine receptor domain and SOCS box containing 2
  Uniprot ID: Q99619
  ENST ID: ENST00000519357
  CDS Start-End: 188-991
ggccggcggtctgcgccctgcgcgcctcggcttctttccgcccggctccttcagaggcccggcgacctccagggctgggaagtcaaccgagctcccttccaggtcaatccaaactggagctcaactttcagaagagaaagacgccccagcaagcctctttcggggagtcctctagctcctcacctccatgggccagacagctctggcagggggcagcagcagcacccccacgccacaggccctgtaccctgacctctcctgtcccgagggcttggaagagctgctgtctgcaccccctcctgacctgggggcccagcggcgccacggttggaaccccaaagactgttcagagaacatcgaggtcaaggaaggagggttgtactttgagcggcggcccgtggcccagagcactgatggggcccggggtaagaggggctattcaaggggcctgcacgcctgggagatcagctggcccctagagcagaggggcacgcatgccgtggtgggcgtggccacggccctcgccccgctgcagactgaccactacgcggcgctgctgggcagcaacagcgagtcgtggggctgggacatcgggcgggggaagctgtaccatcagagcaaggggcccggagccccccagtatccagcgggaactcagggtgagcagctggaggtgccagagagactgctggtggttctggacatggaggagggaactctgggctacgctattgggggcacctacctggggccagcattccgcggactgaagggcaggaccctctatccggcagtaagcgctgtctggggccagtgccaggtccgcatccgctacctgggcgaaaggagaggtgaggcctggggcagacgtggggagaactttctgtccctggtggcagtggtttgggatggaaactcttctgacaagagcagaggggatggaccttcatccagcctgcctcaacctctgttcagtgctgggaaaggctaggggtcttcacagctgttatttaatttaacccaacagcaatagaggtgaaacaggcttgagaaagcaactttctcaagttctcttggccagtaaatggtgaaccttcagaatggagggaggaactgcagggatgagagaattcaggagatatcaacccctgagcaagaggtgcaaagcgttaggtactgggtttgatgtacaggtccaaaagaaggatgggcagagccaggtacccaggctgtataccggattccctgggctctaacctgtctctgtgccacatacctacttccttcctcagccacacctctggatggagacactggggccctgggcaccagggaggagagcagtggaggaggcagggccttagggtggggcagcaggggaggagcctccccaggaactgactgggtccagggcttggagctgctctctgcagttgtgtgggctgtagagtggagggccatccctcctcacctcagccccagctcccaagcctctg

SEQ ID NO: 186032 - DNA, 1449 bp, Homo sapiens
  Payload ID: 16632
  Gene Symbol: SPSB3
  Gene Name: splA/ryanodine receptor domain and SOCS box containing 3
  Uniprot ID: Q6PJ21
  ENST ID: ENST00000301717
  CDS Start-End: 34-1101
agagcctgtgttttcttctagattctttccaccatggccagacgcccccggaacagcagggcctggcacttcgtcctgagtgcagcccgccgagacgcagatgcccgggccgtggctctagcaggctccactaactggggctacgactctgatgggcagcacagcgactcggactccgaccccgagtactccacgctgccgccatccatccccagtgcggtgcccgtgaccggcgagtccttctgtgactgtgctgggcagagcgaggcctccttctgtagcagcctgcactcggcccaccggggcagggactgccgctgcggagaggaagacgagtatttcgactgggtctgggatgacttaaataagtcatcagccaccctgctgagctgtgacaaccgtaaggtcagcttccacatggagtacagctgcggcacagcggccatccggggcaccaaggagctgggggagggccagcacttctgggagatcaagatgacctctcccgtctacggcaccgacatgatggtgggcatcgggacgtcggatgtggacctggacaaataccgccacacgttctgcagcctgctgggcagggatgaggacagctggggcctctcctacacgggcctcctccaccacaagggcgacaagaccagcttctcatcgcggttcggccagggctccatcattggcgtgcacctggacacctggcacggcacactcacctttttcaagaacaggaagtgtataggtgtggcagccaccaagctgcagaacaagagattctacccgatggtgtgctccacggcggcccggagcagcatgaaggtcacccgctcctgtgccagcgccacttccctccagtacctgtgctgccaccgcctgcgccagctgcggccagactcgggagacacgctggagggtctgccgctgccgccgggcctcaagcaggtgctacacaacaagctgggctgggtcctgagcatgagttgcagccgccgcaaggctccagtgtccgatccccaggcagcgacctccgcccaccccagcagtcgcgagcctcggccctgccagaggaagcgctgccgccggacctgactgacttcccagtggaactgccttcttgggctgggacagcccctttcctctgtcccttctttctctgtcccttccttccagccacactccagggcggagttggatgaggcccgtccggagggagccatctcttgctcccgaggctgggacagtcctttctgtgggggctctagggcccctctgctgctgtgctgggtggggaagcggctgccctgagccccaggtcttgtgggaggctgcgaggacgagagcctggctggagcccgcgttgctgttcccacagggcctcggtttttcctaacttgctctgcatgctgtcagcggctgccccgccgtcatagacttaaa

SEQ ID NO: 186033 - DNA, 580 bp, Homo sapiens
  Payload ID: 16632
  Gene Symbol: SPSB3
  Gene Name: splA/ryanodine receptor domain and SOCS box containing 3
  ENST ID: ENST00000569769
  CDS Start-End: 77-580
agacgtaccctccctcgctgcctgcctgcagcctgccctgcatgcaggatggccctgaggaaagattctttccaccatggccagacgcccccggaacagcagggcctggcacttcgtcctgagtgcagcccgccgagacgcagatgcccgggccgtggctctagcaggctccactaactggggctacgactctgatgggcagcacagcgactcggactccgaccccgagtactccacgctgccgccatccatccccagtgcggtgcccgtgaccggcgagtccttctgtgactgtgctgggcagagcgaggcctccttctgtagcagcctgcactcggcccaccggggcagggactgccgctgcggagaggaagacgagtatttcgactgggtctgggatgacttaaataagtcatcagccaccctgctgagctgtgacaaccgtaaggtcagcttccacatggagtacagctgcggcacagcggccatccggggcaccaaggagctgggggagggccagcacttctgggagatcaagatgacctctcccgtctacggcaccgacatgatggtgggcatc

SEQ ID NO: 186034 - DNA, 1784 bp, Homo sapiens
  Payload ID: 16632
  Gene Symbol: SPSB3
  Gene Name: splA/ryanodine receptor domain and SOCS box containing 3
  Uniprot ID: Q6PJ21
  ENST ID: ENST00000566339
  CDS Start-End: 332-1399
gatgacacggacctactttccggtcaacgcggcctgcggtaccacctcccacccgggtccaatgtgcgcgcgagctttgtctccaaccgcttgggaactgaccaataggaacgttggattaggactgacagttcctgaaacctctcggcaatagctttgtcacccgactcccgccccctctcccgaagctccgagacaggtgtgcccgcccctcgccgccggagccaatgggcgcagggggcggggattgtttacgtctcgctccggggcggaaagtgggtcagggccgggccggcggagcgcgcagcgggggctgcagattctttccaccatggccagacgcccccggaacagcagggcctggcacttcgtcctgagtgcagcccgccgagacgcagatgcccgggccgtggctctagcaggctccactaactggggctacgactctgatgggcagcacagcgactcggactccgaccccgagtactccacgctgccgccatccatccccagtgcggtgcccgtgaccggcgagtccttctgtgactgtgctgggcagagcgaggcctccttctgtagcagcctgcactcggcccaccggggcagggactgccgctgcggagaggaagacgagtatttcgactgggtctgggatgacttaaataagtcatcagccaccctgctgagctgtgacaaccgtaaggtcagcttccacatggagtacagctgcggcacagcggccatccggggcaccaaggagctgggggagggccagcacttctgggagatcaagatgacctctcccgtctacggcaccgacatgatggtgggcatcgggacgtcggatgtggacctggacaaataccgccacacgttctgcagcctgctgggcagggatgaggacagctggggcctctcctacacgggcctcctccaccacaagggcgacaagaccagcttctcatcgcggttcggccagggctccatcattggcgtgcacctggacacctggcacggcacactcacctttttcaagaacaggaagtgtataggtgtggcagccaccaagctgcagaacaagagattctacccgatggtgtgctccacggcggcccggagcagcatgaaggtcacccgctcctgtgccagcgccacttccctccagtacctgtgctgccaccgcctgcgccagctgcggccagactcgggagacacgctggagggtctgccgctgccgccgggcctcaagcaggtgctacacaacaagctgggctgggtcctgagcatgagttgcagccgccgcaaggctccagtgtccgatccccaggcagcgacctccgcccaccccagcagtcgcgagcctcggccctgccagaggaagcgctgccgccggacctgactgacttcccagtggaactgccttcttgggctgggacagcccctttcctctgtcccttctttctctgtcccttccttccagccacactccagggcggagttggatgaggcccgtccggagggagccatctcttgctcccgaggctgggacagtcctttctgtgggggctctagggcccctctgctgctgtgctgggtggggaagcggctgccctgagccccaggtcttgtgggaggctgcgaggacgagagcctggctggagcccgcgttgctgttcccacagggcctcggtttttcctaacttgctctgcatgctgtcagcggctgccccgccgtcatagacttaaaggactgcaataaatgtagagttgatgtctaacaccca

SEQ ID NO: 186035 - DNA, 2908 bp, Homo sapiens
  Payload ID: 16633
  Gene Symbol: SPSB4
  Gene Name: splA/ryanodine receptor domain and SOCS box containing 4
  Uniprot ID: Q96A44
  ENST ID: ENST00000310546
  CDS Start-End: 745-1566
cggcggcggaggagggggaggcggcggcggctgcagcatccagagctggccgtggcggccggcgcgccccgcgcacaaaagcacccagccccaggggagggcgatgaacacaccacatcccgggcccgggccccagctgctgctaccgctgcgtgcgctcagggcgctggggaagacgcccggcgcgccgggggccagcggccgaggcgcggcccgtgcgccctgagcgcgggactcgtcgccctccgggtcaggcgccaagcttccaagcggctagagcgcgggccttggagcgcccccaggatcgcttcagtaaggcgcttccccactccaggcccgacccccggcgcctgagcgccaacttcgccaagaacgctcctaactccaggccatcctgcagcgcagagggggcgctgctgccgggcatcagccgtgaggacgcgcccctggccgtgcggagagagccggcatttgcgggtcactcgggcgcccctgagtgggcggcggcggcagcagacccctctccagggagtccaggacctgccagcgctggggattcttcccgaacaggcgcttgccctctcttttatggagcttgggcccctgccgcagcccggtagaggctgtggaggtctaccgtccggaagcctggttcccagccccgtggcccattcctggctacggggagtggaggctcccacgaggtagcggtggcctgcagcggcctcctccccgcagtgaagcatgggccagaagctctcggggagcctcaagtcagtggaggtgcgagagccggcgctgcggccggccaagcgggagctgcggggtgcagagcccgggcggccggcgcggctggaccagctgttggacatgccagcggcggggctggctgtgcagctgcggcacgcgtggaaccccgaggaccgctcgctcaacgtcttcgtcaaggacgacgaccggctcaccttccaccggcaccccgtggcccagagcaccgacggcatccgcggcaaggtgggccacgcccgcggcctgcacgcctggcagatcaactggccggctcggcagcgcggcacccacgctgtagttggtgtggccacggcccgtgctcccctgcactccgtgggctacacggcgctggtaggcagtgacgccgagtcgtggggctgggacctgggccgcagccgcctctaccacgacggcaagaaccagcccggcgtggcctacccggcctttctggggcccgacgaggcctttgcgctgcccgactcgctgctcgtggtgctggacatggatgagggcacactcagcttcatcgtggatggccagtacctgggcgtggccttccgaggtctcaagggcaagaagctgtacccggtggtgagtgccgtgtggggccactgtgaagtcaccatgcgctacatcaacggccttgaccccgagcccctgccactgatggacctgtgccggagatccatccgctcggccctgggccgccagcgcctgcaggacatcagctccctgcccctgcctcagtctctcaaaaactatctgcagtaccagtgagccaagcctgatgggcagcacagacacagacacacaccgcagggcccgaccctcctgtcattcacagtcccatggcacataggggaaaggatctacccttctcctggctccccaggacactcagttctttcaaagaccaggatgtggtaccaactttggaaacgaaaggtctcttgccaacagtatctactgccctcgaggcagccctcccaagtcagacacctccttcggagccacagagagcctggagtctgcacctcctggaaatcctgccaccaaccaggacacagcagccaccgtattgatcagagagcctgtttccttattcaagagaatgaataaaacatttaggcaggagactttctattgtgtgccccgttgcagacagggccagggagaaattagccagtgcagggggaaaattgcctctgaataatgaatgatgaaagcctgacgccgtgcccctcctggcccatacgccttgccagggcggcaggattgtcacaccgttttaggactctgtgccactttgagagactgttcccaggaggcccaaccgcagacctggcaagtggacagtgcagtgtggagacaccttccggcttacctctttgaacgttgtttacctacccctttccacgtgctccccttcccagccactgactcacagttctctggatgcccagacacctctcttcagggaagatgagtctgactggtttgccccagggaagagcatatccttaccattattttaagtagcatttgcattttaaaagaggaatgcggagaggacagtacttagtccaaaggtgctaacgggggaactgggggcattgtgacacccaagtctgatgtgtcctgggttggggggccttcctggagtgtcagggtctctgggcaacgtccattcagggtgcggcatggctgtcacaaagctttatttgagcaaattattttttcactttaggagacttctacaagtttgtttcctgtttcaaatgtgtgtgtgatgtgctgtttatttatcagcttgaggtccatgggggcagccttgtgactggaagggtggatatgggagacacattctctacctgctccgagcctggtcctctcgcaggaatgctgctgctgcctccgccgccactgctgctgccacctcttatatgtttcagacactctctgcccagactcatttttaactggaaatcatcacagcagtgggatatcagagccccagacagcactgcctcttcctccccaccccactgcccccaccttaatgtgaatttgactgatgaatgaagagcgtttctaataaagtttgtcattcagtccttca

SEQ ID NO: 186036 - DNA, 1752 bp, Homo sapiens
  Payload ID: 16633
  Gene Symbol: SPSB4
  Gene Name: splA/ryanodine receptor domain and SOCS box containing 4
  ENST ID: ENST00000508126
  CDS Start-End: 1-271
cgtggtgctggacatggatgagggcacactcagcttcatcgtggatggccagtacctgggcgtggccttccgaggtctcaagggcaagaagctgtacccggtggtgagtgccgtgtggggccactgtgaagtcaccatgcgctacatcaacggccttgaccatggagtctcactcggttgccctggccaaagtgcagtggcacgatctcggctcactgcaacctccgcctcccgggttcaagctattcttctgcctcagcttcccgagtagctgggactacagccgagcccctgccactgatggacctgtgccggagatccatccgctcggccctgggccgccagcgcctgcaggacatcagctccctgcccctgcctcagtctctcaaaaactatctgcagtaccagtgagccaagcctgatgggcagcacagacacagacacacaccgcagggcccgaccctcctgtcattcacagtcccatggcacataggggaaaggatctacccttctcctggctccccaggacactcagttctttcaaagaccaggatgtggtaccaactttggaaacgaaaggtctcttgccaacagtatctactgccctcgaggcagccctcccaagtcagacacctccttcggagccacagagagcctggagtctgcacctcctggaaatcctgccaccaaccaggacacagcagccaccgtattgatcagagagcctgtttccttattcaagagaatgaataaaacatttaggcaggagactttctattgtgtgccccgttgcagacagggccagggagaaattagccagtgcagggggaaaattgcctctgaataatgaatgatgaaagcctgacgccgtgcccctcctggcccatacgccttgccagggcggcaggattgtcacaccgttttaggactctgtgccactttgagagactgttcccaggaggcccaaccgcagacctggcaagtggacagtgcagtgtggagacaccttccggcttacctctttgaacgttgtttacctacccctttccacgtgctccccttcccagccactgactcacagttctctggatgcccagacacctctcttcagggaagatgagtctgactggtttgccccagggaagagcatatccttaccattattttaagtagcatttgcattttaaaagaggaatgcggagaggacagtacttagtccaaaggtgctaacgggggaactgggggcattgtgacacccaagtctgatgtgtcctgggttggggggccttcctggagtgtcagggtctctgggcaacgtccattcagggtgcggcatggctgtcacaaagctttatttgagcaaattattttttcactttaggagacttctacaagtttgtttcctgtttcaaatgtgtgtgtgatgtgctgtttatttatcagcttgaggtccatgggggcagccttgtgactggaagggtggatatgggagacacattctctacctgctccgagcctggtcctctcgcaggaatgctgctgctgcctccgccgccactgctgctgccacctcttatatgtttcagacactctctgcccagactcatttttaactggaaatcatcacagcagtgggatatcagagccccagacagcactgcctcttcctccccaccccactgcccccaccttaatgtgaatttgactgatgaatgaagagcgtttctaataaagtttgtcattcagtccttc

SEQ ID NO: 186037 - DNA, 4990 bp, Homo sapiens
  Payload ID: 16634
  Gene Symbol: SYK
  Gene Name: spleen tyrosine kinase
  Uniprot ID: P43405
  ENST ID: ENST00000375746
  CDS Start-End: 134-2041
tcctctcagatttgtgtgcttcttcccttcccacattctatactgcccagcgcctgggattccagatctgcgtttgaatccaggaaagggaggtggacacctgcgcaggtgtgtgccctccggcccctgaagcatggccagcagcggcatggctgacagcgccaaccacctgcccttctttttcggcaacatcacccgggaggaggcagaagattacctggtccaggggggcatgagtgatgggctttatttgctgcgccagagccgcaactacctgggtggcttcgccctgtccgtggcccacgggaggaaggcacaccactacaccatcgagcgggagctgaatggcacctacgccatcgccggtggcaggacccatgccagccccgccgacctctgccactaccactcccaggagtctgatggcctggtctgcctcctcaagaagcccttcaaccggccccaaggggtgcagcccaagactgggccctttgaggatttgaaggaaaacctcatcagggaatatgtgaagcagacatggaacctgcagggtcaggctctggagcaggccatcatcagtcagaagcctcagctggagaagctgatcgctaccacagcccatgaaaaaatgccttggttccatggaaaaatctctcgggaagaatctgagcaaattgtcctgataggatcaaagacaaatggaaagttcctgatccgagccagagacaacaacggctcctacgccctgtgcctgctgcacgaagggaaggtgctgcactatcgcatcgacaaagacaagacagggaagctctccatccccgagggaaagaagttcgacacgctctggcagctagtcgagcattattcttataaagcagatggtttgttaagagttcttactgtcccatgtcaaaaaatcggcacacagggaaatgttaattttggaggccgtccacaacttccaggttcccatcctgcgacttggtcagcgggtggaataatctcaagaatcaaatcatactccttcccaaagcctggccacagaaagtcctcccctgcccaagggaaccggcaagagagtactgtgtcattcaatccgtatgagccagaacttgcaccctgggctgcagacaaaggcccccagagagaagccctacccatggacacagaggtgtacgagagcccctacgcggaccccgaggagatcaggcccaaggaggtttacctggaccgaaagctgctgacgctggaagacaaagaactgggctctggtaattttggaactgtgaaaaagggctactaccaaatgaaaaaagttgtgaaaaccgtggctgtgaaaatactgaaaaacgaggccaatgaccccgctcttaaagatgagttattagcagaagcaaatgtcatgcagcagctggacaacccgtacatcgtgcggatgatcgggatatgcgaggccgagtcctggatgctggttatggagatggcagaacttggtcccctcaataagtatttgcagcagaacagacatgtcaaggataagaacatcatagaactggttcatcaggtttccatgggcatgaagtacttggaggagagcaattttgtgcacagagatctggctgcaagaaatgtgttgctagttacccaacattacgccaagatcagtgatttcggactttccaaagcactgcgtgctgatgaaaactactacaaggcccagacccatggaaagtggcctgtcaagtggtacgctccggaatgcatcaactactacaagttctccagcaaaagcgatgtctggagctttggagtgttgatgtgggaagcattctcctatgggcagaagccatatcgagggatgaaaggaagtgaagtcaccgctatgttagagaaaggagagcggatggggtgccctgcagggtgtccaagagagatgtacgatctcatgaatctgtgctggacatacgatgtggaaaacaggcccggattcgcagcagtggaactgcggctgcgcaattactactatgacgtggtgaactaaccgctcccgcacctgtcggtggctgcctttgatcacaggagcaatcacaggaaaatgtatccagaggaattgattgtcagccacctccctctgccagtcgggagagccaggcttggatggaacatgcccacaacttgtcacccaaagcctgtcccaggactcaccctccacaaagcaaaggcagtcccgggagaaaagacggatggcaggatccaaggggctagctggatttgtttgttttcttgtctgtgtgattttcatacaggttatttttacgatctgtttccaaatccctttcatgtctttccacttctctgggtcccggggtgcatttgttactcatcgggcccagggacattgcagagtggcctagagcactctcaccccaagcggccttttccaaatgcccaaggatgccttagcatgtgactcctgaagggaaggcaaaggcagaggaatttggctgcttctacggccatgagactgatccctggccactgaaaagctttcctgacaataaaaatgttttgaggctttaaaaagaaaatcaagtttgaccagtgcagtttctaagcatgtagccagttaaggaaagaaagaaagaaaaaaaaaaaaggcctggatactgcttttgctgtctctgttatgagatggaagacttacatgtttgtgataaaaggggaccatgagaatgaattggcttggcttactttccccctgaaatcctctctcctgcagactgtcttgaagacctggtgactggtaaataaagccctgcatggaggctgcacagcaggggcaagaggcccatcccccagcatctcactgaggacagcttcaggctgccttcctctgaacgtggtccacaccttcctctcctccacagagagggtgccgccagaatcccctgtcgctttctgtgtctgcaatggggggcagcacagggatcaaagccatctaaagagtttccaaagaaagtattaattcagaacaagccaaagaccctgagcctcaccacaaacaggccttttggagtgtgaatttgagttgaagatacaagatcggagaatgattttctggtcttaactaatcctcatcttcatgtttgatctttaagaagtcatcacccattgatttcagttttgctgtacctcttgaaagttaaagagacatctcagcactttaggaggccgaggcgggtggatcacttgaggtaaggagtttgagactagcctggccaatatggtaaaaccccatctctactaaaaatacaaaaattagccgggcatggtggcatgtgtctgtagtcccagctactcgggaggctgaggcaggagaatcgcttgaacccaggaaacggaggtcgcagtgagccaagatcatgccactgcactccagcttgggcatcacagcgagactctgtcaaaacaaacaaacaaaaaaacaacttaaagaggtaatttagccatcattcttatgccagcagatataaataaacttggacccatctggtcttcagctaaacctgagacattttaaagtgcatggacagccatggacagcaggccctcctctaacaggggatgcaaggcatggagaaagacaatcagtacccaagctcagccacagaagacaggagtcactcatataacttgtgtttagaagtttttggtagccacgcacactttctgaaatcacactatctggtggtttaatcatatttttaaagacagaatccctgagtgctgagcagattctcaaaacacatttagaatccctgaaattagaaagatcaatgacaaaatatctgtcagccaggccacaaacaggtgtaaaattatgaaaggagtggttggatgtgccaagtttggtaaagtggtgactgcatctgagaaagaggctgtgaggctgaactcttggtggcttccttctgtaacttccagagggagtcttcaacacaggccccgtgctcgtaggaatacggtagcacctatgtaggaagtgcgtggagttttctgtcttctttctgtgtgatttttggcctttttatcagcacttctcccctcccaggagcctggggatgccaaacatccagaatgtgatgggacaagatgggggcaggggcctcacctccctgcagaggtccggccaggtctccttgtccctggacaatctcctgagcctctctgcttggtggagcaggcacctgtgtgcagaattcccactgtggccagcacgaggaagtcttttctagtgaaaatgtgtcttgtggtcaggaataattatcctttcccctgtagccaccaaggagggcaaatagagaaaggtaacctaattgaaggattggtcatgtgaaaagggctacatttgggaagctgggaaaggcctccaggcttctagagcagctagcttgggctggattctcatacccaggctgccccttggattgttctacccaagcttttccctggggtctgggctcactccataaggtaaggtgccttttaccttatggtccttctttagcaggtaacaaaggagcatcaggggcaggctgccctggtggcatcacactggctagtgaggccgtgaatatcttgtcccccagcagggccgacagtttctatcacagaaaacagtgtgttcagtggtgaaaatcgttgcatgcatgttttcatctgagcgtgtccttctcccatactccctatcagccagccctgcctgtagctgctgtatggtgattgcacttggacatcagtccaatgactgcaagtcggcctggattttcacttgcagaggctacagctgcattgtcaggtctcccagccctgcagagagctccctccactggttagcagtgtgttgtgttttccattcatttcagaagagctacattgtgtcactggacatttttaaaaactgtgatttttaataaaaatttaaaatttg

SEQ ID NO: 186038 - DNA, 4908 bp, Homo sapiens
  Payload ID: 16634
  Gene Symbol: SYK
  Gene Name: spleen tyrosine kinase
  Uniprot ID: P43405
  ENST ID: ENST00000375747
  CDS Start-End: 121-1959
ctttctggtaaggagaggaggttacggggaacgacgcgctgctttcatgccctttcttgttctaccttcatcggccgaggtggacacctgcgcaggtgtgtgccctccggcccctgaagcatggccagcagcggcatggctgacagcgccaaccacctgcccttctttttcggcaacatcacccgggaggaggcagaagattacctggtccaggggggcatgagtgatgggctttatttgctgcgccagagccgcaactacctgggtggcttcgccctgtccgtggcccacgggaggaaggcacaccactacaccatcgagcgggagctgaatggcacctacgccatcgccggtggcaggacccatgccagccccgccgacctctgccactaccactcccaggagtctgatggcctggtctgcctcctcaagaagcccttcaaccggccccaaggggtgcagcccaagactgggccctttgaggatttgaaggaaaacctcatcagggaatatgtgaagcagacatggaacctgcagggtcaggctctggagcaggccatcatcagtcagaagcctcagctggagaagctgatcgctaccacagcccatgaaaaaatgccttggttccatggaaaaatctctcgggaagaatctgagcaaattgtcctgataggatcaaagacaaatggaaagttcctgatccgagccagagacaacaacggctcctacgccctgtgcctgctgcacgaagggaaggtgctgcactatcgcatcgacaaagacaagacagggaagctctccatccccgagggaaagaagttcgacacgctctggcagctagtcgagcattattcttataaagcagatggtttgttaagagttcttactgtcccatgtcaaaaaatcggcacacagggaaatgttaattttggaggccgtccacaacttccaggttcccatcctgcgtcctcccctgcccaagggaaccggcaagagagtactgtgtcattcaatccgtatgagccagaacttgcaccctgggctgcagacaaaggcccccagagagaagccctacccatggacacagaggtgtacgagagcccctacgcggaccccgaggagatcaggcccaaggaggtttacctggaccgaaagctgctgacgctggaagacaaagaactgggctctggtaattttggaactgtgaaaaagggctactaccaaatgaaaaaagttgtgaaaaccgtggctgtgaaaatactgaaaaacgaggccaatgaccccgctcttaaagatgagttattagcagaagcaaatgtcatgcagcagctggacaacccgtacatcgtgcggatgatcgggatatgcgaggccgagtcctggatgctggttatggagatggcagaacttggtcccctcaataagtatttgcagcagaacagacatgtcaaggataagaacatcatagaactggttcatcaggtttccatgggcatgaagtacttggaggagagcaattttgtgcacagagatctggctgcaagaaatgtgttgctagttacccaacattacgccaagatcagtgatttcggactttccaaagcactgcgtgctgatgaaaactactacaaggcccagacccatggaaagtggcctgtcaagtggtacgctccggaatgcatcaactactacaagttctccagcaaaagcgatgtctggagctttggagtgttgatgtgggaagcattctcctatgggcagaagccatatcgagggatgaaaggaagtgaagtcaccgctatgttagagaaaggagagcggatggggtgccctgcagggtgtccaagagagatgtacgatctcatgaatctgtgctggacatacgatgtggaaaacaggcccggattcgcagcagtggaactgcggctgcgcaattactactatgacgtggtgaactaaccgctcccgcacctgtcggtggctgcctttgatcacaggagcaatcacaggaaaatgtatccagaggaattgattgtcagccacctccctctgccagtcgggagagccaggcttggatggaacatgcccacaacttgtcacccaaagcctgtcccaggactcaccctccacaaagcaaaggcagtcccgggagaaaagacggatggcaggatccaaggggctagctggatttgtttgttttcttgtctgtgtgattttcatacaggttatttttacgatctgtttccaaatccctttcatgtctttccacttctctgggtcccggggtgcatttgttactcatcgggcccagggacattgcagagtggcctagagcactctcaccccaagcggccttttccaaatgcccaaggatgccttagcatgtgactcctgaagggaaggcaaaggcagaggaatttggctgcttctacggccatgagactgatccctggccactgaaaagctttcctgacaataaaaatgttttgaggctttaaaaagaaaatcaagtttgaccagtgcagtttctaagcatgtagccagttaaggaaagaaagaaagaaaaaaaaaaaaggcctggatactgcttttgctgtctctgttatgagatggaagacttacatgtttgtgataaaaggggaccatgagaatgaattggcttggcttactttccccctgaaatcctctctcctgcagactgtcttgaagacctggtgactggtaaataaagccctgcatggaggctgcacagcaggggcaagaggcccatcccccagcatctcactgaggacagcttcaggctgccttcctctgaacgtggtccacaccttcctctcctccacagagagggtgccgccagaatcccctgtcgctttctgtgtctgcaatggggggcagcacagggatcaaagccatctaaagagtttccaaagaaagtattaattcagaacaagccaaagaccctgagcctcaccacaaacaggccttttggagtgtgaatttgagttgaagatacaagatcggagaatgattttctggtcttaactaatcctcatcttcatgtttgatctttaagaagtcatcacccattgatttcagttttgctgtacctcttgaaagttaaagagacatctcagcactttaggaggccgaggcgggtggatcacttgaggtaaggagtttgagactagcctggccaatatggtaaaaccccatctctactaaaaatacaaaaattagccgggcatggtggcatgtgtctgtagtcccagctactcgggaggctgaggcaggagaatcgcttgaacccaggaaacggaggtcgcagtgagccaagatcatgccactgcactccagcttgggcatcacagcgagactctgtcaaaacaaacaaacaaaaaaacaacttaaagaggtaatttagccatcattcttatgccagcagatataaataaacttggacccatctggtcttcagctaaacctgagacattttaaagtgcatggacagccatggacagcaggccctcctctaacaggggatgcaaggcatggagaaagacaatcagtacccaagctcagccacagaagacaggagtcactcatataacttgtgtttagaagtttttggtagccacgcacactttctgaaatcacactatctggtggtttaatcatatttttaaagacagaatccctgagtgctgagcagattctcaaaacacatttagaatccctgaaattagaaagatcaatgacaaaatatctgtcagccaggccacaaacaggtgtaaaattatgaaaggagtggttggatgtgccaagtttggtaaagtggtgactgcatctgagaaagaggctgtgaggctgaactcttggtggcttccttctgtaacttccagagggagtcttcaacacaggccccgtgctcgtaggaatacggtagcacctatgtaggaagtgcgtggagttttctgtcttctttctgtgtgatttttggcctttttatcagcacttctcccctcccaggagcctggggatgccaaacatccagaatgtgatgggacaagatgggggcaggggcctcacctccctgcagaggtccggccaggtctccttgtccctggacaatctcctgagcctctctgcttggtggagcaggcacctgtgtgcagaattcccactgtggccagcacgaggaagtcttttctagtgaaaatgtgtcttgtggtcaggaataattatcctttcccctgtagccaccaaggagggcaaatagagaaaggtaacctaattgaaggattggtcatgtgaaaagggctacatttgggaagctgggaaaggcctccaggcttctagagcagctagcttgggctggattctcatacccaggctgccccttggattgttctacccaagcttttccctggggtctgggctcactccataaggtaaggtgccttttaccttatggtccttctttagcaggtaacaaaggagcatcaggggcaggctgccctggtggcatcacactggctagtgaggccgtgaatatcttgtcccccagcagggccgacagtttctatcacagaaaacagtgtgttcagtggtgaaaatcgttgcatgcatgttttcatctgagcgtgtccttctcccatactccctatcagccagccctgcctgtagctgctgtatggtgattgcacttggacatcagtccaatgactgcaagtcggcctggattttcacttgcagaggctacagctgcattgtcaggtctcccagccctgcagagagctccctccactggttagcagtgtgttgtgttttccattcatttcagaagagctacattgtgtcactggacatttttaaaaactgtgatttttaataaaaatttaaaatttg

SEQ ID NO: 186039 - DNA, 4936 bp, Homo sapiens
  Payload ID: 16634
  Gene Symbol: SYK
  Gene Name: spleen tyrosine kinase
  Uniprot ID: P43405
  ENST ID: ENST00000375751
  CDS Start-End: 149-1987
gaggaagagccgcgggcccggcggctgaggccaccccggcggcggctggagagcgaggaggagcgggtggccccgcgctgcgcccgccctcgcctcacctggcgcaggtggacacctgcgcaggtgtgtgccctccggcccctgaagcatggccagcagcggcatggctgacagcgccaaccacctgcccttctttttcggcaacatcacccgggaggaggcagaagattacctggtccaggggggcatgagtgatgggctttatttgctgcgccagagccgcaactacctgggtggcttcgccctgtccgtggcccacgggaggaaggcacaccactacaccatcgagcgggagctgaatggcacctacgccatcgccggtggcaggacccatgccagccccgccgacctctgccactaccactcccaggagtctgatggcctggtctgcctcctcaagaagcccttcaaccggccccaaggggtgcagcccaagactgggccctttgaggatttgaaggaaaacctcatcagggaatatgtgaagcagacatggaacctgcagggtcaggctctggagcaggccatcatcagtcagaagcctcagctggagaagctgatcgctaccacagcccatgaaaaaatgccttggttccatggaaaaatctctcgggaagaatctgagcaaattgtcctgataggatcaaagacaaatggaaagttcctgatccgagccagagacaacaacggctcctacgccctgtgcctgctgcacgaagggaaggtgctgcactatcgcatcgacaaagacaagacagggaagctctccatccccgagggaaagaagttcgacacgctctggcagctagtcgagcattattcttataaagcagatggtttgttaagagttcttactgtcccatgtcaaaaaatcggcacacagggaaatgttaattttggaggccgtccacaacttccaggttcccatcctgcgtcctcccctgcccaagggaaccggcaagagagtactgtgtcattcaatccgtatgagccagaacttgcaccctgggctgcagacaaaggcccccagagagaagccctacccatggacacagaggtgtacgagagcccctacgcggaccccgaggagatcaggcccaaggaggtttacctggaccgaaagctgctgacgctggaagacaaagaactgggctctggtaattttggaactgtgaaaaagggctactaccaaatgaaaaaagttgtgaaaaccgtggctgtgaaaatactgaaaaacgaggccaatgaccccgctcttaaagatgagttattagcagaagcaaatgtcatgcagcagctggacaacccgtacatcgtgcggatgatcgggatatgcgaggccgagtcctggatgctggttatggagatggcagaacttggtcccctcaataagtatttgcagcagaacagacatgtcaaggataagaacatcatagaactggttcatcaggtttccatgggcatgaagtacttggaggagagcaattttgtgcacagagatctggctgcaagaaatgtgttgctagttacccaacattacgccaagatcagtgatttcggactttccaaagcactgcgtgctgatgaaaactactacaaggcccagacccatggaaagtggcctgtcaagtggtacgctccggaatgcatcaactactacaagttctccagcaaaagcgatgtctggagctttggagtgttgatgtgggaagcattctcctatgggcagaagccatatcgagggatgaaaggaagtgaagtcaccgctatgttagagaaaggagagcggatggggtgccctgcagggtgtccaagagagatgtacgatctcatgaatctgtgctggacatacgatgtggaaaacaggcccggattcgcagcagtggaactgcggctgcgcaattactactatgacgtggtgaactaaccgctcccgcacctgtcggtggctgcctttgatcacaggagcaatcacaggaaaatgtatccagaggaattgattgtcagccacctccctctgccagtcgggagagccaggcttggatggaacatgcccacaacttgtcacccaaagcctgtcccaggactcaccctccacaaagcaaaggcagtcccgggagaaaagacggatggcaggatccaaggggctagctggatttgtttgttttcttgtctgtgtgattttcatacaggttatttttacgatctgtttccaaatccctttcatgtctttccacttctctgggtcccggggtgcatttgttactcatcgggcccagggacattgcagagtggcctagagcactctcaccccaagcggccttttccaaatgcccaaggatgccttagcatgtgactcctgaagggaaggcaaaggcagaggaatttggctgcttctacggccatgagactgatccctggccactgaaaagctttcctgacaataaaaatgttttgaggctttaaaaagaaaatcaagtttgaccagtgcagtttctaagcatgtagccagttaaggaaagaaagaaagaaaaaaaaaaaaggcctggatactgcttttgctgtctctgttatgagatggaagacttacatgtttgtgataaaaggggaccatgagaatgaattggcttggcttactttccccctgaaatcctctctcctgcagactgtcttgaagacctggtgactggtaaataaagccctgcatggaggctgcacagcaggggcaagaggcccatcccccagcatctcactgaggacagcttcaggctgccttcctctgaacgtggtccacaccttcctctcctccacagagagggtgccgccagaatcccctgtcgctttctgtgtctgcaatggggggcagcacagggatcaaagccatctaaagagtttccaaagaaagtattaattcagaacaagccaaagaccctgagcctcaccacaaacaggccttttggagtgtgaatttgagttgaagatacaagatcggagaatgattttctggtcttaactaatcctcatcttcatgtttgatctttaagaagtcatcacccattgatttcagttttgctgtacctcttgaaagttaaagagacatctcagcactttaggaggccgaggcgggtggatcacttgaggtaaggagtttgagactagcctggccaatatggtaaaaccccatctctactaaaaatacaaaaattagccgggcatggtggcatgtgtctgtagtcccagctactcgggaggctgaggcaggagaatcgcttgaacccaggaaacggaggtcgcagtgagccaagatcatgccactgcactccagcttgggcatcacagcgagactctgtcaaaacaaacaaacaaaaaaacaacttaaagaggtaatttagccatcattcttatgccagcagatataaataaacttggacccatctggtcttcagctaaacctgagacattttaaagtgcatggacagccatggacagcaggccctcctctaacaggggatgcaaggcatggagaaagacaatcagtacccaagctcagccacagaagacaggagtcactcatataacttgtgtttagaagtttttggtagccacgcacactttctgaaatcacactatctggtggtttaatcatatttttaaagacagaatccctgagtgctgagcagattctcaaaacacatttagaatccctgaaattagaaagatcaatgacaaaatatctgtcagccaggccacaaacaggtgtaaaattatgaaaggagtggttggatgtgccaagtttggtaaagtggtgactgcatctgagaaagaggctgtgaggctgaactcttggtggcttccttctgtaacttccagagggagtcttcaacacaggccccgtgctcgtaggaatacggtagcacctatgtaggaagtgcgtggagttttctgtcttctttctgtgtgatttttggcctttttatcagcacttctcccctcccaggagcctggggatgccaaacatccagaatgtgatgggacaagatgggggcaggggcctcacctccctgcagaggtccggccaggtctccttgtccctggacaatctcctgagcctctctgcttggtggagcaggcacctgtgtgcagaattcccactgtggccagcacgaggaagtcttttctagtgaaaatgtgtcttgtggtcaggaataattatcctttcccctgtagccaccaaggagggcaaatagagaaaggtaacctaattgaaggattggtcatgtgaaaagggctacatttgggaagctgggaaaggcctccaggcttctagagcagctagcttgggctggattctcatacccaggctgccccttggattgttctacccaagcttttccctggggtctgggctcactccataaggtaaggtgccttttaccttatggtccttctttagcaggtaacaaaggagcatcaggggcaggctgccctggtggcatcacactggctagtgaggccgtgaatatcttgtcccccagcagggccgacagtttctatcacagaaaacagtgtgttcagtggtgaaaatcgttgcatgcatgttttcatctgagcgtgtccttctcccatactccctatcagccagccctgcctgtagctgctgtatggtgattgcacttggacatcagtccaatgactgcaagtcggcctggattttcacttgcagaggctacagctgcattgtcaggtctcccagccctgcagagagctccctccactggttagcagtgtgttgtgttttccattcatttcagaagagctacattgtgtcactggacatttttaaaaactgtgatttttaataaaaatttaaaatttg

SEQ ID NO: 186040 - DNA, 5005 bp, Homo sapiens
  Payload ID: 16634
  Gene Symbol: SYK
  Gene Name: spleen tyrosine kinase
  Uniprot ID: P43405
  ENST ID: ENST00000375754
  CDS Start-End: 149-2056
gaggaagagccgcgggcccggcggctgaggccaccccggcggcggctggagagcgaggaggagcgggtggccccgcgctgcgcccgccctcgcctcacctggcgcaggtggacacctgcgcaggtgtgtgccctccggcccctgaagcatggccagcagcggcatggctgacagcgccaaccacctgcccttctttttcggcaacatcacccgggaggaggcagaagattacctggtccaggggggcatgagtgatgggctttatttgctgcgccagagccgcaactacctgggtggcttcgccctgtccgtggcccacgggaggaaggcacaccactacaccatcgagcgggagctgaatggcacctacgccatcgccggtggcaggacccatgccagccccgccgacctctgccactaccactcccaggagtctgatggcctggtctgcctcctcaagaagcccttcaaccggccccaaggggtgcagcccaagactgggccctttgaggatttgaaggaaaacctcatcagggaatatgtgaagcagacatggaacctgcagggtcaggctctggagcaggccatcatcagtcagaagcctcagctggagaagctgatcgctaccacagcccatgaaaaaatgccttggttccatggaaaaatctctcgggaagaatctgagcaaattgtcctgataggatcaaagacaaatggaaagttcctgatccgagccagagacaacaacggctcctacgccctgtgcctgctgcacgaagggaaggtgctgcactatcgcatcgacaaagacaagacagggaagctctccatccccgagggaaagaagttcgacacgctctggcagctagtcgagcattattcttataaagcagatggtttgttaagagttcttactgtcccatgtcaaaaaatcggcacacagggaaatgttaattttggaggccgtccacaacttccaggttcccatcctgcgacttggtcagcgggtggaataatctcaagaatcaaatcatactccttcccaaagcctggccacagaaagtcctcccctgcccaagggaaccggcaagagagtactgtgtcattcaatccgtatgagccagaacttgcaccctgggctgcagacaaaggcccccagagagaagccctacccatggacacagaggtgtacgagagcccctacgcggaccccgaggagatcaggcccaaggaggtttacctggaccgaaagctgctgacgctggaagacaaagaactgggctctggtaattttggaactgtgaaaaagggctactaccaaatgaaaaaagttgtgaaaaccgtggctgtgaaaatactgaaaaacgaggccaatgaccccgctcttaaagatgagttattagcagaagcaaatgtcatgcagcagctggacaacccgtacatcgtgcggatgatcgggatatgcgaggccgagtcctggatgctggttatggagatggcagaacttggtcccctcaataagtatttgcagcagaacagacatgtcaaggataagaacatcatagaactggttcatcaggtttccatgggcatgaagtacttggaggagagcaattttgtgcacagagatctggctgcaagaaatgtgttgctagttacccaacattacgccaagatcagtgatttcggactttccaaagcactgcgtgctgatgaaaactactacaaggcccagacccatggaaagtggcctgtcaagtggtacgctccggaatgcatcaactactacaagttctccagcaaaagcgatgtctggagctttggagtgttgatgtgggaagcattctcctatgggcagaagccatatcgagggatgaaaggaagtgaagtcaccgctatgttagagaaaggagagcggatggggtgccctgcagggtgtccaagagagatgtacgatctcatgaatctgtgctggacatacgatgtggaaaacaggcccggattcgcagcagtggaactgcggctgcgcaattactactatgacgtggtgaactaaccgctcccgcacctgtcggtggctgcctttgatcacaggagcaatcacaggaaaatgtatccagaggaattgattgtcagccacctccctctgccagtcgggagagccaggcttggatggaacatgcccacaacttgtcacccaaagcctgtcccaggactcaccctccacaaagcaaaggcagtcccgggagaaaagacggatggcaggatccaaggggctagctggatttgtttgttttcttgtctgtgtgattttcatacaggttatttttacgatctgtttccaaatccctttcatgtctttccacttctctgggtcccggggtgcatttgttactcatcgggcccagggacattgcagagtggcctagagcactctcaccccaagcggccttttccaaatgcccaaggatgccttagcatgtgactcctgaagggaaggcaaaggcagaggaatttggctgcttctacggccatgagactgatccctggccactgaaaagctttcctgacaataaaaatgttttgaggctttaaaaagaaaatcaagtttgaccagtgcagtttctaagcatgtagccagttaaggaaagaaagaaagaaaaaaaaaaaaggcctggatactgcttttgctgtctctgttatgagatggaagacttacatgtttgtgataaaaggggaccatgagaatgaattggcttggcttactttccccctgaaatcctctctcctgcagactgtcttgaagacctggtgactggtaaataaagccctgcatggaggctgcacagcaggggcaagaggcccatcccccagcatctcactgaggacagcttcaggctgccttcctctgaacgtggtccacaccttcctctcctccacagagagggtgccgccagaatcccctgtcgctttctgtgtctgcaatggggggcagcacagggatcaaagccatctaaagagtttccaaagaaagtattaattcagaacaagccaaagaccctgagcctcaccacaaacaggccttttggagtgtgaatttgagttgaagatacaagatcggagaatgattttctggtcttaactaatcctcatcttcatgtttgatctttaagaagtcatcacccattgatttcagttttgctgtacctcttgaaagttaaagagacatctcagcactttaggaggccgaggcgggtggatcacttgaggtaaggagtttgagactagcctggccaatatggtaaaaccccatctctactaaaaatacaaaaattagccgggcatggtggcatgtgtctgtagtcccagctactcgggaggctgaggcaggagaatcgcttgaacccaggaaacggaggtcgcagtgagccaagatcatgccactgcactccagcttgggcatcacagcgagactctgtcaaaacaaacaaacaaaaaaacaacttaaagaggtaatttagccatcattcttatgccagcagatataaataaacttggacccatctggtcttcagctaaacctgagacattttaaagtgcatggacagccatggacagcaggccctcctctaacaggggatgcaaggcatggagaaagacaatcagtacccaagctcagccacagaagacaggagtcactcatataacttgtgtttagaagtttttggtagccacgcacactttctgaaatcacactatctggtggtttaatcatatttttaaagacagaatccctgagtgctgagcagattctcaaaacacatttagaatccctgaaattagaaagatcaatgacaaaatatctgtcagccaggccacaaacaggtgtaaaattatgaaaggagtggttggatgtgccaagtttggtaaagtggtgactgcatctgagaaagaggctgtgaggctgaactcttggtggcttccttctgtaacttccagagggagtcttcaacacaggccccgtgctcgtaggaatacggtagcacctatgtaggaagtgcgtggagttttctgtcttctttctgtgtgatttttggcctttttatcagcacttctcccctcccaggagcctggggatgccaaacatccagaatgtgatgggacaagatgggggcaggggcctcacctccctgcagaggtccggccaggtctccttgtccctggacaatctcctgagcctctctgcttggtggagcaggcacctgtgtgcagaattcccactgtggccagcacgaggaagtcttttctagtgaaaatgtgtcttgtggtcaggaataattatcctttcccctgtagccaccaaggagggcaaatagagaaaggtaacctaattgaaggattggtcatgtgaaaagggctacatttgggaagctgggaaaggcctccaggcttctagagcagctagcttgggctggattctcatacccaggctgccccttggattgttctacccaagcttttccctggggtctgggctcactccataaggtaaggtgccttttaccttatggtccttctttagcaggtaacaaaggagcatcaggggcaggctgccctggtggcatcacactggctagtgaggccgtgaatatcttgtcccccagcagggccgacagtttctatcacagaaaacagtgtgttcagtggtgaaaatcgttgcatgcatgttttcatctgagcgtgtccttctcccatactccctatcagccagccctgcctgtagctgctgtatggtgattgcacttggacatcagtccaatgactgcaagtcggcctggattttcacttgcagaggctacagctgcattgtcaggtctcccagccctgcagagagctccctccactggttagcagtgtgttgtgttttccattcatttcagaagagctacattgtgtcactggacatttttaaaaactgtgatttttaataaaaatttaaaatttg

SEQ ID NO: 186041 - DNA, 2850 bp, Homo sapiens
  Payload ID: 16635
  Gene Symbol: SF1
  Gene Name: splicing factor 1
  Uniprot ID: Q15637
  ENST ID: ENST00000227503
  CDS Start-End: 356-2002
gcgacacctcccagcccaccgaactccgccgccatttcctcgcttggcctaacggttcggccaatcccagcgcgcatcaagaaggactgaggctccgccaatcggaggccgccgatttcgacccttcgcctcggcccggcccaatccaggccccggccccgccgcccccggcccgcccccgcggtgccctctctcctccctctttgtgcgtctcgcgccgccgccgcccgccgcgtgagaggacgggctccgcgcgctccggcagcgcattcgggtcccctccccccgggaggcttgcgaaggagaagccgccgcagaggaaaagcaggtgccggtgcctgtccccgggggcgccatggcgaccggagcgaacgccacgccgttggacttcccaagtaagaagcggaagaggagccgctggaaccaagacacaatggaacagaagacagtgattccaggaatgcctacagttattccccctggacttactcgagaacaagaaagagcttatatagtgcaactgcagatagaagacctgactcgtaaactgcgcacaggagacctgggcatcccccctaaccctgaggacaggtccccttcccctgagcccatctacaatagcgaggggaagcggcttaacacccgagagttccgcacccgcaaaaagctggaagaggagcggcacaacctcatcacagagatggttgcactcaatccggatttcaagccacctgcagattacaaacctccagcaacacgtgtgagtgataaagtcatgattccacaagatgagtacccagaaatcaactttgtggggctgctcatcgggcccagagggaacaccctgaagaacatagagaaggagtgcaatgccaagattatgatccgggggaaagggtctgtgaaagaagggaaggttgggcgcaaagatggccagatgttgccaggagaagatgagccacttcatgccctggttactgccaatacaatggagaacgtcaaaaaggcagtggaacagataagaaacatcctgaagcagggtatcgagactccagaggaccagaatgatctacggaagatgcagcttcgggagttggctcgcttaaatgggacccttcgggaagacgataacaggatcttaagaccctggcagagctcagagacccgcagcattaccaacaccacagtgtgtaccaagtgtggaggggctggccacattgcttcagactgtaaattccaaaggcctggtgatcctcagtcagctcaggataaagcacggatggataaagaatatttgtccctcatggctgaactgggtgaagcacctgtcccagcatctgtgggctccacctctgggcctgccaccacacccctggccagcgcacctcgtcctgctgctcccgccaacaacccacctccaccgtctctcatgtctaccacccagagccgcccaccctggatgaattctggcccttcagagagtcggccctaccacggcatgcatggaggtggtcctggtgggcccggaggtggcccccacagcttcccacacccattacccagcctgacaggtgggcatggtggacatcccatgcagcacaaccccaatggacccccacccccttggatgcagccaccaccaccaccgatgaaccagggcccccaccctcctgggcaccatggccctcctccaatggatcagtacctgggaagtacgcctgtgggctctggggtctatcgcctgcatcaaggaaaaggtatgatgccgccaccacctatgggcatgatgccgccgccgccgccgcctcccagtgggcagcccccaccccctccctctggtcctcttcccccatggcaacaacagcagcagcagcctccgccaccccctccgcccagcagcagtatggcttccagtacccccttgccatggcagcaaagatccctccccgcggcggcgatggcccgagccatgagagtgaggactttccgcgcccattggtgacccttccaggcagacagcctcagcaacgcccctggtggacaggatggttcggcaaagcagcctgagttatttttgtggacggaatcggaacacgctggctccatatcgtgaaatttttattaatttttttctttttcctttgttacttctttatcttttcctttcttcagactccgtccaaggagatgctctccccggtcttctgctgcaatttagattcctttcccttctctccagttctccttcccttaccaaggagaggggagcaaatggttttgggcaagggctttggccattcatgtcaagctggttgtgggtttttcaaggtgccatagccacccccaaagatgtttgtttaaagcgtggggttttttaatctctgccacccttgtcaagggagtcttgtaaagttgccgagggtaggttcatctccaggtttcgggattcccatccgtcctggcgatcctgccagcagtgggtgggcagcctgagctccctcgggctcgcctgccagcctggagttcttcctgtgctccttgatcacctgagctgcctcagattccatttggtcctctccttcctggaaggcttccttttatgttttgttttaatcccaaatgtctgaatgttttgcagtgtgtaggggtttgagccccttgttcattctccttcctttttcctcccgcttccctctccatgaagtgattctgttgacaataatgtatactgcgcgttctcttcactggtttatctgcagaaatttctctgggcttttttcggtgttagattcaacactgcgctaaagcggggatgttccattgaataaaagagcagtgtggttttctggg

SEQ ID NO: 186042 - DNA, 3094 bp, Homo sapiens
  Payload ID: 16635
  Gene Symbol: SF1
  Gene Name: splicing factor 1
  Uniprot ID: Q15637
  ENST ID: ENST00000334944
  CDS Start-End: 395-2311
cggagctcagttcacgcagtaacaaatgaagtgcgcgctgcgacacctcccagcccaccgaactccgccgccatttcctcgcttggcctaacggttcggccaatcccagcgcgcatcaagaaggactgaggctccgccaatcggaggccgccgatttcgacccttcgcctcggcccggcccaatccaggccccggccccgccgcccccggcccgcccccgcggtgccctctctcctccctctttgtgcgtctcgcgccgccgccgcccgccgcgtgagaggacgggctccgcgcgctccggcagcgcattcgggtcccctccccccgggaggcttgcgaaggagaagccgccgcagaggaaaagcaggtgccggtgcctgtccccgggggcgccatggcgaccggagcgaacgccacgccgttggacttcccaagtaagaagcggaagaggagccgctggaaccaagacacaatggaacagaagacagtgattccaggaatgcctacagttattccccctggacttactcgagaacaagaaagagcttatatagtgcaactgcagatagaagacctgactcgtaaactgcgcacaggagacctgggcatcccccctaaccctgaggacaggtccccttcccctgagcccatctacaatagcgaggggaagcggcttaacacccgagagttccgcacccgcaaaaagctggaagaggagcggcacaacctcatcacagagatggttgcactcaatccggatttcaagccacctgcagattacaaacctccagcaacacgtgtgagtgataaagtcatgattccacaagatgagtacccagaaatcaactttgtggggctgctcatcgggcccagagggaacaccctgaagaacatagagaaggagtgcaatgccaagattatgatccgggggaaagggtctgtgaaagaagggaaggttgggcgcaaagatggccagatgttgccaggagaagatgagccacttcatgccctggttactgccaatacaatggagaacgtcaaaaaggcagtggaacagataagaaacatcctgaagcagggtatcgagactccagaggaccagaatgatctacggaagatgcagcttcgggagttggctcgcttaaatgggacccttcgggaagacgataacaggatcttaagaccctggcagagctcagagacccgcagcattaccaacaccacagtgtgtaccaagtgtggaggggctggccacattgcttcagactgtaaattccaaaggcctggtgatcctcagtcagctcaggataaagcacggatggataaagaatatttgtccctcatggctgaactgggtgaagcacctgtcccagcatctgtgggctccacctctgggcctgccaccacacccctggccagcgcacctcgtcctgctgctcccgccaacaacccacctccaccgtctctcatgtctaccacccagagccgcccaccctggatgaattctggcccttcagagagtcggccctaccacggcatgcatggaggtggtcctggtgggcccggaggtggcccccacagcttcccacacccattacccagcctgacaggtgggcatggtggacatcccatgcagcacaaccccaatggacccccacccccttggatgcagccaccaccaccaccgatgaaccagggcccccaccctcctgggcaccatggccctcctccaatggatcagtacctgggaagtacgcctgtgggctctggggtctatcgcctgcatcaaggaaaaggtatgatgccgccaccacctatgggcatgatgccgccgccgccgccgcctcccagtgggcagcccccaccccctccctctggtcctcttcccccatggcaacaacagcagcagcagcctccgccaccccctccgcccagcagcagtatggcttccagtacccccttgccatggcagcaaaatacgacgactaccaccacgagcgctggcacagggtccatcccgccatggcaacagcagcaggcggctgccgcagcttctccaggagcccctcagatgcaaggcaaccccactatggtgcccctgccccccggggtccagccgcctctgccgcctggggcccctccccctccgccgcctccaccgcctggttccgccggcatgatgatccctccccgcggcggcgatggcccgagccatgagagtgaggactttccgcgcccattggtgacccttccaggcagacagcctcagcaacgcccctggtggacaggatggttcggcaaagcagcctgagttatttttgtggacggaatcggaacacgctggctccatatcgtgaaatttttattaatttttttctttttcctttgttacttctttatcttttcctttcttcagactccgtccaaggagatgctctccccggtcttctgctgcaatttagattcctttcccttctctccagttctccttcccttaccaaggagaggggagcaaatggttttgggcaagggctttggccattcatgtcaagctggttgtgggtttttcaaggtgccatagccacccccaaagatgtttgtttaaagcgtggggttttttaatctctgccacccttgtcaagggagtcttgtaaagttgccgagggtaggttcatctccaggtttcgggattcccatccgtcctggcgatcctgccagcagtgggtgggcagcctgagctccctcgggctcgcctgccagcctggagttcttcctgtgctccttgatcacctgagctgcctcagattccatttggtcctctccttcctggaaggcttccttttatgttttgttttaatcccaaatgtctgaatgttttgcagtgtgtaggggtttgagccccttgttcattctccttcctttttcctcccgcttccctctccatgaagtgattctgttgacaataatgtatactgcgcgttctcttcactggtttatctgcagaaatttctctgggcttttttcggtgttagattcaacactgcgctaaagcggggatgttccattgaataaaagagcagtgtggttttctggg

SEQ ID NO: 186043 - DNA, 2947 bp, Homo sapiens
  Payload ID: 16635
  Gene Symbol: SF1
  Gene Name: splicing factor 1
  Uniprot ID: Q15637
  ENST ID: ENST00000377387
  CDS Start-End: 78-2099
cctccccccgggaggcttgcgaaggagaagccgccgcagaggaaaagcaggtgccggtgcctgtccccgggggcgccatggcgaccggagcgaacgccacgccgttgggtaagctgggcccccccgggctgcccccgctccccgggcccaaaggaggcttcgagccgggccctccgcctgcacccgggcctggggcggggctgctggctcccgggccgccgccgcccccgcccgtgggctcgatgggggccctgaccgcggccttccccttcgcggcgctgcctccgccgcctccgccgccgccccctccgcctccccagcagccgccgccgcctccaccgccaccgtcccccggcgcctcgtacccgccgccgcagccgccccctccgccgccgctctaccagcgcgtgtcgccgccgcagccgccgccaccccagccgccgcgtaaggaccagcagccgggcccggccggcggcggaggagacttcccaagtaagaagcggaagaggagccgctggaaccaagacacaatggaacagaagacagtgattccaggaatgcctacagttattccccctggacttactcgagaacaagaaagagcttatatagtgcaactgcagatagaagacctgactcgtaaactgcgcacaggagacctgggcatcccccctaaccctgaggacaggtccccttcccctgagcccatctacaatagcgaggggaagcggcttaacacccgagagttccgcacccgcaaaaagctggaagaggagcggcacaacctcatcacagagatggttgcactcaatccggatttcaagccacctgcagattacaaacctccagcaacacgtgtgagtgataaagtcatgattccacaagatgagtacccagaaatcaactttgtggggctgctcatcgggcccagagggaacaccctgaagaacatagagaaggagtgcaatgccaagattatgatccgggggaaagggtctgtgaaagaagggaaggttgggcgcaaagatggccagatgttgccaggagaagatgagccacttcatgccctggttactgccaatacaatggagaacgtcaaaaaggcagtggaacagataagaaacatcctgaagcagggtatcgagactccagaggaccagaatgatctacggaagatgcagcttcgggagttggctcgcttaaatgggacccttcgggaagacgataacaggatcttaagaccctggcagagctcagagacccgcagcattaccaacaccacagtgtgtaccaagtgtggaggggctggccacattgcttcagactgtaaattccaaaggcctggtgatcctcagtcagctcaggataaagcacggatggataaagaatatttgtccctcatggctgaactgggtgaagcacctgtcccagcatctgtgggctccacctctgggcctgccaccacacccctggccagcgcacctcgtcctgctgctcccgccaacaacccacctccaccgtctctcatgtctaccacccagagccgcccaccctggatgaattctggcccttcagagagtcggccctaccacggcatgcatggaggtggtcctggtgggcccggaggtggcccccacagcttcccacacccattacccagcctgacaggtgggcatggtggacatcccatgcagcacaaccccaatggacccccacccccttggatgcagccaccaccaccaccgatgaaccagggcccccaccctcctgggcaccatggccctcctccaatggatcagtacctgggaagtacgcctgtgggctctggggtctatcgcctgcatcaaggaaaaggtatgatgccgccaccacctatgggcatgatgccgccgccgccgccgcctcccagtgggcagcccccaccccctccctctggtcctcttcccccatggcaacaacagcagcagcagcctccgccaccccctccgcccagcagcagtatggcttccagtacccccttgccatggcagcaaagatccctccccgcggcggcgatggcccgagccatgagagtgaggactttccgcgcccattggtgacccttccaggcagacagcctcagcaacgcccctggtggacaggatggttcggcaaagcagcctgagttatttttgtggacggaatcggaacacgctggctccatatcgtgaaatttttattaatttttttctttttcctttgttacttctttatcttttcctttcttcagactccgtccaaggagatgctctccccggtcttctgctgcaatttagattcctttcccttctctccagttctccttcccttaccaaggagaggggagcaaatggttttgggcaagggctttggccattcatgtcaagctggttgtgggtttttcaaggtgccatagccacccccaaagatgtttgtttaaagcgtggggttttttaatctctgccacccttgtcaagggagtcttgtaaagttgccgagggtaggttcatctccaggtttcgggattcccatccgtcctggcgatcctgccagcagtgggtgggcagcctgagctccctcgggctcgcctgccagcctggagttcttcctgtgctccttgatcacctgagctgcctcagattccatttggtcctctccttcctggaaggcttccttttatgttttgttttaatcccaaatgtctgaatgttttgcagtgtgtaggggtttgagccccttgttcattctccttcctttttcctcccgcttccctctccatgaagtgattctgttgacaataatgtatactgcgcgttctcttcactggtttatctgcagaaatttctctgggcttttttcggtgttagattcaacactgcgctaaagcggggatgttccattgaataaaagagcagtgtggttttctggg

SEQ ID NO: 186044 - DNA, 3470 bp, Homo sapiens
  Payload ID: 16635
  Gene Symbol: SF1
  Gene Name: splicing factor 1
  Uniprot ID: Q15637
  ENST ID: ENST00000377390
  CDS Start-End: 339-2258
accgaactccgccgccatttcctcgcttggcctaacggttcggccaatcccagcgcgcatcaagaaggactgaggctccgccaatcggaggccgccgatttcgacccttcgcctcggcccggcccaatccaggccccggccccgccgcccccggcccgcccccgcggtgccctctctcctccctctttgtgcgtctcgcgccgccgccgcccgccgcgtgagaggacgggctccgcgcgctccggcagcgcattcgggtcccctccccccgggaggcttgcgaaggagaagccgccgcagaggaaaagcaggtgccggtgcctgtccccgggggcgccatggcgaccggagcgaacgccacgccgttggacttcccaagtaagaagcggaagaggagccgctggaaccaagacacaatggaacagaagacagtgattccaggaatgcctacagttattccccctggacttactcgagaacaagaaagagcttatatagtgcaactgcagatagaagacctgactcgtaaactgcgcacaggagacctgggcatcccccctaaccctgaggacaggtccccttcccctgagcccatctacaatagcgaggggaagcggcttaacacccgagagttccgcacccgcaaaaagctggaagaggagcggcacaacctcatcacagagatggttgcactcaatccggatttcaagccacctgcagattacaaacctccagcaacacgtgtgagtgataaagtcatgattccacaagatgagtacccagaaatcaactttgtggggctgctcatcgggcccagagggaacaccctgaagaacatagagaaggagtgcaatgccaagattatgatccgggggaaagggtctgtgaaagaagggaaggttgggcgcaaagatggccagatgttgccaggagaagatgagccacttcatgccctggttactgccaatacaatggagaacgtcaaaaaggcagtggaacagataagaaacatcctgaagcagggtatcgagactccagaggaccagaatgatctacggaagatgcagcttcgggagttggctcgcttaaatgggacccttcgggaagacgataacaggatcttaagaccctggcagagctcagagacccgcagcattaccaacaccacagtgtgtaccaagtgtggaggggctggccacattgcttcagactgtaaattccaaaggcctggtgatcctcagtcagctcaggataaagcacggatggataaagaatatttgtccctcatggctgaactgggtgaagcacctgtcccagcatctgtgggctccacctctgggcctgccaccacacccctggccagcgcacctcgtcctgctgctcccgccaacaacccacctccaccgtctctcatgtctaccacccagagccgcccaccctggatgaattctggcccttcagagagtcggccctaccacggcatgcatggaggtggtcctggtgggcccggaggtggcccccacagcttcccacacccattacccagcctgacaggtgggcatggtggacatcccatgcagcacaaccccaatggacccccacccccttggatgcagccaccaccaccaccgatgaaccagggcccccaccctcctgggcaccatggccctcctccaatggatcagtacctgggaagtacgcctgtgggctctggggtctatcgcctgcatcaaggaaaaggtatgatgccgccaccacctatgggcatgatgccgccgccgccgccgcctcccagtgggcagcccccaccccctccctctggtcctcttcccccatggcaacaacagcagcagcagcctccgccaccccctccgcccagcagcagtatggcttccagtacccccttgccatggcagcaaaatacgacgactaccaccacgagcgctggcacagggtccatcccgccatggcaacagcagcaggcggctgccgcagcttctccaggagcccctcagatgcaaggcaaccccactatggtgcccctgccccccggggtccagccgcctctgccgcctggggcccctccccctccgccgcctccaccgcctggttccgccggcatgatgtatgccccgccccctcctcctccgcctcccatggacccttctaactttgtcaccatgatgggcatgggggtggcgggcatgccgcccttcgggatgcctccagctcccccaccgcctccaccacagaactagacttgttttttaagaaaatatatattatatatagagagaattggtctcgtttaaacacgccgaacctcaccatatggagccagacattgggacgcacgcatgtgattgtgtgtgcacgcatgtgtgtgtgtgcacgcactgggctgggccaagcgactgaggattcgcttgggaacgggcaggtggtagtaggggcgccagcttgggctctcctggcgccccgtagcatcgagtgtcttctttgtcttctttctctcctcacccaactccctttgcctctccccaaaccgggccgccaggatccctccccgcggcggcgatggcccgagccatgagagtgaggactttccgcgcccattggtgacccttccaggcagacagcctcagcaacgcccctggtggacaggatggttcggcaaagcagcctgagttatttttgtggacggaatcggaacacgctggctccatatcgtgaaatttttattaatttttttctttttcctttgttacttctttatcttttcctttcttcagactccgtccaaggagatgctctccccggtcttctgctgcaatttagattcctttcccttctctccagttctccttcccttaccaaggagaggggagcaaatggttttgggcaagggctttggccattcatgtcaagctggttgtgggtttttcaaggtgccatagccacccccaaagatgtttgtttaaagcgtggggttttttaatctctgccacccttgtcaagggagtcttgtaaagttgccgagggtaggttcatctccaggtttcgggattcccatccgtcctggcgatcctgccagcagtgggtgggcagcctgagctccctcgggctcgcctgccagcctggagttcttcctgtgctccttgatcacctgagctgcctcagattccatttggtcctctccttcctggaaggcttccttttatgttttgttttaatcccaaatgtctgaatgttttgcagtgtgtaggggtttgagccccttgttcattctccttcctttttcctcccgcttccctctccatgaagtgattctgttgacaataatgtatactgcgcgttctcttcactggtttatctgcagaaatttctctgggcttttttcggtgttagattcaacactgcgctaaagcggggatgttccattgaataaaagagcagtgtggttttctggg

SEQ ID NO: 186045 - DNA, 2854 bp, Homo sapiens
  Payload ID: 16635
  Gene Symbol: SF1
  Gene Name: splicing factor 1
  Uniprot ID: Q15637
  ENST ID: ENST00000377394
  CDS Start-End: 356-2071
gcgacacctcccagcccaccgaactccgccgccatttcctcgcttggcctaacggttcggccaatcccagcgcgcatcaagaaggactgaggctccgccaatcggaggccgccgatttcgacccttcgcctcggcccggcccaatccaggccccggccccgccgcccccggcccgcccccgcggtgccctctctcctccctctttgtgcgtctcgcgccgccgccgcccgccgcgtgagaggacgggctccgcgcgctccggcagcgcattcgggtcccctccccccgggaggcttgcgaaggagaagccgccgcagaggaaaagcaggtgccggtgcctgtccccgggggcgccatggcgaccggagcgaacgccacgccgttggacttcccaagtaagaagcggaagaggagccgctggaaccaagacacaatggaacagaagacagtgattccaggaatgcctacagttattccccctggacttactcgagaacaagaaagagcttatatagtgcaactgcagatagaagacctgactcgtaaactgcgcacaggagacctgggcatcccccctaaccctgaggacaggtccccttcccctgagcccatctacaatagcgaggggaagcggcttaacacccgagagttccgcacccgcaaaaagctggaagaggagcggcacaacctcatcacagagatggttgcactcaatccggatttcaagccacctgcagattacaaacctccagcaacacgtgtgagtgataaagtcatgattccacaagatgagtacccagaaatcaactttgtggggctgctcatcgggcccagagggaacaccctgaagaacatagagaaggagtgcaatgccaagattatgatccgggggaaagggtctgtgaaagaagggaaggttgggcgcaaagatggccagatgttgccaggagaagatgagccacttcatgccctggttactgccaatacaatggagaacgtcaaaaaggcagtggaacagataagaaacatcctgaagcagggtatcgagactccagaggaccagaatgatctacggaagatgcagcttcgggagttggctcgcttaaatgggacccttcgggaagacgataacaggatcttaagaccctggcagagctcagagacccgcagcattaccaacaccacagtgtgtaccaagtgtggaggggctggccacattgcttcagactgtaaattccaaaggcctggtgatcctcagtcagctcaggataaagcacggatggataaagaatatttgtccctcatggctgaactgggtgaagcacctgtcccagcatctgtgggctccacctctgggcctgccaccacacccctggccagcgcacctcgtcctgctgctcccgccaacaacccacctccaccgtctctcatgtctaccacccagagccgcccaccctggatgaattctggcccttcagagagtcggccctaccacggcatgcatggaggtggtcctggtgggcccggaggtggcccccacagcttcccacacccattacccagcctgacaggtgggcatggtggacatcccatgcagcacaaccccaatggacccccacccccttggatgcagccaccaccaccaccgatgaaccagggcccccaccctcctgggcaccatggccctcctccaatgggtaaatcagtacctgggaagtacgcctgtgggctctggggtctatcgcctgcatcaaggaaaaggtatgatgccgccaccacctatgggcatgatgccgccgccgccgccgcctcccagtgggcagcccccaccccctccctctggtcctcttcccccatggcaacaacagcagcagcagcctccgccaccccctccgcccagcagcagtatggcttccagtacccccttgccatggcagcaaagatccctccccgcggcggcgatggcccgagccatgagagtgaggactttccgcgcccattggtgacccttccaggcagacagcctcagcaacgcccctggtggacaggatggttcggcaaagcagcctgagttatttttgtggacggaatcggaacacgctggctccatatcgtgaaatttttattaatttttttctttttcctttgttacttctttatcttttcctttcttcagactccgtccaaggagatgctctccccggtcttctgctgcaatttagattcctttcccttctctccagttctccttcccttaccaaggagaggggagcaaatggttttgggcaagggctttggccattcatgtcaagctggttgtgggtttttcaaggtgccatagccacccccaaagatgtttgtttaaagcgtggggttttttaatctctgccacccttgtcaagggagtcttgtaaagttgccgagggtaggttcatctccaggtttcgggattcccatccgtcctggcgatcctgccagcagtgggtgggcagcctgagctccctcgggctcgcctgccagcctggagttcttcctgtgctccttgatcacctgagctgcctcagattccatttggtcctctccttcctggaaggcttccttttatgttttgttttaatcccaaatgtctgaatgttttgcagtgtgtaggggtttgagccccttgttcattctccttcctttttcctcccgcttccctctccatgaagtgattctgttgacaataatgtatactgcgcgttctcttcactggtttatctgcagaaatttctctgggcttttttcggtgttagattcaacactgcgctaaagcggggatgttccattgaataaaagagcagtgtggttttctggg

SEQ ID NO: 186046 - DNA, 623 bp, Homo sapiens
  Payload ID: 16635
  Gene Symbol: SF1
  Gene Name: splicing factor 1
  ENST ID: ENST00000413951
  CDS Start-End: 116-271
ggacgggctccgcgcgctccggcagcgcattcgggtcccctccccccgggaggcttgcgaaggagaagccgccgcagaggaaaagcaggtgccggtgcctgtccccgggggcgccatggcgaccggagcgaacgccacgccgttggccgccgccgcctccaccgccaccgtcccccggcgcctcgtacccgccgccgcagccgccccctccgccgccgctctaccagcgcgtgtcgccgccgcagccgccgccaccccagccgccgcgtaaggaccagcagccgggcccggccggcggcggaggagacttcccaagtaagaagcggaagaggagccgctggaaccaagacacaatggaacagaagacagtgattccaggaatgcctacagttattccccctggacttactcgagaacaagaaagagcttatatagtgcaactgcagatagaagacctgactcgtaaactgcgcacaggagacctgggcatcccccctaaccctgaggacaggtccccttcccctgagcccatctacaatagcgaggggaagcggcttaacacccgagagttccgcacccgcaaaaagctggaagaggagcggcacaacctcatcacagagatg

SEQ ID NO: 186047 - DNA, 767 bp, Homo sapiens
  Payload ID: 16635
  Gene Symbol: SF1
  Gene Name: splicing factor 1
  ENST ID: ENST00000443908
  CDS Start-End: 1-603
tctctcatgtctaccacccagagccgcccaccctggatgaattctggcccttcagagagtcggccctaccacggcatgcatggaggtggtcctggtgggcccggaggtggcccccacagcttcccacacccattacccagcctgacaggtgggcatggtggacatcccatgcagcacaaccccaatggacccccacccccttggatgcagccaccaccaccaccgatgaaccagggcccccaccctcctgggcaccatggccctcctccaatggtccctgctctttccttccatcaagatcagtacctgggaagtacgcctgtgggctctggggtctatcgcctgcatcaaggaaaaggtatgatgccgccaccacctatgggcatgatgccgccgccgccgccgcctcccagtgggcagcccccaccccctccctctggtcctcttcccccatggcaacaacagcagcagcagcctccgccaccccctccgcccagcagcagtatggcttccagtacccccttgccatggcagcaaagatccctccccgcggcggcgatggcccgagccatgagagtgaggactttccgcgcccattggtgacccttccaggcagacagcctcagcaacgcccctggtggacaggatggttcggcaaagcagcctgagttatttttgtggacggaatcggaacacgctggctccatatcgtgaaatttttattaatttttttctttttcctttgttacttctttatcttttccttt

SEQ ID NO: 186048 - DNA, 843 bp, Homo sapiens
  Payload ID: 16635
  Gene Symbol: SF1
  Gene Name: splicing factor 1
  ENST ID: ENST00000413725
  CDS Start-End: 1-541
gaaccagggcccccaccctcctgggcaccatggccctcctccaatgggtaaatcagtacctgggaagtacgcctgtgggctctggggtctatcgcctgcatcaaggaaaaggtatgatgccgccaccacctatgggcatgatgccgccgccgccgccgcctcccagtgggcagcccccaccccctccctctggtcctcttcccccatggcaacaacagcagcagcagcctccgccaccccctccgcccagcagcagtatggcttccagtacccccttgccatggcagcaaaatacgacgactaccaccacgagcgctggcacagggtccatcccgccatggcaacagcagcaggcggctgccgcagcttctccaggagcccctcagatgcaaggcaaccccactatggtgcccctgccccccggggtccagccgcctctgccgcctggggcccctccccctccgccgcctccaccgcctggttccgccggcatgatgtatgccccgccccctcctcctccgcctcccatggacccttctaactttgtcaccatgatgggcatgggggtggcgggcatgccgcccttcgggatgcctccagctcccccaccgcctccaccacagaactagacttgttttttaagaaaatatatattatatatagagagaattggtctcgtttaaacacgccgaacctcaccatatggagccagacattgggacgcacgcatgtgattgtgtgtgcacgcatgtgtgtgtgtgcacgcactgggctgggccaagcgactgaggattcgcttgggaacgggcaggtggtagtaggggcgccagcttgggctctcct

SEQ ID NO: 186049 - DNA, 2317 bp, Homo sapiens
  Payload ID: 16635
  Gene Symbol: SF1
  Gene Name: splicing factor 1
  Uniprot ID: Q15637
  ENST ID: ENST00000433274
  CDS Start-End: 310-2151
gacgcagtgaggtggccgggctgtgcggcgcaactgtatagactgggggcccactattgctgtccagtccgctggtgtcgggaacaggggtggcgggtgttcagcgctggacggggtgctagctgtgaatgccagcagggcgtgaaagcctcacctgatgacgtgcagcgactcccttctggtcttgaggaaccagaatgggaaccgtaccaaggatagctcctctgcttctacagcaaggcagggttttcatccgggagagacttcccaagtaagaagcggaagaggagccgctggaaccaagacacaatggaacagaagacagtgattccaggaatgcctacagttattccccctggacttactcgagaacaagaaagagcttatatagtgcaactgcagatagaagacctgactcgtaaactgcgcacaggagacctgggcatcccccctaaccctgaggacaggtccccttcccctgagcccatctacaatagcgaggggaagcggcttaacacccgagagttccgcacccgcaaaaagctggaagaggagcggcacaacctcatcacagagatggttgcactcaatccggatttcaagccacctgcagattacaaacctccagcaacacgtgtgagtgataaagtcatgattccacaagatgagtacccagaaatcaactttgtggggctgctcatcgggcccagagggaacaccctgaagaacatagagaaggagtgcaatgccaagattatgatccgggggaaagggtctgtgaaagaagggaaggttgggcgcaaagatggccagatgttgccaggagaagatgagccacttcatgccctggttactgccaatacaatggagaacgtcaaaaaggcagtggaacagataagaaacatcctgaagcagggtatcgagactccagaggaccagaatgatctacggaagatgcagcttcgggagttggctcgcttaaatgggacccttcgggaagacgataacaggatcttaagaccctggcagagctcagagacccgcagcattaccaacaccacagtgtgtaccaagtgtggaggggctggccacattgcttcagactgtaaattccaaaggcctggtgatcctcagtcagctcaggataaagcacggatggataaagaatatttgtccctcatggctgaactgggtgaagcacctgtcccagcatctgtgggctccacctctgggcctgccaccacacccctggccagcgcacctcgtcctgctgctcccgccaacaacccacctccaccgtctctcatgtctaccacccagagccgcccaccctggatgaattctggcccttcagagagtcggccctaccacggcatgcatggaggtggtcctggtgggcccggaggtggcccccacagcttcccacacccattacccagcctgacaggtgggcatggtggacatcccatgcagcacaaccccaatggacccccacccccttggatgcagccaccaccaccaccgatgaaccagggcccccaccctcctgggcaccatggccctcctccaatggatcagtacctgggaagtacgcctgtgggctctggggtctatcgcctgcatcaaggaaaaggtatgatgccgccaccacctatgggcatgatgccgccgccgccgccgcctcccagtgggcagcccccaccccctccctctggtcctcttcccccatggcaacaacagcagcagcagcctccgccaccccctccgcccagcagcagtatggcttccagtacccccttgccatggcagcaaaatacgacgactaccaccacgagcgctggcacagggtccatcccgccatggcaacagcagcaggcggctgccgcagcttctccaggagcccctcagatgcaaggcaaccccactatggtgcccctgccccccggggtccagccgcctctgccgcctggggcccctccccctccgccgcctccaccgcctggttccgccggcatgatgtatgccccgccccctcctcctccgcctcccatggacccttctaactttgtcaccatgatgggcatgggggtggcgggcatgccgcccttcgggatgcctccagctcccccaccgcctccaccacagaactagacttgttttttaagaaaatatatattatatatagagagaattggtctcgtttaaacacgccgaacctcaccatatggagccagacattgggacgcacgcatgtgattgtgtgtgcacgcatgtgtgtgtgtgcacgcactgggctgggccaagcgactgaggattc

SEQ ID NO: 186050 - DNA, 475 bp, Homo sapiens
  Payload ID: 16635
  Gene Symbol: SF1
  Gene Name: splicing factor 1
  ENST ID: ENST00000432725
  CDS Start-End: 289-475
agacgcagtgaggtggccgggctgtgcggcgcaactgtatagactgggggcccactattgctgtccagtccgctggtgtcgggaacaggggtggcgggtgttcagcgctggacggggtgctagctgtgaatgccagcagggcgtgaaagcctcacctgatgacgtgcagcgactcccttctggtcttgaggaaccagaatgggaaccgtaccaaggatagctcctctgcttctacagcaagacttcccaagtaagaagcggaagaggagccgctggaaccaagacacaatggaacagaagacagtgattccaggaatgcctacagttattccccctggacttactcgagaacaagaaagagcttatatagtgcaactgcagatagaagacctgactcgtaaactgcgcacaggagacctgggcatcccccctaaccctgaggacaggtccccttcccctgagcccatctacaata

SEQ ID NO: 186051 - DNA, 2778 bp, Homo sapiens
  Payload ID: 16635
  Gene Symbol: SF1
  Gene Name: splicing factor 1
  ENST ID: ENST00000448404
  CDS Start-End: 356-688
gcgacacctcccagcccaccgaactccgccgccatttcctcgcttggcctaacggttcggccaatcccagcgcgcatcaagaaggactgaggctccgccaatcggaggccgccgatttcgacccttcgcctcggcccggcccaatccaggccccggccccgccgcccccggcccgcccccgcggtgccctctctcctccctctttgtgcgtctcgcgccgccgccgcccgccgcgtgagaggacgggctccgcgcgctccggcagcgcattcgggtcccctccccccgggaggcttgcgaaggagaagccgccgcagaggaaaagcaggtgccggtgcctgtccccgggggcgccatggcgaccggagcgaacgccacgccgttggacttcccaagtaagaagcggaagaggagccgctggaaccaagacacaatggaacagaagacagtgattccaggaatgcctacagttattccccctggacttactcgagaacaagaaagagcttatataggtccccttcccctgagcccatctacaatagcgaggggaagcggcttaacacccgagagttccgcacccgcaaaaagctggaagaggagcggcacaacctcatcacagagatggttgcactcaatccggatttcaagccacctgcagattacaaacctccagcaacacgtgtgagtgataaagtcatgattccacaagatgagtacccagaaatcaactttgtggggctgctcatcgggcccagagggaacaccctgaagaacatagagaaggagtgcaatgccaagattatgatccgggggaaagggtctgtgaaagaagggaaggttgggcgcaaagatggccagatgttgccaggagaagatgagccacttcatgccctggttactgccaatacaatggagaacgtcaaaaaggcagtggaacagataagaaacatcctgaagcagggtatcgagactccagaggaccagaatgatctacggaagatgcagcttcgggagttggctcgcttaaatgggacccttcgggaagacgataacaggatcttaagaccctggcagagctcagagacccgcagcattaccaacaccacagtgtgtaccaagtgtggaggggctggccacattgcttcagactgtaaattccaaaggcctggtgatcctcagtcagctcaggataaagcacggatggataaagaatatttgtccctcatggctgaactgggtgaagcacctgtcccagcatctgtgggctccacctctgggcctgccaccacacccctggccagcgcacctcgtcctgctgctcccgccaacaacccacctccaccgtctctcatgtctaccacccagagccgcccaccctggatgaattctggcccttcagagagtcggccctaccacggcatgcatggaggtggtcctggtgggcccggaggtggcccccacagcttcccacacccattacccagcctgacaggtgggcatggtggacatcccatgcagcacaaccccaatggacccccacccccttggatgcagccaccaccaccaccgatgaaccagggcccccaccctcctgggcaccatggccctcctccaatgggtaaatcagtacctgggaagtacgcctgtgggctctggggtctatcgcctgcatcaaggaaaaggtatgatgccgccaccacctatgggcatgatgccgccgccgccgccgcctcccagtgggcagcccccaccccctccctctggtcctcttcccccatggcaacaacagcagcagcagcctccgccaccccctccgcccagcagcagtatggcttccagtacccccttgccatggcagcaaagatccctccccgcggcggcgatggcccgagccatgagagtgaggactttccgcgcccattggtgacccttccaggcagacagcctcagcaacgcccctggtggacaggatggttcggcaaagcagcctgagttatttttgtggacggaatcggaacacgctggctccatatcgtgaaatttttattaatttttttctttttcctttgttacttctttatcttttcctttcttcagactccgtccaaggagatgctctccccggtcttctgctgcaatttagattcctttcccttctctccagttctccttcccttaccaaggagaggggagcaaatggttttgggcaagggctttggccattcatgtcaagctggttgtgggtttttcaaggtgccatagccacccccaaagatgtttgtttaaagcgtggggttttttaatctctgccacccttgtcaagggagtcttgtaaagttgccgagggtaggttcatctccaggtttcgggattcccatccgtcctggcgatcctgccagcagtgggtgggcagcctgagctccctcgggctcgcctgccagcctggagttcttcctgtgctccttgatcacctgagctgcctcagattccatttggtcctctccttcctggaaggcttccttttatgttttgttttaatcccaaatgtctgaatgttttgcagtgtgtaggggtttgagccccttgttcattctccttcctttttcctcccgcttccctctccatgaagtgattctgttgacaataatgtatactgcgcgttctcttcactggtttatctgcagaaatttctctgggcttttttcggtgttagattcaacactgcgctaaagcggggatgttccattgaataaaagagcagtgtggttttctggg

SEQ ID NO: 186052 - DNA, 875 bp, Homo sapiens
  Payload ID: 16635
  Gene Symbol: SF1
  Gene Name: splicing factor 1
  ENST ID: ENST00000486867
  CDS Start-End: 1-875
accaagtgtggaggggctggccacattgcttcagactgtaaattccaaaggcctggtgatcctcagtcagctcaggataaagcacggatggataaagaatatttgtccctcatggctgaactgggtgaagcacctgtcccagcatctgtgggctccacctctgggcctgccaccacacccctggccagcgcacctcgtcctgctgctcccgccaacaacccacctccaccgtctctcatgtctaccacccagagccgcccaccctggatgaattctggcccttcagagagtcggccctaccacggcatgcatggaggtggtcctggtgggcccggaggtggcccccacagcttcccacacccattacccagcctgacaggtgggcatggtggacatcccatgcagcacaaccccaatggacccccacccccttggatgcagccaccaccaccaccgatgaaccagggcccccaccctcctgggcaccatggccctcctccaatggtacctgggaagtacgcctgtgggctctggggtctatcgcctgcatcaaggaaaaggtatgatgccgccaccacctatgggcatgatgccgccgccgccgccgcctcccagtgggcagcccccaccccctccctctggtcctcttcccccatggcaacaacagcagcagcagcctccgccaccccctccgcccagcagcagtatggcttccagtacccccttgccatggcagcaaaatacgacgactaccaccacgagcgctggcacagggtccatcccgccatggcaacagcagcaggcggctgccgcagcttctccaggagcccctcagatgcaaggcaaccccactatggtgcccctgccccccgggg

SEQ ID NO: 186053 - DNA, 704 bp, Homo sapiens
  Payload ID: 16635
  Gene Symbol: SF1
  Gene Name: splicing factor 1
  ENST ID: ENST00000626028
  CDS Start-End: 372-704
aaatgaagtgcgcgctgcgacacctcccagcccaccgaactccgccgccatttcctcgcttggcctaacggttcggccaatcccagcgcgcatcaagaaggactgaggctccgccaatcggaggccgccgatttcgacccttcgcctcggcccggcccaatccaggccccggccccgccgcccccggcccgcccccgcggtgccctctctcctccctctttgtgcgtctcgcgccgccgccgcccgccgcgtgagaggacgggctccgcgcgctccggcagcgcattcgggtcccctccccccgggaggcttgcgaaggagaagccgccgcagaggaaaagcaggtgccggtgcctgtccccgggggcgccatggcgaccggagcgaacgccacgccgttggacttcccaagtaagaagcggaagaggagccgctggaaccaagacacaatggaacagaagacagtgattccaggaatgcctacagttattccccctggacttactcgagaacaagaaagagcttatataggtccccttcccctgagcccatctacaatagcgaggggaagcggcttaacacccgagagttccgcacccgcaaaaagctggaagaggagcggcacaacctcatcacagagatggttgcactcaatccggatttcaagccacctgcagattacaaacctccagcaacacgtgtga

SEQ ID NO: 186054 - DNA, 5143 bp, Homo sapiens
  Payload ID: 16636
  Gene Symbol: SF3A1
  Gene Name: splicing factor 3a, subunit 1, 120kDa
  Uniprot ID: Q15459
  ENST ID: ENST00000215793
  CDS Start-End: 156-2537
ggtcccggaagtgcgccagtcgtaccttcgcggccgcaactcgctcggccgccgccatcttgcgagctcgtcgtactgaccgagcggggaggctgtcttgaggcggcaccgctcaccgacaccgaggcggactggcagccctgagcgtcgcagtcatgccggccggacccgtgcaggcggtgcccccgccgccgcccgtgcccacggagcccaaacagcccacagaagaagaagcatcttcaaaggaggattctgcaccttctaagccagttgtggggattatttaccctcctccagaggtcagaaatattgttgacaagactgccagctttgtggccagaaacgggcctgaatttgaagctaggatccgacagaacgagatcaacaaccccaagttcaactttctgaaccccaatgacccttaccatgcctactaccgccacaaggtcagcgagttcaaggaagggaaggctcaggagccgtccgccgccatccccaaggtcatgcagcagcagcagcagaccacccagcagcagctgccccagaaggtccaagcccaagtaatccaagagaccatcgtgcccaaagagcctcctcctgagtttgagttcattgctgatcctccctctatctcagccttcgacttggatgtggtgaagctgacggctcagtttgtggccaggaatgggcgccagtttctgacccagctgatgcagaaagagcagcgcaactaccagtttgactttctccgcccacagcacagcctcttcaactacttcacgaagctagtggaacagtacaccaagatcttgattccacccaaaggtttattttcaaagctcaagaaagaggctgaaaacccccgagaagttttggatcaggtgtgttaccgagtggaatgggccaaattccaggaacgtgagaggaagaaggaagaagaggagaaggagaaggagcgggtggcctatgctcagatcgactggcatgattttgtggtggtggaaacagtggacttccaacccaatgagcaagggaacttccctccccccaccacgccagaggagctgggggcccgaatcctcattcaggagcgctatgaaaagtttggggagagtgaggaagttgagatggaggtcgagtctgatgaggaggatgacaaacaggagaaggcggaggagcctccttcccagctggaccaggacacccaagtacaagatatggatgagggttcagatgatgaagaagaagggcagaaagtgcccccacccccagagacacccatgcctccacctctgcccccaactccagaccaagtcattgtccgcaaggattatgatcccaaagcctccaagcccttgcctccagcccctgctccagatgagtatcttgtgtcccccattactggggagaagatccccgccagcaaaatgcaggaacacatgcgcattggacttcttgaccctcgctggctggagcagcgggatcgctccatccgtgagaagcagagcgatgatgaggtgtacgcaccaggtctggatattgagagcagcttgaagcagttggctgagcggcgtactgacatcttcggtgtagaggaaacagccattggtaagaagatcggtgaggaggagatccagaagccagaggaaaaggtgacctgggatggccactcaggcagcatggcccggacccagcaggctgcccaggccaacatcaccctccaggagcagattgaggccattcacaaggccaaaggcctggtgccagaggatgacactaaagagaagattggccccagcaagcccaatgaaatccctcaacagccaccgccaccatcttcagccaccaacatccccagctcggctccacccatcacttcagtgccccgaccacccacaatgccacctccagttcgtactacagttgtctccgcagtacccgtcatgccccggcccccaatggcatctgtggtccggctgcccccaggctcagtgatcgcccccatgccgcccatcatccacgcgcccagaatcaacgtggtgcccatgcctccctcggcccctcctattatggccccccgcccaccccccatgattgtgccaacagcctttgtgcctgctccacctgtggcacctgtcccagctccagccccaatgccccctgtgcatcccccacctcccatggaagatgagcccacctccaaaaaactgaagacagaggacagcctcatgccagaggaggagttcctgcgcagaaacaagggtccagtgtccatcaaagtccaggtgcccaacatgcaggataagacggaatggaaactgaatgggcaggtgctggtcttcaccctcccactcacggaccaggtctctgtcattaaggtgaagattcatgaagccacaggcatgcctgcagggaaacagaagctacagtatgagggtatcttcatcaaagattccaactcactggcttactacaacatggccaatggcgcagtcatccacctggccctcaaggagagaggcgggaggaagaagtagacaagaggaacctgctgtcaagtccctgccattttgcctctcctgtctcccaccccctgccccagacccaggagcccccctgaggctttgccttgcctgcatatttgtttcgctcttactcagtttgggaattcaaattgtcctgcagaggttcattcccctgaccctttccccacattggtaagagtagctgggttttctaagccactctctggaatctctttgtgttagggtctcgatttgaggacattcatttcttcagcagcccattagcaactgagagcccagggatgtcctacaggatagtttcatagtgacaggtggcacttggctaatagaatatggctgatattgtcattaatcattttgtaccttgacatgggttgtctaataaaactcggacccttcttgtgaaatcagttaaataagacttgtctcggtcacctgtgccctgtccagactcgaggcagtggtaacactgcacagtgctatgtggcttctctttgaggatttttgggttttgtaactaaattcttgctgccctcatactttttatgtattagaatcatattcgtattgcccttttaaaacattgggatcctccaaaggcctgccccatgtatttaacagtaatacaggaagcatggcaggcaccatgcaaaccaaggatggatggtgcagtccctgtgtcagtgggcggtggtttcctgctggcctggaatcactcatcacctgattgattggctctgtggtcctgggcaggtgcctcataggtgtgtggatatgatgacgtttctttaaaatgtatgtatttaacaaatacttaattgtattaaggtcatgtaccaaggatttgataaagtttaaataatttactctctacttttatccattttatccattttaactcatgtaatcctcatgtgagtattcctgtttaacacttgagtaaactgaggcacagagaacataagttgcatgccatagtcacacactgtgaaagtgaaaagagaatgtgtgcaaaacacgtcacagtcctggtttctgagtaaaggcaggctgttatctttagaatcaagctatcacagggagataggcaatgctgtgggtgttggaggaaggtgagagcctgttgctaacaatttcctggttttaaagctaaggctgattttattgggaagatctcacatgtgtgtggcccctgagagttcccagtgccttttatttgcagtccttccatttggacctcctagctgccccatcaggtcatctccagggctcagaggggtgagaccatttcccaaggtcacagaaccagctctctagtcaccaccctgcctctccctctcacccagagtcagtaccagttttatggctttattacaaactgctgggtccctcccattttcaacttgattgatgggatgtcatcccttatcctgtctgacatttgcctctggcctggttgctagaagtttgccccaggggcaagagttgaaatttggcttcctgaggtgggctttgtggtttgcgtccctaaagtgagcccactactggttgcttgtccatggccaacaccagaaatcccctgagcactacctgggtctcattccaagaaggaagagggtcaggagacctggggagtctcatattccaagttcttctttctttctgggagcagtgggcagttcatggtgttagggcactcacccccacagactggcaaaccctgcaggacttccgtggctgaggctgtgaccggaggccaggaatgccgttgggtggattgtgagtgaatgggccctttgagctgccctctagagagcaaatccagtttcctggagctcctgaatgaatatctgtactggctcgctcagatgcagaagctccattgaccatgaggccttgtgaacatcagtggccacaggcccagtgtgctgcttggcactgcactagtttaggacctgcagcatgtaggtagcgtcctagtgtttataatacaaagctgctctgcacagcttttctgattcttcttgcaatctcctgaggattatctgccccatttttaaaacgaggtggaatacccaaggtcatgtagccagtgagtgctctggaaagccaaagcagctcatcccttcctggggaccacactgctctgctccaccagaccacactatgaaataggaataagtgctcctgttgcaggactgctgggaaaacaggtggtgtgggacttaagtcaccataattttgaagacttgcatgcagagggctccaggaattgtagacattaaggaatttcactttcagttctacccactacttaagtacttgtcatgtactcttagaggaggccagtaatgatcagaaccattttactttaaaattaataatattgtattagagaatatattaaatggttatattgggttatgttaggatatatacttgaatggaaatacatgtactattagcaatcatatttcatttatccctgtaattagacaagaaagcataatatagctctactcatgggtacacataccagtgtataagatttttagaagtttactttttaaaaataaaagcaaaatgtaagatcttaa

SEQ ID NO: 186055 - DNA, 418 bp, Homo sapiens
  Payload ID: 16636
  Gene Symbol: SF3A1
  Gene Name: splicing factor 3a, subunit 1, 120kDa
  ENST ID: ENST00000447376
  CDS Start-End: 128-319
cgcggccgcaactcgctcggccgccgccatcttgcgagctcgtcgtactgaccgagcggggaggctgtcttgaggcggcaccgctcaccgacaccgaggcggactggcagccctgagcgtcgcagtcatgccggccggacccgtgcaggcggtgcccccgccgccgcccgtgcccacggagcccaaacagcccacagaagaagaagcatcttcaaaggaggattctgcaccttctaagccagttgtggggattatttaccctcctccagaggtcagaaatattgttgacaagactgccagctttgtggccagatcttgattccacccaaaggtttattttcaaagctcaagaaagaggctgaaaacccccgagaagttttggatcaggtgtgttaccgagtggaatgggccaaattcc

SEQ ID NO: 186056 - DNA, 777 bp, Homo sapiens
  Payload ID: 16636
  Gene Symbol: SF3A1
  Gene Name: splicing factor 3a, subunit 1, 120kDa
  ENST ID: ENST00000444440
  CDS Start-End: 1-777
ggggcccgaatcctcattcaggagcgctatgaaaagtttggggagagtgaggaagttgagatggaggtcgagtctgatgaggaggatgacaaacaggagaaggcggaggagcctccttcccagctggaccaggacacccaagtacaagatatggatgagggttcagatgatgaagaagaagggcagaaagtgcccccacccccagagacacccatgcctccacctctgcccccaactccagaccaagtcattgtccgcaaggattatgatcccaaagcctccaagcccttgcctccagcccctgctccagatgagtatcttgtgtcccccattactggggagaagatccccgccagcaaaatgcaggaacacatgcgcattggacttcttgaccctcgctggctggagcagcgggatcgctccatccgtgagaagcagagcgatgatgaggtgacctgggatggccactcaggcagcatggcccggacccagcaggctgcccaggccaacatcaccctccaggagcagattgaggccattcacaaggccaaaggcctggtgccagaggatgacactaaagagaagattggccccagcaagcccaatgaaatccctcaacagccaccgccaccatcttcagccaccaacatccccagctcggctccacccatcacttcagtgccccgaccacccacaatgccacctccagttcgtactacagttgtctccgcagtacccgtcatgccccggcccccaatggcatctgtggtccggctg

SEQ ID NO: 186057 - DNA, 548 bp, Homo sapiens
  Payload ID: 16636
  Gene Symbol: SF3A1
  Gene Name: splicing factor 3a, subunit 1, 120kDa
  ENST ID: ENST00000411423
  CDS Start-End: 93-209
gagctcgtcgtactgaccgagcggggaggctgtcttgaggcggcaccgctcaccgacaccgaggcggactggcagccctgagcgtcgcagtcatgccggccggacccgtgcaggcggtgcccccgccgccgcccgtgcccacggagcccaaacagccattggtaagaagatcggtgaggaggagatccagaagccagaggaaaaggtgacctgggatggccactcaggcagcatggcccggacccagcaggctgcccaggccaacatcaccctccaggagcagattgaggccattcacaaggccaaaggcctggtgccagaggatgacactaaagagaagattggccccagcaagcccaatgaaatccctcaacagccaccgccaccatcttcagccaccaacatccccagctcggctccacccatcacttcagtgccccgaccacccacaatgccacctccagttcgtactacagttgtctccgcagtacccgtcatgccccggcccccaatggcatctgtggtccggctgcccccaggctcagtga

SEQ ID NO: 186058 - DNA, 1963 bp, Homo sapiens
  Payload ID: 16637
  Gene Symbol: SF3A2
  Gene Name: splicing factor 3a, subunit 2, 66kDa
  Uniprot ID: Q15428
  ENST ID: ENST00000221494
  CDS Start-End: 436-1830
cggaccaaggtggaacagaatcaaggcaccccagcgatggctggcacccctttctagagcggccaggcgcaggcggagggagcgataacgtcgcccggagagtgtcagccgctccctcgcgaaagttggccccgtgcggccgcagcggaccgagggttcgttgagagcgttgtgcgcacgcgcagtttgccttccaggccgcgctttcagcctctccccctccagccttttccttcgcgcctcgggaccctctgactcacgccgctgggcgggccaggcatgcgcacaccagagggcccgtctcatttgccccggaagtgctttctttgcccgccgttcgccaaacgaagtcgtggaggtggcgaaacgaggaggagataacgcggccttgggctctggtgtctcccagtctgctaaagccctaaggccatcaccatggacttccagcatcgccccgggggcaagaccgggagcgggggcgtggcctcctcctccgagagcaaccgtgaccgcagggagcgcctccggcagctggccctggagaccatcgacatcaacaaggacccgtacttcatgaagaaccacctgggctcctatgaatgcaaactctgcctgacacttcacaacaatgaggggagctacctggcacatacgcaggggaagaagcaccagaccaacctggcccggcgagcagccaaggaggccaaggaggcccctgcccagcccgcgcctgagaaggtcaaggtggaggtgaagaagtttgtgaagatcggccgcccgggctacaaagtgaccaagcagagagactcggagatgggccagcagagcctcctcttccagattgactaccctgagatcgccgagggcatcatgccacgtcaccgcttcatgtctgcgtacgagcagaggatcgagcctccggaccggcgctggcagtacctgctcatggccgccgagccctacgagaccattgccttcaaggtgccgagcagagagatcgacaaggcggagggcaagttctggacacactggaaccgggagaccaagcagttcttcctccagttccactttaagatggagaagcccccggctccacccagcctccctgctggcccccctggggtgaagcggcctccacccccgctgatgaacggtctgccccctcggccaccgctgcctgagtctttgccaccgcccccgccaggaggcctgcctctgccacccatgccccccacagggcctgcgccctcagggcccccgggaccaccccagctacccccgccagctccaggggtccaccccccggccccagtggtgcatccccctgcatctggggtccatcccccagctcctggcgtccaccccccagctcctggcgtccatcccccagcccctggggtccacccaccaacctctggggtccaccccccagctcctggagtccaccctccagcccccggggttcacccaccagcccccggagtccacccaccagcccctggggttcacccaccagccccaggggtccatcctcccccatcagcgggggttcacccccaggccccgggggtgcacccagcagcccccgccgttcaccctcaggccccaggggtgcacccaccagccccagggatgcaccctcaggccccgggggtccacccccaacctcccggggtccatccgtcggctcctggggtccaccctcagcctccgggagttcacccctcaaatcctggggtgcaccccccaactcccatgcccccaatgctgaggcccccacttccctccgaaggcccagggaacatacctccccctcccccaaccaactgagaagctgctccctcccccagcaagcccagcgccaggtgctcttgccttttcccactgagagaaggctgctcttttgtactgccccccgctcattaaacagcctcccccagccctgagtgcactgatgtccgca

SEQ ID NO: 186059 - DNA, 543 bp, Homo sapiens
  Payload ID: 16637
  Gene Symbol: SF3A2
  Gene Name: splicing factor 3a, subunit 2, 66kDa
  ENST ID: ENST00000586396
  CDS Start-End: 139-543
cacgttagctggccccattttgcaggtgcaccccgctgtgaccgttgttcttgtgtatccttggacgacaccaaacagccaggcggagctctggaaaataggtgtctcccagtctgctaaagccctaaggccatcaccatggacttccagcatcgccccgggggcaagaccgggagcgggggcgtggcctcctcctccgagagcaaccgtgaccgcagggagcgcctccggcagctggccctggagaccatcgacatcaacaaggacccgtacttcatgaagaaccacctgggctcctatgaatgcaaactctgcctgacacttcacaacaatgaggggagctacctggcacatacgcaggggaagaagcaccagaccaacctggcccggcgagcagccaaggaggccaaggaggcccctgcccagcccgcgcctgagaaggtcaaggtggaggtgaagaagtttgtgaagatcggccgcccgggctacaaagtgaccaagcagagagactcggagatgggccagcagagcctcctcttccag

SEQ ID NO: 186060 - DNA, 3673 bp, Homo sapiens
  Payload ID: 16638
  Gene Symbol: SF3A3
  Gene Name: splicing factor 3a, subunit 3, 60kDa
  Uniprot ID: Q12874
  ENST ID: ENST00000373019
  CDS Start-End: 957-2462
gcagttttagtagagacggggtttcaccgtgttagacaggatggtctcaatctcctgatctcgttggatgcacagtattttatttaacatattcgctgccgatagacaagtcgtttctacacgtgaatttcttttttttttttttttttgagactgagtctcattctgtcgcccaggctggagtgcagtggcacgatctcagctgacggcaacctctgcttcccgggttcaagcgattctcctgcctcagcctccggagtagctgggactacaggcgcctgccatcacgcccggctaatttttgtttgtttgtttttagtagagacggggtttcaccatgttagccagcctggtcgtctcgaacctctgacctcaagtgatccgcccgcctcggcctcccaaagtgttgggattacaggcgtgagctaccgcgcccggcctcacatgtgaatttttttaaaaacaccaccagcaaaaccccactattcccattttcctgagaaagacgctgaggtccagagaaagagaaaacgttctcataatttatgctgaaagctgcgtcctcaagttccggtttcccaactcccatccgcactccaactgctcgcgcagtccacacaggatacctgcccgccaagccggccccagcaagccgcaggaagccgtccgctgaacctcaggttcttgggttttcctatgccccctggaggcatctgcgaacctctcggcatcgctccaccacacctcccaccagcaggtggcactgttgccatctccataacatggactggccttccttgtggtgctcctgttttcttaagtcccggggcacttccggcactcgcggaactttggtgcagcctgatgcgcaacgtggggactcaggcgcgctgggcggcaggagttgcttccggccgtgttggtggtctgaattgagaagccgcgactaagggaagatggagacaatactggagcagcagcggcgctatcatgaggagaaggaacggctcatggacgtcatggctaaagagatgctcaccaagaagtccacgctccgggaccagatcaattctgatcaccgcactcgggccatgcaagataggtatatggaggtcagtgggaacctgagggatttgtatgatgataaggatggattacgaaaggaggagctcaatgccatttcaggacccaatgagtttgctgaattctataatagactcaagcaaataaaggaattccaccggaagcacccaaatgagatctgtgtgccaatgtcagtggaatttgaggaactcctgaaggctcgagagaatccaagtgaagaggcacaaaacttggtggagttcacagatgaagagggatatggtcgttatctcgatctccatgactgttacctcaagtacattaacctgaaggcatctgagaagctggattatatcacatacctgtccatctttgaccaattatttgacattcctaaagaaaggaagaatgcagagtataagagatacctagagatgctgcttgagtaccttcaggattacacagatagagtgaagcctctccaagatcagaatgaactttttgggaagattcaggctgagtttgagaagaaatgggagaatgggacctttcctggatggccgaaagagacaagcagtgccctgacccatgctggagcccatcttgacctctctgcattctcctcctgggaggagttggcttctctgggtttggacagattgaaatctgctctcttagctttaggcttgaaatgtggcgggaccctagaagagcgagcccagagactattcagtaccaaaggaaagtccctggagtcacttgatacctctttgtttgccaaaaatcccaagtcaaagggcaccaagcgagacactgaaaggaacaaagacattgcttttctagaagcccagatctatgaatatgtagagattctcggggaacagcgacatctcactcatgaaaatgtacagcgcaagcaagccaggacaggagaagagcgagaagaagaggaagaagagcagatcagtgagagtgagagtgaagatgaagagaacgagatcatttacaaccccaaaaacctgccacttggctgggatggcaaacctattccctactggctgtataagcttcatggcctaaatatcaactacaactgtgagatttgtggaaactacacctaccgagggcccaaagccttccagcgacactttgctgaatggcgtcatgctcatggcatgaggtgtttgggcatcccaaacactgctcactttgctaatgtgacacagattgaagatgctgtctccttgtgggccaaactgaaattgcagaaggcttcagaacgatggcagcctgacactgaggaagaatatgaagactcaagtgggaatgttgtgaataagaagacatacgaggatctgaaaagacaaggactgctctagtgttcagggatgtagctcagcttttgggctagcccaggcttccctaagatctgctttttctatttctcccaaccaaatcctcttaaagaccctttgctatgtagtctcatggtctagcatgcatcttgtagaaacaaggcatgctggcagattgcagggttgagatgtgttttatctgttttatattttaaaagattctgccagaaaataaaaccagaccttgttctaaagcccagggttatggaccaactcagtgcttcaggtcttaacgcctccatacctcttcctcaccaactttactagtagctgagatttaatgggcacctattatgctacatatcatgttaggtaaatctgacctgacctctttccccaccctcctttgttgctgcttccctgaatgagtattaccccaggatgaggtctgccatcagcttagttagccattgatgcaaatactagggaaagactaggaggatgagccagggttgctactaaggactaagtgtcgcaccaaggtttgccttttgtatttgcataaagaaaggagttggagctgggtgcagtggcttgtgcctgtagtcccagctacttgggaggctgaggcaggagggttgcttgagactagcctaggtaacatagtgagaccctgtctcattaaaaaaaaaaaaaaggcatggtggcacgcactgtagtcccagctactcaggagactgaggctagaagatcctttgaacctaggagtttgagaccagcctgggcgatatagtgaggccccatctcaaaaaaaaaaaaaggggggggggggggagttgggctgtgttggaatgggcctgcagcccaacaaacaagggaactaggaccgacagtgacttcaccagcttgctaggtcagaatgagagactggtgggtctgtctacctgtttcttctacaagatccctatttgactgtaaaagtagctaatactcacatgttctccaatcccaggtagccatggtagagttgggtagagttgagcagctgccccaggatccaaatgtggtgtctgaaatggaaagaactaaggcaaccaggaaggcactgatctgccttataagcacagtcatctgaaagtcaggcctgctgcaggacaggatcccccagagaccccatttgcctctcaacactcagaccttcaactgttttttaataaatctactttttaaaaaaa

SEQ ID NO: 186061 - DNA, 6526 bp, Homo sapiens
  Payload ID: 16639
  Gene Symbol: SF3B1
  Gene Name: splicing factor 3b, subunit 1, 155kDa
  Uniprot ID: O75533
  ENST ID: ENST00000335508
  CDS Start-End: 93-4007
agtgcagcccccagctatttttctccgtggcggcggcgacgagcggaagttcttgggagcgccagttccgtctgtgtgttcgagtggacaaaatggcgaagatcgccaagactcacgaagatattgaagcacagattcgagaaattcaaggcaagaaggcagctcttgatgaagctcaaggagtgggcctcgattctacaggttattatgaccaggaaatttatggtggaagtgacagcagatttgctggatacgtgacatcaattgctgcaactgaacttgaagatgatgacgatgactattcatcatctacgagtttgcttggtcagaagaagccaggatatcatgcccctgtggcattgcttaatgatataccacagtcaacagaacagtatgatccatttgctgagcacagacctccaaagattgcagaccgggaagatgaatacaaaaagcataggcggaccatgataatttccccagagcgtcttgatccttttgcagatggagggaaaacccctgatcctaaaatgaatgctaggacttacatggatgtaatgcgagaacaacacttgactaaagaagaacgagaaattaggcaacagctagcagaaaaagctaaagctggagaactaaaagtcgtcaatggagcagcagcgtcccagcctccatcaaaacgaaaacggcgttgggatcaaacagctgatcagactcctggtgccactcccaaaaaactatcaagttgggatcaggcagagacccctgggcatactccttccttaagatgggatgagacaccaggtcgtgcaaagggaagcgagactcctggagcaaccccaggctcaaaaatatgggatcctacacctagccacacaccagcgggagctgctactcctggacgaggtgatacaccaggccatgcgacaccaggccatggaggcgcaacttccagtgctcgtaaaaacagatgggatgaaacccccaaaacagagagagatactcctgggcatggaagtggatgggctgagactcctcgaacagatcgaggtggagattctattggtgaaacaccgactcctggagccagtaaaagaaaatcacggtgggatgaaacaccagctagtcagatgggtggaagcactccagttctgacccctggaaagacaccaattggcacaccagccatgaacatggctacccctactccaggtcacataatgagtatgactcctgaacagcttcaggcttggcggtgggaaagagaaattgatgagagaaatcgcccactttctgatgaggaattagatgctatgttcccagaaggatataaggtacttcctcctccagctggttatgttcctattcgaactccagctcgaaagctgacagctactccaacacctttgggtggtatgactggtttccacatgcaaactgaagatcgaactatgaaaagtgttaatgaccagccatctggaaatcttccatttttaaaacctgatgatattcaatactttgataaactattggttgatgttgatgaatcaacacttagtccagaagagcaaaaagagagaaaaataatgaagttgcttttaaaaattaagaatggaacaccaccaatgagaaaggctgcattgcgtcagattactgataaagctcgtgaatttggagctggtcctttgtttaatcagattcttcctctgctgatgtctcctacacttgaggatcaagagcgtcatttacttgtgaaagttattgataggatactgtacaaacttgatgacttagttcgtccatatgtgcataagatcctcgtggtcattgaaccgctattgattgatgaagattactatgctagagtggaaggccgagagatcatttctaatttggcaaaggctgctggtctggctactatgatctctaccatgagacctgatatagataacatggatgagtatgtccgtaacacaacagctagagcttttgctgttgtagcctctgccctgggcattccttctttattgcccttcttaaaagctgtgtgcaaaagcaagaagtcctggcaagcgagacacactggtattaagattgtacaacagatagctattcttatgggctgtgccatcttgccacatcttagaagtttagttgaaatcattgaacatggtcttgtggatgagcagcagaaagttcggaccatcagtgctttggccattgctgccttggctgaagcagcaactccttatggtatcgaatcttttgattctgtgttaaagcctttatggaagggtatccgccaacacagaggaaagggtttggctgctttcttgaaggctattgggtatcttattcctcttatggatgcagaatatgccaactactatactagagaagtgatgttaatccttattcgagaattccagtctcctgatgaggaaatgaaaaaaattgtgctgaaggtggtaaaacagtgttgtgggacagatggtgtagaagcaaactacattaaaacagagattcttcctcccttttttaaacacttctggcagcacaggatggctttggatagaagaaattaccgacagttagttgatactactgtggagttggcaaacaaagtaggtgcagcagaaattatatccaggattgtggatgatctgaaagatgaagccgaacagtacagaaaaatggtgatggagacaattgagaaaattatgggtaatttgggagcagcagatattgatcataaacttgaagaacaactgattgatggtattctttatgctttccaagaacagactacagaggactcagtaatgttgaacggctttggcacagtggttaatgctcttggcaaacgagtcaaaccatacttgcctcagatctgtggtacagttttgtggcgtttaaataacaaatctgctaaagttaggcaacaggcagctgacttgatttctcgaactgctgttgtcatgaagacttgtcaagaggaaaaattgatgggacacttgggtgttgtattgtatgagtatttgggtgaagagtaccctgaagtattgggcagcattcttggagcactgaaggccattgtaaatgtcataggtatgcataagatgactccaccaattaaagatctgctgcctagactcacccccatcttaaagaacagacatgaaaaagtacaagagaattgtattgatcttgttggtcgtattgctgacaggggagctgaatatgtatctgcaagagagtggatgaggatttgctttgagcttttagagctcttaaaagcccacaaaaaggctattcgtagagccacagtcaacacatttggttatattgcaaaggccattggccctcatgatgtattggctacacttctgaacaacctcaaagttcaagaaaggcagaacagagtttgtaccactgtagcaatagctattgttgcagaaacatgttcaccctttacagtactccctgccttaatgaatgaatacagagttcctgaactgaatgttcaaaatggagtgttaaaatcgctttccttcttgtttgaatatattggtgaaatgggaaaagactacatttatgccgtaacaccgttacttgaagatgctttaatggatagagaccttgtacacagacagacggctagtgcagtggtacagcacatgtcacttggggtttatggatttggttgtgaagattcgctgaatcacttgttgaactatgtatggcccaatgtatttgagacatctcctcatgtaattcaggcagttatgggagccctagagggcctgagagttgctattggaccatgtagaatgttgcaatattgtttacagggtctgtttcacccagcccggaaagtcagagatgtatattggaaaatttacaactccatctacattggttcccaggacgctctcatagcacattacccaagaatctacaacgatgataagaacacctatattcgttatgaacttgactatatcttataattttattgtttattttgtgtttaatgcacagctacttcacaccttaaacttgctttgatttggtgatgtaaacttttaaacattgcagatcagtgtagaactggtcatagaggaagagctagaaatccagtagcatgatttttaaataacctgtctttgtttttgatgttaaacagtaaatgccagtagtgaccaagaacacagtgattatatacactatactggagggatttcatttttaattcatctttatgaagatttagaactcattccttgtgtttaaagggaatgtttaattgagaaataaacatttgtgtacaaaatgctaatttgtgtgtgttttttgaacatgacttgtaaaatgcggaactttgataaagtattggtttatgtggaataagtggcttaatttcattttctgtcacatggtttatagaaagtagttagctgaataaaaactatataaagtgatggcatctttgtcaaaattccattgttgtgttaataatgacagcaagaagagtagcctcaggggatgttcccctcaaactagcacaaccattccatcatcgtagaaaagtagcacttttgctaaactgtcttgaatattttgtacttacatagcgcctttcatctcttgatttctcaaaatgctttatgaacacatttaaagaaagtggtttaagtcttgtccaacacttgacaggtctgctgtgtttagcaagtgaggaatttaactttacttcaaaactgctttctgcctattaggagtgaggatacctaagtaatgctgatagaacaggacaatgttgggcttttctccatgttataagccactactcagcaatgcatcagtaaatacctattcacccactgtatgccagccactgtgcttatatgcaggggatgcaaaggtgcatgagacctgccctctacctttaagaacagtataatggagaaggggagacaaaccttgtgacagattccttatgtactgtgataatacacagtggcagcagctaaaatgtctaggtttgcttagctttgtattcagtaataataagttgatctaagagttcagcataaactgaatgaaatgccatttaatggtagaggaaccaagcattaaggcagtactacacttaattttttaagcaaatatgtaaagtatattttcaaacttttctaatgttatggccccaaatttcttagttttggcctttttactacctatactatttttactgttttgttttgtctccatgtggtagtacttctgtgaactctaaagggaaaaaaaattctgcaagcagcattagtatataactactactgtaagtaaaactgcctattgacactttaggagttcctgcttcagaagcttagttaagaaacagcttgtggccgggtgtggtggctcatgcctgtaatcccagcactttgggaggctgaggcgggcggatcacgaggtcaggagatcgagaccatcctggctaacgcggtgaagtcccgtctactaaaaatacaaaaattagccaggcgtggtggcgggcgcctgtagtcccagctactagggaggctgaggcaggagaatggcttgaacccgggaggcggagcttgcagtgagccgagatagcgctgctacactccagcctgggcgacagagactccgtctcaaaaaaaaaaaaaaaattgactttcaacaaattgatagtgagcattaagggtttccaagttggatttgtaactcctcatcattccttgtatgacaactttctgaatatatgtcactatgtagtaaaattaaacactccaaactcatctttctgttgttagaagttttcagcggtacttccatgcaactttaaatctcactgctctctatggttgatgtcaaatgaccttcagtaatgactgagaattgaatacaaatagattacaaagccaaaatttgatgttaaatgactcaggaaattttagttgtattttcaattcaagtacttagtagcctacgtttgcttggcctctggttctttatggaaaataggctttgtagtggcattgtggagcaaaggagactgttacaccttaattaactttttttactgatgcaaataatttgaggatagagaggagggaagtagtgaaagctatgacctaaaacattgggaccaaatagaggctcacagatatttggattattttatgtgcttattattaaataaggaaagcattttgtgatatgtggaagacgctatgtgaagttttacctatcttctcaaagaccttttcttttgtattttcttttggtgtttcttaaagccaaacaaagaaatgttcttaaggagacagggtgggtttttctgtgggcctttgttggtttttctgtgggccatcgccctctaatggaattgatctctggctgtttgatttttttcatattgtatttttaaaatttgttgtacagtgccctgtgagcaccaagtaccactagatgaataaaacgtattatatctaaa

SEQ ID NO: 186062 - DNA, 593 bp, Homo sapiens
  Payload ID: 16639
  Gene Symbol: SF3B1
  Gene Name: splicing factor 3b, subunit 1, 155kDa
  ENST ID: ENST00000414174
  CDS Start-End: 18-131
gtgttcgagtggacaaaatggcgaagatcgccaagactcacgaagatattgaagcacagattcgagaaattcaaggcaagaaggcagctcttgatgaagctcaaggagtgggcctcgattctacaggatgacgatgactattcatcatctacgagtttgcttggtcagaagaagccaggatatcatgcccctgtggcattgcttaatgatataccacagtcaacagaacagtatgatccatttgctgagcacagacctccaaagattgcagaccgggaagatgaatacaaaaagcataggcggaccatgataatttccccagagcgtcttgatccttttgcagatggtaattctttcccacttttctataagtattcagaaatttatttgtattaagttgtctttagccctttgattttttttggcatgcttctgaatttgcttttctttttaaaaatcccccttactatagatttgtatagatgtggttgaagtcacagatgccatattcttcatctttataatgcaagttttctttccaggtagaaggacaagaaaaaaatgagccaatgccatagaaacgcaaagggtta

SEQ ID NO: 186063 - DNA, 651 bp, Homo sapiens
  Payload ID: 16639
  Gene Symbol: SF3B1
  Gene Name: splicing factor 3b, subunit 1, 155kDa
  Uniprot ID: O75533
  ENST ID: ENST00000414963
  CDS Start-End: 81-515
agctatttttctccgtggcggcggcgacgagcggaagttcttgggagcgccagttccgtctgtgtgttcgagtggacaaaatggcgaagatcgccaagactcacgaagatattgaagcacagattcgagaaattcaaggcaagaaggcagctcttgatgaagctcaaggagtgggcctcgattctacaggttattatgaccaggaaatttatggtggaagtgacagcagatttgctggatacgtgacatcaattgctgcaactgaacttgaagatgatgacgatgactattcatcatctacgagtttgcttggtcagaagaagccaggatatcatgcccctgtggcattgcttaatgatataccacagtcaacagaacagtatgatccatttgctgagcacagacctccaaagattgcagaccgggaagatgaatacaaaaagcataggcggaccatgataatttccccagagcgtcttgatccttttgcagatggcttctattctgctgcttgaagtcagaactgctgatggagacaaaggcacgaaagtgtacgtattccggattagcaacccaggaacccatcacttctgaagactctaaactgtgctgtcattttgtttttatatgcattaaaatatttgttttaaa

SEQ ID NO: 186064 - DNA, 723 bp, Homo sapiens
  Payload ID: 16639
  Gene Symbol: SF3B1
  Gene Name: splicing factor 3b, subunit 1, 155kDa
  ENST ID: ENST00000424674
  CDS Start-End: 1-723
catccaagtatgccctgcattgcagggagactggagatctgtttgttttgcagttaaagggtatgcataagatgactccaccaattaaagatctgctgcctagactcacccccatcttaaagaacagacatgaaaaagtacaagagaattgtattgatcttgttggtcgtattgctgacaggggagctgaatatgtatctgcaagagagtggatgaggatttgctttgagcttttagagctcttaaaagcccacaaaaaggctattcgtagagccacagtcaacacatttggttatattgcaaaggccattggccctcatgatgtattggctacacttctgaacaacctcaaagttcaagaaaggcagaacagagtttgtaccactgtagcaatagctattgttgcagaaacatgttcaccctttacagtactccctgccttaatgaatgaatacagagttcctgaactgaatgttcaaaatggagtgttaaaatcgctttccttcttgtttgaatatattggtgaaatgggaaaagactacatttatgccgtaacaccgttacttgaagatgctttaatggatagagaccttgtacacagacagacggctagtgcagtggtacagcacatgtcacttggggtttatggatttggttgtgaagattcgctgaatcacttgttgaactatgtatggcccaatgtatttgagacatctcctcatg

SEQ ID NO: 186065 - DNA, 2127 bp, Homo sapiens
  Payload ID: 16639
  Gene Symbol: SF3B1
  Gene Name: splicing factor 3b, subunit 1, 155kDa
  ENST ID: ENST00000487698
  CDS Start-End: 81-545
agctatttttctccgtggcggcggcgacgagcggaagttcttgggagcgccagttccgtctgtgtgttcgagtggacaaaatggcgaagatcgccaagactcacgaagatattgaagcacagattcgagaaattcaaggcaagaaggcagctcttgatgaagctcaaggagtgggcctcgattctacaggttattatgaccaggaaatttatggtggaagtgacagcagatttgctggatacgtgacatcaattgctgcaactgaacttgaagatgatgacgatgactattcatcatctacgagtttgcttggtcagaagaagccaggatatcatgcccctgtggcattgcttaatgatataccacagtcaacagaacagtatgatccatttgctgagcacagacctccaaagattgcagaccgggaagatgaatacaaaaagcataggcggaccatgataatttccccagagcgtcttgatccttttgcagatggtaattctttcccacttttctataagtattcagaaatttatttgtattaagttgtctttagccctttgattttttttggcatgcttctgaatttgcttttctttttaaaaatcccccttactatagatttgtatagatgtggttgaagtcacagatgccatattcttcatctttataatgcaagttttctttccaggtagaaggacaagaaaaaaatgagccaatgccatagaaacgcaaagggttaaaggttttacttttacttttgttttgggtacgctttctatacttggatcaaatgtatttttctgctcaaaatactttcaaattattgaaagttttcattccaaatcctagatttttaggattgttacccttgagaaactgtttctcacactagagctccccccatagtgctctaaatatagcttagtaaaggcacctactttgctctaagcatacttaaagttaaaacaaaagtatgtatacgaagagtttgatatttttaatagttggagtctgttttgctaattttagtgtgcaagtcagcacaaggggcatagtgagcctgatggaagctttcctcaggtgagtgagtttcacaatcaaaattaggtgcctgtttcttaaaattagattctgctgcaggtttacatactagacttttcagcctgcatgaattagtagggatattctttttttacttgcataattgtaattgatttaaacatgtatgccagaattcacaggcccatactaactgtccttaatttctttcctacagcagtactgctatatgccagtcctgtctgcattcttaagggtgcagttcaacacatcctctctagattatggtgaaaaagtattccaaaggaagtcttatcagagctagtgtcagaaagaatgacactaccaattgggcatgatcttcagcataggaaatgtcttagaattttattattttttcctaaattgtgatgctatactacttgtatagctagttaccacatttctaaagcatagtgtgcctctgtgaatcttgttatatactgtttgggcttctgtaagatattttgaagtttgaaaagcaaatactgaaactttaaccaagagactgacacatctctttgtacaccacgttgcttctgtgtgcatcataataactggtagaagtaatatatttaaagtaatatgtttccagttttaatttatgctttctaagaaataaaaatatgttttctgggtcaacaaaacttaaagcatgaagccctttttagtaacgtgacatcagaataagattataggtatatttttaaaatcagattttctaaactacaattgttttagaacactgtatgaagaacttatctagtcatagttatttgtagtcaggattttaacagcttgcaacaggtaatgttttgaatataaatatctttccaaagtgttactaatggtaaagagataattttctaggcttctattctgctgcttgaagtcagaactgctgatggagacaaaggcacgaaagtgtacgtattccggattagcaacccaggaacccatcacttctgaagactctaaactgtgctgtcattttgtttttatatgcattaaaatatttgttttaaa

SEQ ID NO: 186066 - DNA, 600 bp, Homo sapiens
  Payload ID: 16639
  Gene Symbol: SF3B1
  Gene Name: splicing factor 3b, subunit 1, 155kDa
  Uniprot ID: O75533
  ENST ID: ENST00000409915
  CDS Start-End: 29-463
gttccgtctgtgtgttcgagtggacaaaatggcgaagatcgccaagactcacgaagatattgaagcacagattcgagaaattcaaggcaagaaggcagctcttgatgaagctcaaggagtgggcctcgattctacaggttattatgaccaggaaatttatggtggaagtgacagcagatttgctggatacgtgacatcaattgctgcaactgaacttgaagatgatgacgatgactattcatcatctacgagtttgcttggtcagaagaagccaggatatcatgcccctgtggcattgcttaatgatataccacagtcaacagaacagtatgatccatttgctgagcacagacctccaaagattgcagaccgggaagatgaatacaaaaagcataggcggaccatgataatttccccagagcgtcttgatccttttgcagatggcttctattctgctgcttgaagtcagaactgctgatggagacaaaggcacgaaagtgagggaaaacccctgatcctaaaatgaatgctaggacttacatggatgtaatgcgagaacaacacttgactaaagaagaacgagaaattaggcaacagcta

SEQ ID NO: 186067 - DNA, 2903 bp, Homo sapiens
  Payload ID: 16640
  Gene Symbol: SF3B2
  Gene Name: splicing factor 3b, subunit 2, 145kDa
  Uniprot ID: Q13435
  ENST ID: ENST00000322535
  CDS Start-End: 50-2737
gaggctggccccagcttccgggttggtcgcgcgccttcctgcggctaagatggcgacggagcatcccgagcctcccaaagcagaattgcagctgccgccgccgccacctccaggccactatggcgcctgggctgcccaggagcttcaggccaagttggcagagatcggagctccgatccagggtaatcgcgaggagctggtggagcggctgcagagctacacccgccagactggcatcgtgctgaatcggccggttttgagaggggaagatggggacaaagccgctccacctcccatgtcggcacagctccctggaattcccatgccaccaccacctttgggactcccccctctgcagcctcctccgccacccccaccacctccaccaggccttggccttggctttcctatggcccacccaccaaatttggggcccccgcctcctctccgtgtgggtgagccagtggcactgtcagaggaggagcggctgaagttggctcagcagcaggcggcattgctgatgcagcaggaggagcgtgccaagcagcagggagatcattcgctgaaggaacatgagctcttggagcagcagaagcgggcagctgtgttactggagcaggaacgacagcaggagattgccaagatgggcaccccagtccctcggcccccacaagacatgggccagattggtgtgcgcactcctctgggtcctcgagtagctgctccagtgggcccagtgggccccactcctacagttttgcccatgggagcccctgttccccggcctcgtggtcccccaccgccccctggagatgagaacagagagatggatgacccctctgtgggccccaagatcccccaggctttggagaagatcctgcagctgaaggagagccgccaggaagagatgaattctcagcaggaggaagaggaaatggaaacagatgctcgctcgtccctgggccagtcagcgtcagagactgaggaggacacagtgtccgtatctaaaaaggagaaaaaccggaagcgtaggaaccgaaagaagaagaaaaagccccagcgggtgcgaggggtgtcctctgagagctctggggaccgggagaaagactcaacccggtcccgtggctctgattccccagcagctgatgttgagattgagtatgtgactgaagaacctgaaatttacgagcccaactttatcttctttaagaggatctttgaggcttttaagctcactgatgatgtgaagaaggagaaagagaaggagccagagaaacttgacaaactggagaactctgcagcccccaagaagaagggatttgaagaggagcacaaggacagtgatgatgacagcagtgatgacgagcaggaaaagaagccagaagcccccaagctgtccaagaagaagttgcgccgaatgaaccgcttcactgtggctgaactcaagcagctggtggctcggcccgatgtcgtggagatgcacgatgtgacagcgcaggaccctaagctcttggttcacctcaaggccactcggaactctgtgcctgtgccacgccactggtgttttaagcgcaaatacctgcagggcaaacggggcattgagaagccccccttcgagctgccagacttcatcaaacgcacaggcatccaggagatgcgagaggccctgcaggagaaggaagaacagaagaccatgaagtcaaaaatgcgagagaaagttcggcctaagatgggcaaaattgacatcgactaccagaaactgcatgatgccttcttcaagtggcagaccaagccaaagctgaccatccatggggacctgtactatgaggggaaggagttcgagacacgactgaaggagaagaagccaggagatctgtctgatgagctaaggatttccttggggatgccagtaggaccaaatgcccacaaggtccctcccccatggctgattgccatgcagcgatatggaccacccccatcgtatcccaacctgaaaatccctgggctgaactcgcccatccctgagagctgttcctttgggtaccatgctggtggctggggcaaacctccagtggatgagactgggaaaccgctctatggggacgtgtttggaaccaatgctgctgaatttcagaccaagactgaggaagaagagattgatcggaccccttggggggaactggaaccatctgatgaagaatcctcagaagaagaggaagaggaagaaagtgatgaagacaaaccagatgagacaggctttattacccctgcagacagtggccttatcactcctggaggcttttcatcagtgcctgctggaatggagacccctgaactcattgagctgaggaagaagaagattgaggaggcgatggacggaagtgagacacctcagctcttcactgtgttgccagagaagagaacagccactgttggaggggccatgatgggatcaacccacatttatgacatgtccacggttatgagccggaagggcccggctcctgagctgcaaggtgtggaagtggcgctggcgcctgaagagttggagctggatcctatggccatgacccagaagtatgaggagcatgtgcgggagcagcaggctcaagtagagaaggaggacttcagtgacatggtggctgagcacgctgccaaacagaagcaaaaaaaacggaaagctcagccccaggacagccgtgggggcagcaagaaatataaggagttcaagttttaggtcccctcacactagccctttttttggccctacgtctggatgcctgggcttcacacaagaaccacctctcccgcagttcccaaggacttgtcatttcatgttcttattttagacctgttttgtaaataaagctgtttcccaaggaaagagatgaatatttaacact

SEQ ID NO: 186068 - DNA, 1163 bp, Homo sapiens
  Payload ID: 16640
  Gene Symbol: SF3B2
  Gene Name: splicing factor 3b, subunit 2, 145kDa
  ENST ID: ENST00000530322
  CDS Start-End: 1-1163
cccgagcctcccaaagcagaattgcagctgccgccgccgccacctccaggccactatggcgcctgggctgcccaggagcttcaggccaagttggcagagatcggagctccgatccagggtaatcgcgaggagctggtggagcggctgcagagctacacccgccagactggcatcgtgctgaatcggccggttttgagaggggaagatggggacaaagccgctccacctcccatgtcggcacagctccctggaattcccatgccaccaccacctttgggactcccccctctgcagcctcctccgccacccccaccacctccaccaggccttggccttggctttcctatggcccacccaccaaatttggggcccccgcctcctctccgtgtgggtgagccagtggcactgtcagaggaggagcggctgaagttggctcagcagcaggcggcattgctgatgcagcaggaggagcgtgccaagcagcagggagatcattcgctgaaggaacatgagctcttggagcagcagaagcgggcagctgtgttactggagcaggaacgacagcaggagattgccaagatgggcaccccagtccctcggcccccacaagacatgggccagattggtgtgcgcactcctctgggtcctcgagctgctccagtgggcccagtgggccccactcctacagttttgcccatgggagcccctgttccccggcctcgtggtcccccaccgccccctggagatgagaacagagagatggatgacccctctgtgggccccaagatcccccaggctttggagaagatcctgcagctgaaggagagccgccaggaagagatgaattctcagcaggaggaagaggaaatggaaacagatgctcgctcgtccctgggccagtcagcgtcagagactgaggaggacacagtgtccgtatctaaaaaggagaaaaaccggaagcgtaggaaccgaaagaagaagaaaaagccccagcgggtgcgaggggtgtcctctgagagctctggggaccgggagaaagactcaacccggtcccgtggctctgattccccagcagctgatgttgagattgagtatgtgactgaagaacctgaaatttacgagcccaactttatcttctttaagaggatctttgaggcttttaa

SEQ ID NO: 186069 - DNA, 1081 bp, Homo sapiens
  Payload ID: 16640
  Gene Symbol: SF3B2
  Gene Name: splicing factor 3b, subunit 2, 145kDa
  ENST ID: ENST00000533595
  CDS Start-End: 21-1081
cgcgccttcctgcggctaagatggcgacggagcatcccgagcctcccaaagcagaattgcagctgccgccgccgccacctccaggccactatggcgcctgggctgcccaggagcttcaggccaagttggcagagatcggagctccgatccagggtaatcgcgaggagctggtggagcggctgcagagctacacccgccagactggcatcgtgctgaatcggccggttttgagaggggaagatggggacaaagccgctccacctcccatgtcggcacagctccctggaattcccatgccaccaccacctttgggactcccccctctgcagcctcctccgccacccccaccacctccaccaggccttggccttggctttcctatggcccacccaccaaatttggggcccccgcctcctctccgtgtgggtgagccagtggcactgtcagaggaggagcggctgaagttggctcagcagcaggcggcattgctgatgcagcaggaggagcgtgccaagcagggagatcattcgctgaaggaacatgagctcttggagcagcagaagcgggcagctgtgttactggagcaggaacgacagcaggagattgccaagatgggcaccccagtccctcggcccccacaagacatgggccagattggtgtgcgcactcctctgggtcctcgagctgctccagtgggcccagtgggccccactcctacagttttgcccatgggagcccctgttccccggcctcgtggtcccccaccgccccctggagatgagaacagagagatggatgacccctctgtgggccccaagatcccccaggctttggagaagatcctgcagctgaaggagagccgccaggaagagatgaattctcagcaggaggaagaggaaatggaaacagatgctcgctcgtccctgggccagtcagcgtcagagactgaggaggacacagtgtccgtatctaaaaaggagaaaaaccggaagcgtaggaaccgaaagaagaagaaaaagccccagcgggtgcgaggggtgtcctctgagagctctggggaccgggagaaagactcaacccg

SEQ ID NO: 186070 - DNA, 3254 bp, Homo sapiens
  Payload ID: 16640
  Gene Symbol: SF3B2
  Gene Name: splicing factor 3b, subunit 2, 145kDa
  ENST ID: ENST00000528302
  CDS Start-End: 55-2691
gccctgaggctggccccagcttccgggttggtcgcgcgccttcctgcggctaagatggcgacggagcatcccgagcctcccaaagcagaattgcagctgccgccgccgccacctccaggccactatggcgcctgggctgcccaggagcttcaggccaagttggcagagatcggagctccgatccagggtaatcgcgaggagctggtggagcggctgcagagctacacccgccagactggcatcgtgctgaatcggccggttttgagaggggaagatggggacaaagccgctccacctcccatgtcggcacagctccctggaattcccatgccaccaccacctttgggactcccccctctgcagcctcctccgccacccccaccacctccaccaggccttggccttggctttcctatggcccacccaccaaatttggggcccccgcctcctctccgtgtgggtgagccagtggcactgtcagaggaggagcggctgaagttggctcagcagcaggcggcattgctgatgcagcaggaggagcgtgccaagcaggcagctgtgttactggagcaggaacgacagcaggagattgccaagatgggcaccccagtccctcggcccccacaagacatgggccagattggtgtgcgcactcctctgggtcctcgagtagctgctccagtgggcccagtgggccccactcctacagttttgcccatgggagcccctgttccccggcctcgtggtcccccaccgccccctggagatgagaacagagagatggatgacccctctgtgggccccaagatcccccaggctttggagaagatcctgcagctgaaggagagccgccaggaagagatgaattctcagcaggaggaagaggaaatggaaacagatgctcgctcgtccctgggccagtcagcgtcagagactgaggaggacacagtgtccgtatctaaaaaggagaaaaaccggaagcgtaggaaccgaaagaagaagaaaaagccccagcgggtgcgaggggtgtcctctgagagctctggggaccgggagaaagactcaacccggtcccgtggctctgattccccagcagctgatgttgagattgagtatgtgactgaagaacctgaaatttacgagcccaactttatcttctttaagaggatctttgaggcttttaagctcactgatgatgtgaagaaggagaaagagaaggagccagagaaacttgacaaactggagaactctgcagcccccaagaagaagggatttgaagaggagcacaaggacagtgatgatgacagcagtgatgacgagcaggaaaagaagccagaagcccccaagctgtccaagaagaagttgcgccgaatgaaccgcttcactgtggctgaactcaagcagctggtggctcggcccgatgtcgtggagatgcacgatgtgacagcgcaggaccctaagctcttggttcacctcaaggccactcggaactctgtgcctgtgccacgccactggtgttttaagcgcaaatacctgcagggcaaacggggcattgagaagccccccttcgagctgccagacttcatcaaacgcacaggcatccaggagatgcgagaggccctgcaggagaaggaagaacagaagaccatgaagtcaaaaatgcgagagaaagttcggcctaagatgggcaaaattgacatcgactaccagaaactgcatgatgccttcttcaagtggcagaccaagccaaagctgaccatccatggggacctgtactatgaggggaaggagttcgagacacgactgaaggagaagaagccaggagatctgtctgatgagctaaggatttccttggggatgccagtaggaccaaatgcccacaaggtccctcccccatggctgattgccatgcagcgatatggaccacccccatcgtatcccaacctgaaaatccctgggctgaactcgcccatccctgagagctgttcctttgggtaccatgctggtggctggggcaaacctccagtggatgagactgggaaaccgctctatggggacgtgtttggaaccaatgctgctgaatttcagaccaagactgaggaagaagagattgatcggaccccttggggggaactggaaccatctgatgaagaatcctcagaagaagaggaagaggaagaaagtgatgaagacaaaccagatgagacaggctttattacccctgcagacagtggccttatcactcctggaggcttttcatcagtgcctgctggaatggagacccctgaactcattgagctgaggaagaagaagattgaggaggcgatggacggaagtgagacacctcagctcttcactgtgttgccagagaagagaacagccactgttggaggggccatgatgggatcaacccacatttatgacatgtccacggttatgagccggaagggcccggctcctgagctgcaaggtgtggaagtggcgctggcgcctgaagagttggagctggatcctatggccatgacccagaagtatgaggagcatgtgcgggagcagcaggctcaagtagagaaggaggacttcagtgacatggtggctgagcacgctgccaaacagaagcaaaaaaaacggaaagctcagccccaggacagccgtgggggcagcaagaaatataaggagttcaagttttaggtcccctcacactagccctttttttggccctacgtctggatgcctgggcttcacacaagaaccacctctcccgcagttcccaaggacttgtcatttcatgttcttattttagacctgttttgtaaataaagctgtttcccaaggaaagagatgaatatttaacactcctgagcctccctcatctccttttagccccttcttgcaaaaggactaaaatagtctctttctacaatcactgggctgccccagtaaccacgaacataaactgggattagacggcgcatttgactggtggtgacgccaaccccaggctgaaatctgtgtttcaccactgccctgctttgtaggaaggcttgggggaagtacctctaggtctggtttgaccttactactttgtccttggggagtaaaaatagccagattagcgccctagcgcggcagaggaagtaacagtgggcttgggaagtaggccagggcaggccttcccaactgaccttgtgaccagaagttcaagtccttacctgtgcgacaacatagctcaaaagctaaattgtcttgagtcc

SEQ ID NO: 186071 - DNA, 841 bp, Homo sapiens
  Payload ID: 16640
  Gene Symbol: SF3B2
  Gene Name: splicing factor 3b, subunit 2, 145kDa
  ENST ID: ENST00000524627
  CDS Start-End: 21-841
cgcgccttcctgcggctaagatggcgacggagcatcccgagcctcccaaagcagaattgcagctgccgccgccgccacctccaggccactatggcgcctgggctgcccaggagcttcaggccaagttggcagagatcggagctccgatccagggtaatcgcgaggagctggtggagcggctgcagagctacacccgccagactggcatcgtgctgaatcggccggttttgagaggggaagatggggacaaagccgctccacctcccatgtcggcacagctccctggaattcccatgccaccaccacctttgggactcccccctctgcagcctcctccgccacccccaccacctccaccaggccttggccttggctttcctatggcccacccaccaaatttggggcccccgcctcctctccgtgtgggtgagccagtggcactgtcagaggaggagcggctgaagttggctcagcagcaggcggcattgctgatgcagcaggaggagcgtgccaagcagggagatcattcgctgaaggaacatgagctcttggagcagcagaagcgggcagctgtgttactggagcaggaacgacagcaggagattgccaagatgggcaccccagtccctcggcccccacaagacatgggccagattggtgtgcgcactcctctgggtcctcgagtagctgctccagtgggcccagtgggccccactcctacagttttgcccatgggagcccctgttccccggcctcgtggtcccccaccgccccctggagatgagaacagagagatggatgacccctctgtgggccccaagatcccccaggctttggagaa

SEQ ID NO: 186072 - DNA, 432 bp, Homo sapiens
  Payload ID: 16640
  Gene Symbol: SF3B2
  Gene Name: splicing factor 3b, subunit 2, 145kDa
  ENST ID: ENST00000524475
  CDS Start-End: 191-432
gaggggcggaggcaggccgctggggcctgacctggccgggctggcctgccccattgatcgtgtactttgccctgcaggtaatcgcgaggagctggtggagcggctgcagagctacacccgccagactggcatcgtgctgaatcggccggttttgagaggggaagatggggacaaagccgctccacctcccatgtcggcacagctccctggaattcccatgccaccaccacctttgggactcccccctctgcagcctcctccgccacccccaccacctccaccaggccttggccttggctttcctatggcccacccaccaaatttggggcccccgcctcctctccgtgtgggtgagccagtggcactgtcagaggaggagcggctgaagttggctcagcagcaggcggcattgctgatgcagcaggaggagcg

SEQ ID NO: 186073 - DNA, 1080 bp, Homo sapiens
  Payload ID: 16640
  Gene Symbol: SF3B2
  Gene Name: splicing factor 3b, subunit 2, 145kDa
  ENST ID: ENST00000530981
  CDS Start-End: 1-947
ccaagccaaagctgaccatccatggggacctgtactatgaggggaaggagttcgagacacgactgaaggagaagaagccaggagatctgtctgatgagctaaggatttccttggggatgccagtaggaccaaatgcccacaaggtccctcccccatggctgattgccatgcagcgatatggaccacccccatcgtatcccaacctgaaaatccctgggctgaactcgcccatccctgagagctgttcctttgggtaccatgctggtggctggggcaaacctccagtggatgagactgggaaaccgctctatggggacgtgtttggaaccaatgctgctgaatttcagaccaagactgaggaagaagagattgatcggaccccttggggggaactggaaccatctgatgaagaatcctcagaagaagaggaagaggaagaaagtgatgaagacaaaccagatgagacaggctttattacccctgcagacagtggccttatcactcctggaggcttttcatcagtgcctgctggaatggagacccctgaactcattgagctgaggaagaagaagattgaggaggcgatggacggtgagacacctcagctcttcactgtgttgccagagaagagaacagccactgttggaggggccatgatgggatcaacccacatttatgacatgtccacggttatgagccggaagggcccggctcctgagctgcaaggtgtggaagtggcgctggcgcctgaagagttggagctggatcctatggccatgacccagaagtatgaggagcatgtgcgggagcagcaggctcaagtagagaaggaggacttcagtgacatggtggctgagcacgctgccaaacagaagcaaaaaaaacggaaagctcagccccaggacagccgtgggggcagcaagaaatataaggagttcaagttttaggtcccctcacactagccctttttttggccctacgtctggatgcctgggcttcacacaagaaccacctctcccgcagttcccaaggacttgtcatttcatgttcttattttagacctgttttgtaaataaagct

SEQ ID NO: 186074 - DNA, 2817 bp, Homo sapiens
  Payload ID: 16640
  Gene Symbol: SF3B2
  Gene Name: splicing factor 3b, subunit 2, 145kDa
  ENST ID: ENST00000610523
  CDS Start-End: 49-2664
ctcccaaagcagaattgcagctgccgccgccgccacctccaggccactatggcgcctggggcccaggagcttcaggccaagttggcagagatcggagctccgatccagggtaatcgcgaggagctggtggagcggctgcagagctacacccgccagactggcatcgtgctgaatcggccggttttgagaggggaagatggggacaaagccgctccacctcccatgtcggcacagctccctggaattcccatgccaccaccacctttgggactcccccctctgcagcctcctccgccacccccaccacctccaccaggccttggccttggctttcctatggcccacccaccaaatttggggcccccgcctcctctccgtgtgggtgagccagtggcactgtcagaggaggagcggctgaagttggctcagcagcaggcggcattgctgatgcagcaggaggagcgtgccaagcagcagggagatcattcgctgaaggaacatgagctcttggagcagcagaagcgggcagctgtgttactggagcaggaacgacagcaggagattgccaagatgggcaccccagtccctcggcccccacaagacatgggccagattggtgtgcgcactcctctgggtcctcgagtagctgctccagtgggcccagtgggccccactcctacagttttgcccatgggagcccctgttccccggcctcgtggtcccccaccgccccctggagatgagaacagagagatggatgacccctctgtgggccccaagatcccccaggctttggagaagatcctgcagctgaaggagagccgccaggaagagatgaattctcagcaggaggaagaggaaatggaaacagatgctcgctcgtccctgggccagtcagcgtcagagactgaggaggacacagtgtccgtatctaaaaaggagaaaaaccggaagcgtaggaaccgaaagaagaagaaaaagccccagcgggtgcgaggggtgtcctctgagagctctggggaccgggagaaagactcaacccggtcccgtggctctgattccccagcagctgatgttgagattgagtatgtgactgaagaacctgaaatttacgagcccaactttatcttctttaagaggatctttgaggcttttaagctcactgatgatgtgaagaaggagaaagagaaggagccagagaaacttgacaaactggagaactctgcagcccccaagaagaagggatttgaagaggagcacaaggacagtgatgatgacagcagtgatgacgagcaggaaaagaagccagaagcccccaagctgtccaagaagaagttgcgccgaatgaaccgcttcactgtggctgaactcaagcagctggtggctcggcccgatgtcgtggagatgcacgatgtgacagcgcaggaccctaagctcttggttcacctcaaggccactcggaactctgtgcctgtgccacgccactggtgttttaagcgcaaatacctgcagggcaaacggggcattgagaagccccccttcgagctgccagacttcatcaaacgcacaggcatccaggagatgcgagaggccctgcaggagaaggaagaacagaagaccatgaagtcaaaaatgcgagagaaagttcggcctaagatgggcaaaattgacatcgactaccagaaactgcatgatgccttcttcaagtggcagaccaagccaaagctgaccatccatggggacctgtactatgaggggaaggagttcgagacacgactgaaggagaagaagccaggagatctgtctgatgagctaaggatttccttggggatgccagtaggaccaaatgcccacaaggtccctcccccatggctgattgccatgcagcgatatggaccacccccatcgtatcccaacctgaaaatccctgggctgaactcgcccatccctgagagctgttcctttgggtaccatgctggtggctggggcaaacctccagtggatgagactgggaaaccgctctatggggacgtgtttggaaccaatgctgctgaatttcagaccaagactgaggaagaagagattgatcggaccccttggggggaactggaaccatctgatgaagaatcctcagaagaagaggaagaggaagaaagtgatgaagacaaaccagatgagacaggctttattacccctgcagacagtggccttatcactcctggaggcttttcatcagtgcctgctggaatggagacccctgaactcattgagctgaggaagaagaagattgaggaggcgatggacggaagtgagacacctcagctcttcactgtgttgccagagaagagaacagccactgttggaggggccatgatgggatcaacccacatttatgacatgtccacggttatgagccggaagggcccggctcctgagctgcaaggtgtggaagtggcgctggcgcctgaagagttggagctggatcctatggccatgacccagaagtatgaggagcatgtgcgggagcagcaggctcaagtagagaaggaggacttcagtgacatggtggctgagcacgctgccaaacagaagcaaaaaaaacggaaagctcagccccaggacagccgtgggggcagcaagaaatataaggagttcaagttttaggtcccctcacactagccctttttttggccctacgtctggatgcctgggcttcacacaagaaccacctctcccgcagttcccaaggacttgtcatttcatgttcttattttagacctgttttgtaaataaagctgtttcccaaggaaagagatg

SEQ ID NO: 186075 - DNA, 9720 bp, Homo sapiens
  Payload ID: 16641
  Gene Symbol: SF3B3
  Gene Name: splicing factor 3b, subunit 3, 130kDa
  Uniprot ID: Q15393
  ENST ID: ENST00000302516
  CDS Start-End: 212-3865
gcctttttccgccgcgcgccaccagaatgtccctgtcttgaggtctaatggcggacgccagtatgttggagttggtggtggcttaagttttgaagggaggtagcatccgttggatatccacaccatccttctcgctgcaggctttcttggactccgtactgttggtgtaaccaaggcctggaggtctgggtggctcaggtttcctgcagccatgtttctgtacaacttaaccttgcagagagccactggcatcagctttgccattcatggaaacttttctggaaccaaacaacaagaaattgttgtttcccgtgggaagatcttggagctgcttcgcccagaccccaacactggcaaagtacataccctactcactgtggaagtattcggtgttatccggtcactcatggcctttaggctgacaggtggcaccaaagactacattgtagttggcagtgactctggtcgaattgttattttggaataccagccatctaagaatatgtttgagaagattcaccaagaaacctttggcaagagtggatgccgtcgcatcgttcctggccagttcttagctgtggatcccaaagggcgagccgttatgattagtgccattgagaaacagaaattggtgtatattttgaacagagatgctgcagcccgacttaccatttcatctcccctggaagcccacaaagcaaacactttagtgtatcatgtagttggagtagatgtcggatttgaaaatccaatgtttgcttgtctggaaatggattatgaggaagcagacaatgatccaacaggggaagcagcagctaatacccagcagacacttactttctatgagctagaccttggtttaaatcatgtggtccgaaaatacagtgaacctttggaggaacacggcaacttccttattacagttccaggagggtcagatggtccaagtggagtactgatctgctctgaaaactatattacttacaagaactttggtgaccagccagatatccgctgtccaattcccaggaggcggaatgacctggatgaccctgaaagaggaatgatttttgtctgctctgcaacccataaaaccaaatcgatgttcttctttttggctcaaactgagcagggagatatctttaagatcactttggagacagatgaagatatggttactgagatccggctcaaatattttgatactgtacccgttgctgctgccatgtgtgtgcttaaaacagggttcctttttgtagcatcagaatttggaaaccattacttatatcaaattgcacatcttggagatgatgatgaagaacctgagttttcatcagccatgcctctggaagaaggagacacattcttttttcagccaagaccacttaaaaaccttgtgctggttgatgagttggacagcctctctcccattctgttttgccagatagctgatctggccaatgaagatactccacagttgtatgtggcctgtggtaggggaccccgatcatctctgagagtcctaagacatggacttgaggtgtcagaaatggctgtttctgagctacctggtaaccccaacgctgtctggacagtgcgtcgacacattgaagatgagtttgatgcctacatcattgtgtctttcgtgaatgccaccctagtgttgtccattggagaaactgtagaagaagtgactgactctgggttcctggggaccaccccgaccttgtcctgctccttattaggagatgatgccttggtgcaggtctatccagatggcattcggcacatacgagcagacaagagagtcaatgagtggaagacccctggaaagaaaacaattgtgaagtgtgcagtgaaccagcgacaagtggtgattgccctgacaggaggagagctggtctatttcgagatggatccttcaggacagctgaatgagtacacagaacggaaggagatgtcagcagatgtggtgtgcatgagtctggccaatgtaccccctggagagcagcggtctcgcttcctggctgtggggcttgtggacaacactgtcagaatcatctccctggatccctcagactgtttgcaacctctaagcatgcaggctctcccagcccagcctgagtccttgtgtatcgtggaaatgggtgggactgagaagcaggatgagctgggtgagaggggctcgattggcttcctatacctgaatattgggctacagaacggtgtgctgctgaggactgtcttggaccctgtcactggggatttgtctgatactcgcactcggtacctggggtcccgtcctgtgaagctcttccgagtccgaatgcaaggccaggaggcagtattggccatgtcaagccgctcatggttgagctattcttaccaatctcgcttccatctcaccccactgtcttacgagacactggaatttgcatcgggttttgcctcggaacagtgtcccgagggcattgtggccatctccaccaacaccctacggattttggcattagagaagctcggtgctgtcttcaatcaagtagccttcccactgcagtacacacccaggaaatttgtcatccaccctgagagtaacaaccttattatcattgaaacggaccacaatgcctacactgaggccacgaaagctcagagaaagcagcagatggcagaggaaatggtggaagcagcaggggaggatgagcgggagctggccgcagagatggcagcagcattcctcaatgaaaacctccctgaatccatctttggagctcccaaggctggcaatgggcagtgggcctctgtgatccgagtgatgaatcccattcaagggaacacactggaccttgtccagctggaacagaatgaggcagcttttagtgtggctgtgtgcaggttttccaacactggtgaagactggtatgtgctggtgggtgtggccaaggacctgatactaaacccccgatctgtggcagggggcttcgtctatacttacaagcttgtgaacaatggggaaaaactggagtttttgcacaagactcctgtggaagaggtccctgctgctattgccccattccaggggagggtgttgattggtgtggggaagctgttgcgtgtctatgacctgggaaagaagaagttactccgaaaatgtgagaataagcatattgccaattatatctctgggatccagactatcggacatagggtaattgtatctgatgtccaagaaagtttcatctgggttcgctacaagcgtaatgaaaaccagcttatcatctttgctgatgatacctacccccgatgggtcactacagccagcctcctggactatgacactgtggctggggcagacaagtttggcaacatatgtgtggtgaggctcccacctaacaccaatgatgaagtagatgaggatcctacaggaaacaaagccctgtgggaccgtggcttgctcaatggggcctcccagaaggcagaggtgatcatgaactaccatgtcggggagacggtgctgtccttgcagaagaccacgctgatccctggaggctcagaatcacttgtctataccaccttgtctggaggaattggcatccttgtgccattcacgtcccatgaggaccatgacttcttccagcatgtggaaatgcacctgcggtctgaacatccccctctctgtgggcgggaccacctcagctttcgctcctactacttccctgtgaagaatgtgattgatggagacctctgtgagcagttcaattccatggaacccaacaaacaaaagaacgtctctgaagaactggaccgaaccccacccgaagtgtccaagaaactcgaggatatccggacccgctacgccttctgagccctcctttcccggtggggcttgccagagactgtgtgttttgtttcccccaccaccatcactgccacctggcttctgccatgtggcaggagggtgactggataattaagactgcattatgaaagtcaacagctctttcccctcagctcttctcctggaatgactggcttcccctcaaattggcactgagatttgctacacttctccccacctggtacatgatacatgaccccaggttccagtgtagaacctgagtcccccattccccaaagccatccctgcattgatatgtcttgactctcctgtctacttttgcacacacccttaatttttaattggttttcttgtaaatacagttttgtacaatgttatctctgtgggaggaaggaggcaggctgtggtgggactgggtagggtatagtatcactcctgagttccactgctctagaatctaaccagaaatagaaacctagtttttaaggtgactggcatccatgtgtcttgttctggagatgaggatgtaggtgggaggtttgaacccaagttagagcaggaagaactgagtagactccttccttccagataccgacttggacttgcggcactctgtggctccccacccccaggtctgtggtggtttctttgttttttcctggttctttttgctgtgctgatgaaacatgacctcaataaccatgtgtatacccacccctcttcccactgggtattgaggaagggtggctgattcttcctcctcttctactctgaggatgttagtatggggattttagcatgaattctagctggggagtcttaacagatgccccttttactgatacagcacctaaagcgatctttggctccataggaccataggaagggtcagtacagaagaacctagatactgccctgcccctgagaactgtgtatatgtggggcctgtctgcagcacccatctcaggtgggttccagagggcctttagggtataatgagagcctgttaggtggaagaggcccagttccagaaatgttccagcccacccctgagaattcctcctgtttagttgtgtgggaagccctcgtcttccaggctgtccttgcgccttgaacctggagaagtgagctcactgttctcaatacttcacaaatgtaaaactttctttcgtctgcatgtgctcagccatctaaattgagcaaatgatctggtgagcactgggttagaatcaggaatggtggaatacaatctgaacctctcagagcccagaacagagggttcctgacactgtgacactgtctcctggaactaagtatctcttgaatcatgacttggttttagatcagtcaagagagacccaggttttgccaggaatcgaatccctaaataacatgtttttttctcacttagctcatgaatttgcatagtagacagtagttctgaattagattttgaaaacctaatttcagggctcattttttcctgtggccctaaatccattctatcaaattgtgtgatactgacatgcagtcatctgaggaactcagcgtagatacttgagcagctcctcgcctcttttctaactcaagtttgactaaaatacatacactccgtacagaaggtagggggttatgtaagaaaggaaaacctaatctatggaatcaggagttgtcaccaccgagcttcctctggaagtctgcccatcagcttgcttgttctctgttaagaggaagggctaggacaaggatttgggcttgaatatgtggaaaggaattttcatagttgttgctgcaggacctacaaaagtttaaaattagattggatgtgactcaatgacaagtcccatctgtgtaattgttaaggggacctgattgactcctgtggtttgattgagcaaccaggtaaatagagacctctctccagctttggcaaaacccatcagaggctgctgcagaactcagacagagggatctgcccttgggtttgcttccatcctgttccattgctaagcccttgtgacttggatcctaggactgaaaagtttttagctgcctcagctttcccctgaccttactggcagaggttctgcagatgtttcctttggaagatctcttgccaagaatagcattcctttggaggaggggggttctagttggaatgttgcttttcttggttagtgtaaatgtattgctagtgagacagctgccggcgctggaaaaggctcgtctcacagggagagtgctggtccccagaatgtgtgctgttcccacgctgctgcctttcttgagcttgttagaggaaagccagaaaggcattcagatgggatcagtctggctttcaaattttttttaattcctaagttctgttttattttttaattttttaaaaaaaattttattagagacagtctctctctcttgcctagctgggagtgcagtggagtgatcatagctcactgaggcttgaactcctgggctcgagcaatccacctcagcctccagagtaggggagactacagatgtgtgccaccatactcagctaatttttaaacttttgtagagacagggtctccctgtgttgcccaggctggcctcgaactcctgacctcaaaaaatcttcctgccttggcctcccaaagcactgggattataggtgtgagccattgcgcctggtcataaattcttgtttttttgtttgtttgtttattagagatggaatctctctctcttgaccaggctagagggctgtggtgcgatctcagcccactgcaacctctatctcctgagctcaagcgatcctccttagcttcccaaatagctggaactacaggcatgtgccatcacgtccagctaatttttgtatttttagtagagaaggttttaccatgttggacagggtggtctcgaactcctggcctaaagtggtccacctagctcagcctaccaaagtgctgtgattacaggcgtgagccaccatgcccagcctctaaattctgttttctattcaaagtaaaaatgacatgtgtttgagtcatccacttgctcatttgcatatggaatattgtatgtgaatattttattacacccttaaaattaattttcaagggctatatgtagagctcagaagaaacatctctgctgctgaaatcaaacctggtccaaaaaacgtcacaacggaggaaaggaatagatggctctcgaggacaagatagggactcttaaaacacctgcttggccatggttgattgacatttgagtgatctggtagcccaacacaccctgtgaagttcaggtgaactgaaatgggcaggtgtaggctacacaccagtctgaaccagcacaaccaagagttgtttctcttttttttctttttctttttcttttttttcttttttttttttttttttttgagatgaagtcttactctgttgcccaggctagagtacagaggcacaatctcggctcaccacagcctccgcctcctgggttcaagcaattctcctgcctcagcctcccaagtagctgggactacaggcatgcaccaccatgcctggctaatttttgtatttttagtagagatggggtttcaccatgttggccaggctggtttcgaactcgtgacctcaggtgatccacccaccttggtctcccaaagcgctgggattacaggcgtgagccactgcacttggccaggagctgtttaagccatcaggagacatgctgacccactagaagaggctgctacgctcatttcttccacaaacgtttactgggcacctaccatgaaccaccacctcccagctctgttctgcacccagaggttggaggagagtttataaccaggcagtctctgtcgctgtgaggttggtggtgaggtgagtctgccagagggcctgccaccagtttcagaagagcctgcagcctgcatctgatttcctcagccacaaccttgggacttcaggaaaaatcagaaggtcccaagtctgaaaaatgaagaggtggggagtgggcagcaggggttttaggtcaggaaatggtaggaaacctgtagttgtggctcataatcctagtgggatattagaaccctcttcatttgtcagaacagattcctggggtctgctcccaattattcacacggtggttcatgcctggtaatcccagcactttgggcggccagaggcaggcagattgcttgagcccagaagtttaagaccagcctaggaaacagaccccatctctacaaaaaattcaaaaagccgggcgtgaagccctgtttttttttttttaaaaaaagagtctgctggtgatgtctgggcatgtgtctgcttcacagtccagtgttatgatcagtagctgtgatggacaatgaacattgctgcttgttcaaaatgaagaaaaaaaatatcaaagaaaaccaggtttggaagtttcagatttggaaaaggagctgggccagcccatctggaatagctgaggggccctgttagccccaccctaccccaccccacccccgtatgcagcatctctggcggtgcccagaggcaagcccccttcagtttcccacctctcactctgccttccagagcctagtcaagttttaaattcccaggtccactcagcagaacttgctcccttctctgactgcagtctcataatgaaaggagaggtgctttcagttgggtcatttggtagcgtttaggcttagaagttactaatttggagccgtgagtatatgtgtataagctagtaacacgtgatggtcaagggaagtactaccatttcctgtgggttattagggcctccagctgttatgaggacacactggggaatctcagctttagggagtcgatgatgtaactggagaaaggcaatgctgccctcataaagcaatcagaaacgagattccacctgccaaatgccaagaggcagcaaagtccatgaagagagcactgtatacagtcagatgacctgggctcactagcctctaagcatagtcttggtttcctgcctgtaaattggtagaataagactgatttactgggcctggcatggtggctcacacctgtaatcccagcactttgagaggctgaggcaggaggatcccttgagcccaggagtttgagaccagcctgggcaacatgacaaaaccccatctctccaaaaatacaaaaattagccaggcatggtggtgcacacttgtagtcccagtaattagggggctgagacaggaggatcacttcagcctatgagtttgaggctgcagtgagctgtgattgcgccactacactccagcctggatgacaggacgaaacctgtctcaaaaacaccaaaaaacaaaaaccggtctcctggggtcatggtagcacaaacgcacatgactgagtgctcaggggttctgaggcttgtccgctgacctggggctctggccctgggagatctgggggacctgctgtcctatatgtgatgctttgaaagaaaggggcatcattccaagccaagaggccccagagagggcaccgtgcggtgttcaggcttctgtgaggccccagtgagatcctgtggctgtgcccccatcacctccacccactctgccctcccactagctgcccaacggatgaatcaacgccttggcagagttttccagcagggccttgcagagagtgtgtgtgacctgtgtggccactgccttggggacgggtgaggagttagcctggaacattccagcgtgggcattattgtcctgttgcaagttcagggcaaaaccaggaatccagttttgtcgatccaattgagaaaacatttcatgaacaactacttgtggcatgcattggcactcggaataaagcgcactattgtcacta

SEQ ID NO: 186076 - DNA, 453 bp, Homo sapiens
  Payload ID: 16641
  Gene Symbol: SF3B3
  Gene Name: splicing factor 3b, subunit 3, 130kDa
  ENST ID: ENST00000566095
  CDS Start-End: 363-453
tttttccgccgcgcgccaccagaatgtccctgtcttgaggtctaatggcggacgccagtatgttggagttggtggtggcttaagttttgaagggaggtagcatccgttggatatccacaccatccttctcgctgcaggtagagacggggtttcactgtgttagccaggatggtctcgatctcctgaccttgatccacccgccttggcctcccaaagtgttgggattacaggtgtgagacaccgcgcccggcccagacgtgggggaagttttaaagcttaccaaatttatctgctttcttggactccgtactgttggtgtaaccaaggcctggaggtctgggtggctcaggtttcctgcagccatgtttctgtacaacttaaccttgcagagagccactggcatcagctttgccattcatggaaacttttctggaaccaaacaacaagaaattg

SEQ ID NO: 186077 - DNA, 529 bp, Homo sapiens
  Payload ID: 16641
  Gene Symbol: SF3B3
  Gene Name: splicing factor 3b, subunit 3, 130kDa
  ENST ID: ENST00000577085
  CDS Start-End: 314-529
aatgtccctgtcttgaggtctaatggcggacgccagtatgttggagttggtggtggcttaagttttgaagggaggtagcatccgttggatatccacaccatccttctcgctgcagggtaaaaaaacagcctggagacttccccgggcccggggaggcggagaccggccatatggaagggggacccgagactttggcgggggtcacgggcagtctaggcccgagaggctggggaccaggaggagctttcttggactccgtactgttggtgtaaccaaggcctggaggtctgggtggctcaggtttcctgcagccatgtttctgtacaacttaaccttgcagagagccactggcatcagctttgccattcatggaaacttttctggaaccaaacaacaagaaattgttgtttcccgtgggaagatcttggagctgcttcgcccagaccccaacactggcaaagtacataccctactcactgtggaagtattcggtgttatccggtcactcatggcctttaggctgacaggt

SEQ ID NO: 186078 - DNA, 551 bp, Homo sapiens
  Payload ID: 16641
  Gene Symbol: SF3B3
  Gene Name: splicing factor 3b, subunit 3, 130kDa
  ENST ID: ENST00000564899
  CDS Start-End: 539-551
gtcgcccagactggagagcagtggcgcgatctcggctcactgccatctctgcctcccgggttccagcgattctcttacctcagcctcccgagtagactagctgggattacgggcgcgtgccaccacgcccggctaatttttctttttttgagacggtgtctcgctttgtcgcccaggctggagtgcagtggcgcgatctctgctcactgcaagctccgctttccgggttcacgccattctcctgcctcagcctcacgagtagctggaactacaggcgcccgccaccgcgcccagctaattttttgtatttttagtagagacggggtttcactgtgttagccaggatggtctcgatctcctgaccttgatccacccgccttggcctcccaaagtgttgggattacaggtgtgagacaccgcgcccggcccagacgtgggggaagttttaaagcttaccaaatttatctgctttcttggactccgtactgttggtgtaaccaaggcctggaggtctgggtggctcaggtttcctgcagccatgtttctgtaca

SEQ ID NO: 186079 - DNA, 630 bp, Homo sapiens
  Payload ID: 16641
  Gene Symbol: SF3B3
  Gene Name: splicing factor 3b, subunit 3, 130kDa
  ENST ID: ENST00000567635
  CDS Start-End: 1-276
gaagaaggagacacattcttttttcagccaagaccacttaaaaaccttgtgctggttgatgagttggacagcctctctcccattctgttttgccagatagctgatctggccaatgaagatactccacagttgtatgtggcctgtggtaggggaccccgatcatctctgagagtcctaagacatggacttgaggtgtcagaaatggctgtttctgagctacctggtaaccccaacgctgtctggacagtgcgtcgacacattgaaggtggctggtgaaggtgctgatcaccacagatgagtttgatgcctacatcattgtgtctttcgtgaatgccaccctagtgttgtccattggagaaactgtagaagaagtgactgactctgggttcctggggaccaccccgaccttgtcctgctccttattaggagatgatgccttggtgcaggtctatccagatggcattcggcacatacgagcagacaagagagtcaatgagtggaagacccctggaaagaaaacaattgtgaagtgtgcagtgaaccagcgacaagtggtgattgccctgacaggaggagagctggtctatttcgagatggatccttcaggacagctgaatgagtacacagaac

SEQ ID NO: 186080 - DNA, 334 bp, Homo sapiens
  Payload ID: 16641
  Gene Symbol: SF3B3
  Gene Name: splicing factor 3b, subunit 3, 130kDa
  ENST ID: ENST00000567654
  CDS Start-End: 162-334
tccgttggatatccacaccatccttctcgctgcagggaaccaaacaacaagaaattgttgtttcccgtgggaagatcttggagctgcttcgcccagaccccaacactggcaaagtacataccctactcactgtggaagtattcggtgttatccggtcactcatggcctttaggctgacaggtggcaccaaagactacattgtagttggcagtgactctggtcgaattgttattttggaataccagccatctaagaatatgtttgagaagattcaccaagaaacctttggcaagagtggatgccgtcgcatcgttcctggccagttcttagctgt

SEQ ID NO: 186081 - DNA, 333 bp, Homo sapiens
  Payload ID: 16641
  Gene Symbol: SF3B3
  Gene Name: splicing factor 3b, subunit 3, 130kDa
  ENST ID: ENST00000569687
  CDS Start-End: 240-333
agatgcatttcctagttcacaaattgtgtaatgattcttgtcagggcacacttttcttggctgcttacctagtgccaagtcgtgtgcctattgctgtaagacatactgagatgtgaaccaaacaacaagaaattgttgtttcccgtgggaagatcttggagctgcttcgcccagaccccaacactggcaaagtacataccctactcactgtggaagtattcggtgttatccggtcactcatggcctttaggctgacaggtggcaccaaagactacattgtagttggcagtgactctggtcgaattgttattttggaataccagccatctaaga

SEQ ID NO: 186082 - DNA, 2085 bp, Homo sapiens
  Payload ID: 16642
  Gene Symbol: SF3B4
  Gene Name: splicing factor 3b, subunit 4, 49kDa
  Uniprot ID: Q15427
  ENST ID: ENST00000271628
  CDS Start-End: 586-1860
atgcaattaggacgaggtgagcgcagacgtcactctaagctcagacatttcgcagtctcctcccctgagggaaaaccaaatacctccagcccaaatcagggttgtgaggccaaatctgcaagaaggctgcaggcgagagggaaggctccctctgcgcctgaaagcccccaagtcctcgggttggggggaactcttcagcacatccttctctggacaacagaagaagaatcactgtccacaaaatatattaaaactgaaatttttgttcttttagctttcgaatttacacttttgagagcagtgtgattctttcaagtctagcagtgcattaagagggcctgagcgtttccgttccgccctcctcgctaagacaactagcagcggcacctcaggacgcgagccgaggactctaccgcccgacccaggttaagtttcggaggctcctaagatggctgcagccgcttccaggcacctcctcttccgcggccccgcccaccgctacgtccgtcttcgccccggaagtggaagtcgtgctgaggtcagaaggcggaaccgctgctgggagacggcgggatctctttcgccatggctgccgggccgatctccgagcggaatcaggatgccactgtgtacgtggggggcctggatgagaaggttagtgaaccgctgctgtgggaactgtttctccaggctggaccagtagtcaacacccacatgccaaaggatagagtcactggccagcaccaaggctatggctttgtggaattcttgagtgaggaagatgctgactatgccattaagatcatgaacatgatcaaactctatgggaagccaatacgggtgaacaaagcatcagctcacaacaaaaacctggatgtaggggccaacattttcattgggaacctggaccctgagattgatgagaagttgctttatgatactttcagcgcctttggggtcatcttacaaacccccaaaattatgcgggaccctgacacaggcaactccaaaggttatgcctttattaattttgcttcatttgatgcttcggatgcagcaattgaagccatgaatgggcagtacctctgtaaccgtcctatcaccgtatcttatgccttcaagaaggactccaagggtgagcgccatggctcagcagccgaacgacttctggcagctcagaacccgctctcccaggctgatcgccctcatcagctgtttgcagatgcacctcctccaccctctgctcccaatcctgtggtatcatcattggggtctgggcttcctccaccaggcatgcctcctcctggctccttcccacccccagtgccacctcctggagccctcccacctgggatacccccagccatgcccccaccacctatgcctcctggggctgcaggacatggccccccatcggcaggaaccccaggggcaggacatcctggtcatggacactcacatcctcacccattcccaccgggtgggatgccccatccagggatgtctcagatgcagcttgcacaccatggccctcatggcttaggacatccccacgctggacccccaggctctgggggccagccaccgccccgaccaccacctggaatgcctcatcctggacctcctccaatgggcatgcccccccgagggcctccattcggatctcccatgggtcacccaggtcctatgcctccgcatggtatgcgtggacctcctccactgatgcccccccatggatacactggccctccacgacccccaccctatggctaccagcgggggcctctccctccacccagacccactccccggccaccagttccccctcgaggcccacttcgaggccctctccctcagtaaattcacattttccttcctcctgttacattttcccaatatcttttctattccttggaccaatcagagatgctgtagctccttggggcaaaggtactaatccctttcagcacccccactccattcccctttttaatgtaactttttccacaggaggtatttcttttttatgttggtcctgagtattttgcaaatgcacagagaaaataaaactaaactccttgttta

SEQ ID NO: 186083 - DNA, 826 bp, Homo sapiens
  Payload ID: 16642
  Gene Symbol: SF3B4
  Gene Name: splicing factor 3b, subunit 4, 49kDa
  ENST ID: ENST00000457312
  CDS Start-End: 256-826
ttgggggcggggtggccgggtgctggctgaggcctctgggtgtgatacttaagtccggtcccctgctgacttctcactcaaaaaatcaaaaaaacccactcacaatactaaattagacttcagaggattcccgaagtcctgggaagagagaagtttaaggatgccactgtgtacgtggggggcctggatgagaaggttagtgaaccgctgctgtgggaactgtttctccaggctggaccagtagtcaacacccacatgccaaaggatagagtcactggccagcaccaaggctatggctttgtggaattcttgagtgaggaagatgctgactatgccattaagatcatgaacatgatcaaactctatgggaagccaatacgggtgaacaaagcatcagctcacaacaaaaacctggatgtaggggccaacattttcattgggaacctggaccctgagattgatgagaagttgctttatgatactttcagcgcctttggggtcatcttacaaacccccaaaattatgcgggaccctgacacaggcaactccaaaggttatgcctttattaattttgcttcatttgatgcttcggatgcagcaattgaagccatgaatgggcagtacctctgtaaccgtcctatcaccgtatcttatgccttcaagaaggactccaagggtgagcgccatggctcagcagccgaacgacttctggcagctcagaacccgctctcccaggctgatcgccctcatcagctgtttgcagatgcacctcctccaccctctgctcccaatcctgtggtatcatcattggggtctgggcttcctc

SEQ ID NO: 186084 - DNA, 693 bp, Homo sapiens
  Payload ID: 16643
  Gene Symbol: SF3B5
  Gene Name: splicing factor 3b, subunit 5, 10kDa
  Uniprot ID: Q9BWJ5
  ENST ID: ENST00000367569
  CDS Start-End: 77-337
actctcctgtaaaacgctagagcggcgagttgttacctgcgtcctctgacctgagagcgaaggggaaagcggcgagatgactgaccgctacaccatccatagccagctggagcacctgcagtccaagtacatcggcacgggccacgccgacaccaccaagtgggagtggctggtgaaccaacaccgcgactcgtactgctcctacatgggccacttcgaccttctcaactacttcgccattgcggagaatgagagcaaagcgcgagtccgcttcaacttgatggaaaagatgcttcagccttgtggaccgccagccgacaagcccgaggagaactgagactctgccttaccaccgcagtgcggggcacctctcccagcgtttctccggtttgccaatcctcttaagtattcctgtctccaaaggaccggctctccatggctcctgcgcctcgtgctttccgcgtacagaagtgcttgcccggggagtcccgcctgacctgccttcatgtggacccttagaacagcactgggagaccagcaggactcctgagaactgtgctggtggagaggtcctagagccggcgagcgtttgagaagagggcatggcgctggagtgagatgggatttggcgtctcgtttttggctaattgattgtcattggctttttccataaagtttagaaatcgttcagtc

SEQ ID NO: 186085 - DNA, 770 bp, Homo sapiens
  Payload ID: 16644
  Gene Symbol: SF3B6
  Gene Name: splicing factor 3b, subunit 6, 14kDa
  Uniprot ID: Q9Y3B4
  ENST ID: ENST00000233468
  CDS Start-End: 215-592
gagtctcgctcaggctcggttttaccccggagtctattcgaagggggctgctacgtcagcgcgtctcagcgtaagacggcgctattccgctgtaacagcttccggcgggtcctggatgttgatgtcctgcatctaacgcggtgtaacccccgaagccgagcgagctccggaggaatttcagtatctgctacggtaacttcatcagcccgccaagatggcgatgcaagcggccaagagggcgaacattcgacttccacctgaagtaaatcggatattgtatataagaaatttgccatacaaaatcacagctgaagaaatgtatgatatatttgggaaatatggacctattcgtcaaatcagagtggggaacacacctgaaactagaggaacagcttatgtggtctatgaggacatctttgatgccaagaatgcatgtgatcacctatcgggattcaatgtttgtaacagataccttgtggttttgtactataatgccaacagggcatttcagaagatggacacaaagaagaaggaggaacagttgaagcttctcaaggagaaatatggcatcaacacagatccaccaaaataaatgttttctacattttcatttggactaaatcccacgaatgacaactaccacctttttttcctttttaattaatactaaatattgtgatttcttatttgaggttcaaaatgacctgcttgaaactttgatacatattggaatacattatgttaataaacttgtagctttttgtgaaaca

SEQ ID NO: 186086 - DNA, 3747 bp, Homo sapiens
  Payload ID: 16645
  Gene Symbol: SFPQ
  Gene Name: splicing factor proline/glutamine-rich
  Uniprot ID: P23246
  ENST ID: ENST00000357214
  CDS Start-End: 100-2223
gccgcctgtgtcatccgccattttgtgagaagcaaggtggcctccacgtttcctgagcgtcttcttcgcttttgcctcgaccgccccttgaccacagacatgtctcgggatcggttccggagtcgtggcggtggcggtggtggcttccacaggcgtggaggaggcggcggccgcggcggcctccacgacttccgttctccgccgcccggcatgggcctcaatcagaatcgcggccccatgggtcctggcccgggccagagcggccctaagcctccgatcccgccaccgcctccacaccaacagcagcaacagccaccaccgcagcagccaccgccgcagcagccgccaccgcatcagccgccgccgcatccacagccgcatcagcagcagcagccgccgccaccgccgcaggactcttccaagcccgtcgttgctcagggacccggccccgctcccggagtaggcagcgcaccaccagcctccagctcggccccgcccgccactccaccaacctcgggggccccgccagggtccgggccaggcccgactccgaccccgccgcctgcagtcacctcggcccctcccggggcgccgccacccaccccgccaagcagcggggtccctaccacacctcctcaggccggaggcccgccgcctccgcccgcggcagtcccgggcccgggtccagggcctaagcagggcccaggtccgggtggtcccaaaggcggcaaaatgcctggcgggccgaagccaggtggcggcccgggcctaagtacgcctggcggccaccccaagccgccgcatcgaggcggcggggagccccgcgggggccgccagcaccacccgccctaccaccagcagcatcaccaggggcccccgcccggcgggcccggcggccgcagcgaggagaagatctcggactcggaggggtttaaagccaatttgtctctcttgaggaggcctggagagaaaacttacacacagcgatgtcggttgtttgttgggaatctacctgctgatatcacggaggatgaattcaaaagactatttgctaaatatggagaaccaggagaagtttttatcaacaaaggcaaaggattcggatttattaagcttgaatctagagctttggctgaaattgccaaagccgaactggatgatacacccatgagaggtagacagcttcgagttcgctttgccacacatgctgctgccctttctgttcgtaatctttcaccttatgtttccaatgaactgttggaagaagcctttagccaatttggtcctattgaaagggctgttgtaatagtggatgatcgtggaagatctacagggaaaggcattgttgaatttgcttctaagccagcagcaagaaaggcatttgaacgatgcagtgaaggtgttttcttactgacgacaactcctcgtccagtcattgtggaaccacttgaacaactagatgatgaagatggtcttcctgaaaaacttgcccagaagaatccaatgtatcaaaaggagagagaaacccctcctcgttttgcccagcatggcacgtttgagtacgaatattctcagcgatggaagtctttggatgaaatggaaaaacagcaaagggaacaagttgaaaaaaacatgaaagatgcaaaagacaaattggaaagtgaaatggaagatgcctatcatgaacatcaggcaaatcttttgcgccaagatctgatgagacgacaggaagaattaagacgcatggaagaacttcacaatcaagaaatgcagaaacgtaaagaaatgcaattgaggcaagaggaggaacgacgtagaagagaggaagagatgatgattcgtcaacgtgagatggaagaacaaatgaggcgccaaagagaggaaagttacagccgaatgggctacatggatccacgggaaagagacatgcgaatgggtggcggaggagcaatgaacatgggagatccctatggttcaggaggccagaaatttccacctctaggaggtggtggtggcataggttatgaagctaatcctggcgttccaccagcaaccatgagtggttccatgatgggaagtgacatgcgtactgagcgctttgggcagggaggtgcggggcctgtgggtggacagggtcctagaggaatggggcctggaactccagcaggatatggtagagggagagaagagtacgaaggcccaaacaaaaaaccccgattttagatgtgatatttaggctttcattccagtttgttttgtttttttgtttagataccaatcttttaaattcttgcattttagtaagaaagctatctttttatggatgttagcagtttattgacctaatatttgtaaatggtctgtttgggcaggtaaaattatgtaatgcagtgtttggaacaggagaatttttttttcctttttatttctttattttttcttttttactgtataatgtccctcaagtttatggcagtgtaccttgtgccactgaatttccaaagtgtaccaatttttttttttttactgtgcttcaaataaatagaaaaatagttataatattgatcttcaactttgccattcatgcttctatgcatattaggctacgtattccacattgaaagcatgagagtgtctaggcctttgaatggcatatgccatttctgggaaatgcatctggaggctaagtattgctttctacaaataattgccccctttgttttaaaaagaagaaatgcatattgaagtagtttgatgatttgtttggcatataggaagcacgctggtgctaagtattttttaaatggttatgtaagcaaagctgaactgtaaatcttcaggaatatgtattaagattgtggaatgggtgtaagacaattggtagggggtgaaagtgggtttgattaaatggatcttttatggccctatgatctatcctttacttgaaagcttttgaaaagtggaaaggtcattttgttgcatttccccatttcttgtttttaaaagaccaacaaatctcaagccctataaatggcttgtattgaacttttacatttgaattaaagatgttaaacatgaagtcttttcatgtattcaagtgatttataaagatggggtgtagtctaaaaaacaaaacttgaaagtaagaaggtttagtaactgggccgggcgcggtggctcacgcctgtaatcccagcactttgggaggctgaggtgggcaaatcatgagatcaggagttcaagaccagcctggccaacatggtgaaaccccgtctctactaaaaatacaaaaaattagctgggcgtggtggcaggcgcctgtaatcccagctactcgggaggctgagccaggagaattgcttgaacctggagatggaggttgcagtgagctgagactgccactgcactccagcctggacaacagagcgagactctgtctcaaaaaaaaaaaaaggtttagtactgaagtaggtttagttatatatacatttgtactctgtaacttttacatctccttgtgctacttctgttgggcaaaatctataggactataaaaatctattggttctcttctaagagctagtggtgattgttaacaaatagggttgcagataatcattcttattgtaaatttaacttgttttcacatagtttcgttttcatgtagcactaaatctggagaaagttgctcatgctacacagtacaaatatcccttcctcccaccataaaggcttggaatgtttcca

SEQ ID NO: 186087 - DNA, 874 bp, Homo sapiens
  Payload ID: 16645
  Gene Symbol: SFPQ
  Gene Name: splicing factor proline/glutamine-rich
  ENST ID: ENST00000470472
  CDS Start-End: 1-672
gtggaaccacttgaacaactagatgatgaagatggtcttcctgaaaaacttgcccagaagaatccaatgtatcaaaaggagagagaaacccctcctcgttttgcccagcatggcacgtttgagtacgaatattctcagcgatggaagtctttggatgaaatggaaaaacagcaaagggaacaagttgaaaaaaacatgaaagatgcaaaagacaaattggaaagtgaaatggaagatgcctatcatgaacatcaggcaaatcttttgcgccaagatctgatgagacgacaggaagaattaagacgcatggaagaacttcacaatcaagaaatgcagaaacgtaaagaaatgcaattgaggcaagaggaggaacgacgtagaagagaggaagagatgatgattcgtcaacgtgagatggaagaacaaatgaggcgccaaagagaggaaagttacagccgaatgggctacatggatccacgggaaagagacatgcgaatgggtggcggaggagcaatgaacatgggagatccctatggttcaggaggccagaaatttccacctctaggaggtggtggtggcataggttatgaagctaatcctggcgttccaccagcaaccatgagtggttccatgatgggaagtgacatggtaagaatgattgatgttggctgatattggagtgctcattcacatgaagtggatagatacttctcaagacatcacacagcgtgagtcaatcaaggagggaagccacaagcagactgacaacgtttctagcaggatcaggtgagctgtgtccagaaaaccaacgagaaggagtggaaggaggaatgaacgtttcattctcgttaataaaggcattatcctaattatc

SEQ ID NO: 186088 - DNA, 464 bp, Homo sapiens
  Payload ID: 16645
  Gene Symbol: SFPQ
  Gene Name: splicing factor proline/glutamine-rich
  ENST ID: ENST00000460428
  CDS Start-End: 1-265
acgtgagatggaagaacaaatgaggcgccaaagagaggaaagttacagccgaatgggctacatggatccacgggaaagagacatgcgaatgggtggcggaggagcaatgaacatgggagatccctatggttcaggaggccagaaatttccacctctaggaggtggtggtggcataggttatgaagctaatcctggcgttccaccagcaaccatgagtggttccatgatgggaagtgacatggtaagaatgattgatgttggctgatattggagtgctcattcacatgaagtggatagatacttctcaagacatcacacagcgtgagtcaatcaaggagggaagccacaagcagactgacaacgtttctaggatcaggtgagctgtgtccagaaaaccaacgagaaggagtggaaggaggaatgaacgtttcattctcgttaataaaggcattatcctaattatc

SEQ ID NO: 186089 - DNA, 3246 bp, Homo sapiens
  Payload ID: 16646
  Gene Symbol: SFSWAP
  Gene Name: splicing factor, suppressor of white-apricot family
  Uniprot ID: Q12872
  ENST ID: ENST00000261674
  CDS Start-End: 142-2997
cattttgtggcccgctatggcggcggtgttgaggttgggtacgggatgcggggtctttgactgaaggggtaggccaagtggaggtatcagggacgtcgcgcggcacagaagaggaccagcctggacgccggggacgctgtcatgtacggcgcgagcgggggccgcgccaaacccgagaggaaaagcggcgcgaaggaggaggccgggccaggcggtgccggcggtgggggcagccgagtggagctcttggttttcggctatgcctgcaagctgttccgggacgacgagcgggccctggctcaggaacagggacagcacctcatcccctggatgggggaccacaagatcctcatcgacagatatgatggacgtggtcacctgcatgacctttctgagtacgatgctgagtattccacgtggaacagagattatcagctgtctgaagaggaggcgcgaatagaggccctgtgtgatgaagagaggtatttagccttgcatacggacttgcttgaggaggaggcaaggcaagaggaagaatacaagcgattgagtgaagcactagcagaggatgggagctacaatgccgtggggttcacttacggtagcgactattacgacccgtcagagccgacggaggaggaggagccttccaaacagagagaaaaaaatgaggccgaaaatttagaggaaaatgaagagcccttcgttgcccccttaggattgagcgtcccgtctgacgtggagttgccaccaaccgctaaaatgcacgccatcatcgagcgcacggccagcttcgtgtgcaggcagggagcacagtttgagatcatgctgaaggccaagcaggcccggaactcccagtttgactttctgcgcttcgaccactacctcaacccctactataagttcatccagaaagccatgaaagagggacgctacactgtcctggcagaaaacaaaagtgacgagaaaaaaaaatcaggagtcagctctgacaatgaagatgatgatgatgaagaagatgggaattaccttcatccctctctctttgcctccaagaagtgtaaccgccttgaagagctgatgaagcccttgaaggtagtggacccagatcatcccctcgcagcacttgttcgtaaggcacaggctgacagttccactcccaccccacacaacgcagacggtgcgcctgtgcagccctcccaggtggagtacacggcagactcgaccgtggcagccatgtattacagctactacatgctaccggacggcacttactgcctggcgccgccccctcccggaatcgacgtgactacttactacagcacccttcctgctggcgtgaccgtgtctaactcccctggagtgacgaccaccgccccaccacctcctgggaccacaccactaccgcccccaaccacagcagagactagcagcggggccacctccacaaccaccaccacaagtgcacttgcccccgtggccgccatcatccccccgccccccgacgtccagcccgtgattgacaagctggccgagtatgtcgccaggaacggcctgaagttcgagaccagtgttcgtgccaagaatgatcaaagatttgagttcctgcagccgtggcaccagtataatgcttattatgagtttaagaagcagttcttcctccagaaagaagggggcgatagcatgcaggctgtgtctgcaccagaagaggctcccacagactctgctcccgagaagccaagtgatgctggggaggatggcgcgcctgaagacgcagccgaggtgggagcacgggcaggctcaggcgggaagaaggaggcatcgtccagtaagaccgtcccggacgggaagctggtgaaagcttcctttgctccaataagctttgcaatcaaggccaaagaaaatgatctgcttcccctggaaaaaaatcgtgttaagctagatgatgacagtgatgatgatgaagaaagcaaagaaggccaagaaagttctagtagtgctgcaaacactaacccagcagttgccccaccctgtgtagttgttgaggagaagaagcctcaacttacccaggaggagctagaagcaaagcaagcaaagcaaaagctggaagatcgcctcgcagctgctgcccgggaaaagctggcccaggcgtctaaggagtcaaaagagaaacagcttcaagcagaacgtaaaaggaaagcggcgttatttttacagaccctcaaaaatcctctgccggaagcagaagctgggaaaattgaggagagtcctttcagtgtcgaggaatccagcactacgccctgccctctactgactggaggcaggcctctgcctactttagaagttaaaccacccgataggccttcgagcaaaagcaaagatccaccgagagaagaagagaaagaaaagaaaaagaaaaagcacaaaaaaagatctcgaacaagatcacgttctcccaagtaccattcgtcatccaagtccaggtctagatcacactcaaaagcaaagcattctcttcccagtgcctatcggacagtgcggcggtcgaggtcccgctcccggtcccctcggaggagagcccactcccctgagagacggagggaagagaggagtgtgcccactgcctaccgcgtgagccgcagccctggggccagtaggaagcggacccgctccagaagtccccacgagaagaagaagaagaggcggtcccggtcgcggaccaagtccaaggccaggtctcagtcggtgtcacccagcaagcaggcagcgccccggcccgcggcccccgcggcccactcggcgcactcagccagcgtctcccctgtggagagtcggggctccagccaggagcgctccaggggagtctctcaggaaaaagaagcccagatctcttcagcaatcgtttcttccgtgcagagcaaaatcactcaggatctcatggccaaagtcagagcgatgcttgcagcttccaaaaacctgcaaaccagcgcttcctgagacggggccagcggaggcagagccgggaggctgcgtgggcttctgggcaggctcacgcagacgccggccacaccatccacctggccgcctccatggacccttggtggcttttgtaaattaatttttgatgacattttgagttttaagatttctgaccagcagtctcttacctgtatatttgtaaatatatcatgtttctgtgaaaatgtattatgaaataaaatgggaggaaacaccttttctagctag

SEQ ID NO: 186090 - DNA, 3219 bp, Homo sapiens
  Payload ID: 16646
  Gene Symbol: SFSWAP
  Gene Name: splicing factor, suppressor of white-apricot family
  Uniprot ID: Q12872
  ENST ID: ENST00000541286
  CDS Start-End: 94-3105
cggggtctttgactgaaggggtaggccaagtggaggtatcagggacgtcgcgcggcacagaagaggaccagcctggacgccggggacgctgtcatgtacggcgcgagcgggggccgcgccaaacccgagaggaaaagcggcgcgaaggaggaggccgggccaggcggtgccggcggtgggggcagccgagtggagctcttggttttcggctatgcctgcaagctgttccgggacgacgagcgggccctggctcaggaacagggacagcacctcatcccctggatgggggaccacaagatcctcatcgacagatatgatggacgtggtcacctgcatgacctttctgagtacgatgctgagtattccacgtggaacagagattatcagctgtctgaagaggaggcgcgaatagaggccctgtgtgatgaagagaggtatttagccttgcatacggacttgcttgaggaggaggcaaggcaagaggaagaatacaagcgattgagtgaagcactagcagaggatgggagctacaatgccgtggggttcacttacggtagcgactattacgacccgtcagagccgacggaggaggaggagccttccaaacagagagaaaaaaatgaggccgaaaatttagaggaaaatgaagagcccttcgttgcccccttaggattgagcgtcccgtctgacgtggagttgccaccaaccgctaaaatgcacgccatcatcgagcgcacggccagcttcgtgtgcaggcagggagcacagtttgagatcatgctgaaggccaagcaggcccggaactcccagtttgactttctgcgcttcgaccactacctcaacccctactataagttcatccagaaagccatgaaagagggacgctacactgtcctggcagaaaacaaaagtgacgagaaaaaaaaatcaggagtcagctctgacaatgaagatgatgatgatgaagaagatgggaattaccttcatccctctctctttgcctccaagaagtgtaaccgccttgaagagctgatgaagcccttgaaggtagtggacccagatcatcccctcgcagcacttgttcgtaaggcacaggctgacagttccactcccaccccacacaacgcagacggtgcgcctgtgcagccctcccaggtggagtacacggcagactcgaccgtggcagccatgtattacagctactacatgctaccggacggcacttactgcctggcgccgccccctcccggaatcgacgtgactacttactacagcacccttcctgctggcgtgaccgtgtctaactcccctggagtgacgaccaccgccccaccacctcctgggaccacaccactaccgcccccaaccacagcagagactagcagcggggccacctccacaaccaccaccacaagtgcacttgcccccgtggccgccatcatccccccgccccccgacgtccagcccgtgattgacaagctggccgagtatgtcgccaggaacggcctgaagttcgagaccagtgttcgtgccaagaatgatcaaagatttgagttcctgcagccgtggcaccagtataatgcttattatgagtttaagaagcagttcttcctccagaaagaagggggcgatagcatgcaggctgtgtctgcaccagaagaggctcccacagactctgctcccgagaagccaagtgatgctggggaggatggcgcgcctgaagacgcagccgaggtgggagcacgggcaggctcaggcgggaagaaggaggcatcgtccagtaagaccgtcccggacgggaagctggtgaaagcttcctttgctccaataagctttgcaatcaaggccaaagaaaatgatctgcttcccctggaaaaaaatcgtgttaagctagatgatgacagtgatgatgatgaagaaagcaaagaaggccaagaaagttctagtagtgctgcaaacactaacccagcagttgccccaccctgtgtagttgttgaggagaagaagcctcaacttacccaggaggagctagaagcaaagcaagcaaagcaaaagctggaagatcgcctcgcagctgctgcccgggaaaagctggcccaggcgtctaaggagtcaaaagagaaacagcttcaagcagaacgtaaaaggaaagcggcgttatttttacagaccctcaaaaatcctctgccggaagcagaagctgggaaaattgaggagagtcctttcagtgtcgaggaatccagcactacgccctgccctctactgactggaggcaggcctctgcctactttagaagttaaaccacccgataggccttcgagcaaaagcaaagatccaccgagagaagaagagaaagaaaagaaaaagaaaaagcacaaaaaaagatctcgaacaagatcacgttctcccaagtaccattcgtcatccaagtccaggtctagatcacactcaaaagcaaagcattctcttcccagtgcctatcggacagtgcggcggtcgagagtcacagcctccccagggacgctgcgcgcggagccctgtcagagcagcgcgtcagtgacagcggcagccgagccaggaagttatcaggcagcctcgaccaccaccagatttgactccgcgagctcttttgagggaaaacctggtaaaacgtcaaggtcccgctcccggtcccctcggaggagagcccactcccctgagagacggagggaagagaggagtgtgcccactgcctaccgcgtgagccgcagccctggggccagtaggaagcggacccgctccagaagtccccacgagaagaagaagaagaggcggtcccggtcgcggaccaagtccaaggccaggtctcagtcggtgtcacccagcaagcaggcagcgccccggcccgcggcccccgcggcccactcggcgcactcagccagcgtctcccctgtggagagtcggggctccagccaggagcgctccaggggagtctctcaggaaaaagaagcccagatctcttcagcaatcgtttcttccgtgcagagcaaaatcactcaggatctcatggccaaagtcagagcgatgcttgcagcttccaaaaacctgcaaaccagcgcttcctgagacggggccagcggaggcagagccgggaggctgcgtgggcttctgggcaggctcacgcagacgccggccacaccatccacctggccgcctccatggacccttggtggcttttgt

SEQ ID NO: 186091 - DNA, 961 bp, Homo sapiens
  Payload ID: 16646
  Gene Symbol: SFSWAP
  Gene Name: splicing factor, suppressor of white-apricot family
  ENST ID: ENST00000537164
  CDS Start-End: 1-961
cgaccgtggcagccatgtattacagctactacatgctaccggacggcacttactgcctggcgccgccccctcccggaatcgacgtgactacttactacagcacccttcctgctggcgtgaccgtgtctaactcccctggagtgacgaccaccgccccaccacctcctgggaccacaccactaccgcccccaaccacagcagagactagcagcggggccacctccacaaccaccaccacaagtgcacttgcccccgtggccgccatcatccccccgccccccgacgtccagcccgtgattgacaagctggccgagtatgtcgccaggaacggcctgaagttcgagaccagtgttcgtgccaagaatgatcaaagatttgagttcctgcagccgtggcaccagtataatgcttattatgagtttaagaagcagttcttcctccagaaagaagggggcgatagcatgcaggctgtgtctgcaccagaagaggctcccacagactctgctcccgagaagccaagtgatgctggggaggatggcgcgcctgaagacgcagccgaggtgggagcacgggcaggctcaggcgggaagaaggaggcatcgtccagtaagaccgtcccggacgggaagctggtgaaagcaaagcaaaagctggaagatcgcctcgcagctgctgcccgggaaaagctggcccaggcgtctaaggagtcaaaagagaaacagcttcaagcagaacgtaaaaggaaagcggcgttatttttacagaccctcaaaaatcctctgccggaagcagaagctgggaaaattgaggagagtcctttcagtgtcgaggaatccagcactacgccctgccctctactgactggaggcaggcctctgcctactttagaagttaaaccacccgataggccttcgagcaaaagcaaagatccaccgagagaagaagagaaagaaaagaaaaa

SEQ ID NO: 186092 - DNA, 2636 bp, Homo sapiens
  Payload ID: 16646
  Gene Symbol: SFSWAP
  Gene Name: splicing factor, suppressor of white-apricot family
  ENST ID: ENST00000538548
  CDS Start-End: 141-506
attttgtggcccgctatggcggcggtgttgaggttgggtacgggatgcggggtctttgactgaaggggtaggccaagtggaggtatcagggacgtcgcgcggcacagaagaggaccagcctggacgccggggacgctgtcatgtacggcgcgagcgggggccgcgccaaacccgagaggaaaagcggcgcgaaggaggaggccgggccaggcggtgccggcggtgggggcagccgagtggagctcttggttttcggctatgcctgcaagctgttccgggacgacgagcgggccctggctcaggaacagggacagcacctcatcccctggatgggggaccacaagatcctcatcgacagatatgatggacgtggtcacctgcatgacctttctgagtacgatgctgagtattccacgtggaacagagattatcagctgtctgaagaggaggcgcgaatagaggccctgtgtgatgaagagagaggaagaatacaagcgattgagtgaagcactagcagaggatgggagctacaatgccgtggggttcacttacggtagcgactattacgacccgtcagagccgacggaggaggaggagccttccaaacagagagaaaaaaatgaggccgaaaatttagaggaaaatgaagagcccttcgttgcccccttaggattgagcgtcccgtctgacgtggagttgccaccaaccgctaaaatgcacgccatcatcgagcgcacggccagcttcgtgtgcaggcagggagcacagtttgagatcatgctgaaggccaagcaggcccggaactcccagtttgactttctgcgcttcgaccactacctcaacccctactataagttcatccagaaagccatgaaagagggacgctacactgtcctggcagaaaacaaaagtgacgagaaaaaaaaatcaggagtcagctctgacaatgaagatgatgatgatgaagaagatgggaattaccttcatccctctctctttgcctccaagaagtgtaaccgccttgaagagctgatgaagcccttgaaggtagtggacccagatcatcccctcgcagcacttgttcgtaaggcacaggctgacagttccactcccaccccacacaacgcagacggtgcgcctgtgcagccctcccaggtggagtacacggcagactcgaccgtggcagccatgtattacagctactacatgctaccggacggcacttactgcctggcgccgccccctcccggaatcgacgtgactacttactacagcacccttcctgctggcgtgaccgtgtctaactcccctggagtgacgaccaccgccccaccacctcctgggaccacaccactaccgcccccaaccacagcagagactagcagcggggccacctccacaaccaccaccacaagtgcacttgcccccgtggccgccatcatccccccgccccccgacgtccagcccgtgattgacaagctggccgagtatgtcgccaggaacggcctgaagttcgagaccagtgttcgtgccaagaatgatcaaagatttgagttcctgcagccgtggcaccagtataatgcttattatgagtttaagaagcagttcttcctccagaaagaagggggcgatagcatgcaggctgtgtctgcaccagaagaggctcccacagactctgctcccgagaagccaagtgatgctggggaggatggcgcgcctgaagacgcagccgaggtgggagcacgggcaggctcaggcgggaagaaggaggcatcgtccagtaagaccgtcccggacgggaagctggtgaaagcttcctttgctccaataagctttgcaatcaaggccaaagaaaatgatctgcttcccctggaaaaaaatcgtgttaagctagatgatgacagtgatgatgatgaagaaagcaaagaaggccaagaaagttctagtagtgctgcaaacactaacccagcagttgccccaccctgtgtagttgttgaggagaagaagcctcaacttacccaggaggagctagaagcaaagcaagcaaagcaaaagctggaagatcgcctcgcagctgctgcccgggaaaagctggcccaggcgtctaaggagtcaaaagagaaacagcttcaagcagaacgtaaaaggaaagcggcgttatttttacagaccctcaaaaatcctctgccggaagcagaagctgggaaaattgaggagagtcctttcagtgtcgaggaatccagcactacgccctgccctctactgactggaggcaggcctctgcctactttagaagttaaaccacccgataggccttcgagcaaaagcaaagatccaccgagagaagaagagaaagaaaagaaaaagaaaaagcacaaaaaaagatctcgaacaagatcacgttctcccaagtaccattcgtcatccaagtccaggtctagatcacactcaaaagcaaagcattctcttcccagtgcctatcggacagtgcggcggtcgaggtcccgctcccggtcccctcggaggagagcccactcccctgagagacggagggaagagaggagtgtgcccactgcctaccgcgtgagccgcagccctggggccagtaggaagcggacccgctccaggtaggccac

SEQ ID NO: 186093 - DNA, 6781 bp, Homo sapiens
  Payload ID: 16647
  Gene Symbol: SREK1
  Gene Name: splicing regulatory glutamine/lysine-rich protein 1
  Uniprot ID: Q8WXA9
  ENST ID: ENST00000334121
  CDS Start-End: 160-2034
gggagcaggggagttgtgaaatgggcggctagatctgcccggcgctgtgaattcgccagcgggagcgcgctcgcggccgcgcgttctccgctttcccggctccgtcgctgacgcgtcgtagacgttggggagcgggaaggcaacggcagcgggatcgggatgaacagcggcggcggcttcggtttgggcttaggcttcggcctcacccccacgtcggtgattcaggtgacgaatctgtcgtcggcggtgaccagcgagcagatgcggacgcttttttccttcctaggagaaatcgaggagctgcggctctaccccccggacaacgcacctcttgctttttcctccaaagtatgttatgttaagtttcgtgatccatcaagtgttggcgtggcccagcatctaactaacacggtttttattgacagagctctgatagttgttccttgtgcagaaggtaaaatcccagaggaatccaaagccctctctttattggctcctgctccaaccatgacaagtctgatgcctggtgcaggattgcttccaataccgaccccaaatcctttgactactcttggtgtttcacttagcagtttgggagctataccagcagcagcactagaccccaacattgcaacacttggagagataccacagccaccacttatgggaaacgtggatccttccaaaatagatgaaattaggagaacggtttatgttggaaatctgaattcccagacaacgacagctgatcaactacttgaattttttaaacaagttggagaagtgaagtttgtgcggatggcaggtgatgagactcagccaactcggtttgcttttgtggaatttgcagaccaaaattctgtaccaagggcccttgcttttaatggagttatgtttggagacaggccactgaaaataaatcactccaacaatgcaatagtaaaaccccctgagatgacacctcaggctgcagctaaggagttagaagaagtaatgaagcgagtacgagaagctcagtcatttatctcagcagctattgaaccagagtctggaaagagcaatgaaagaaaaggcggtcgatctcgttcccatactcgctcaaaatccaggtctagctcaaaatcccattctagaaggaaaagatcacaatcaaaacacaggagtagatcccataatagatcacgttcaagacagaaagacagacgtagatctaagagcccacataaaaaacgctctaaatcaagggagagacggaagtcaaggagtcgttcgcattcacgggacaagagaaaagacactcgagaaaagatcaaggaaaaggaaagagtgaaagagaaagacagggaaaaggagagagagagggaaaaggaacgtgaaaaagaaaaggaacggggtaaaaacaaagaccgggacaaggaacgggaaaaggaccgggaaaaagacaaggaaaaggacagagagagagaacgggaaaaagagcatgagaaggatcgagacaaagagaaggaaaaggaacaggacaaagaaaaggaacgagaaaaagacagatccaaagagatagatgaaaaaagaaagaaggataaaaaatccagaacaccacccaggagttacaatgcatcgcgaagatctcgtagttccagcagggaaaggcgtaggaggaggagcaggagttcttccagatcgccaagaacatcaaaaaccataaaaaggaaatcttctagatctccgtcccccaggagcagaaataagaaggataaaaagagagaaaaagaaagggaccacatcagtgaaagaagagagagagaacgttcaacgtctatgagaaagagttctaatgatagagatgggaaggagaagttggagaagaacagtacttcacttaaagagaaagagcacaataaagaaccagattcaagtgtgagcaaagaagtagatgacaaggatgcaccaaggactgaggaaaacaaaatacagcacaatgggaattgtcagctgaatgaagaaaacctctctaccaaaacagaagcagtataggaccgacaagtgtacctctgcactcaatgctggaatcaaatccaaagcttttaattctctcaacaagatgtaaacaggaaagaaatctagttgagcatgaagataggatctaacagcttttccagttgttagatgactttgtggccatcttgttattgagtaagaaaataaagcatggacatcatgaaaataacagatgttacccaaactcatcttctaaaatctgtgcatttccatggtggctgacacacttgtcatgtggtctgttagtgtttgccaagaaccattgcaaataaattgaacatcaaagatccaagtttgtactatccctaaagactggagataagcattggaggctcttttaaaaaatgctagttactgaattttgtattgttttacttttttttttatttcaatatatacagtttgatgatgtgcttgaaattggtgcaaatatatacacacccttgtaagtgcaaagtatgtaagaagttttaacatttacttcacaggacttgtgattgtgttaaattctcactattgtgttttcttttgctcactgtttaggacaatttttctttaaaatagttttgcagattaaaattgcttaaataagtggattaaaaaactgacaatgcatgctactgttctctttcaaaaggaagagcaaccgtgttgaatactaataatgatgaattagtattcagtgtttagaatcattgggactacccacaaagtgagcatttctttttaaattttcttgacatttccaagcttattatgaataatattgcagtgtgtcttgtcagctgtaggtggcaaaggtgcccttataaaaaaggaaactggcttttcaaaatgggctatgggagcacaagctgaagctttagtgccttctacaatgtggtatactgttttctagaattttatatgtgctagtcattctcaattcatatggaatctagatggatatttcatgcatacccatagagaagtgtgtaagtgatatgtcagaagagcttcttactgatttcacctaaaatgagaaggaagtcctgttttcaagaatgacattagagtcatgcagctttgggaccatcagttttatactgtgataattgaaaatgaaacatgttcttattttccttaaattgaagaaaaccctttagttgtctacattggatggccttattacctctcaatcatcttttcataaatgatgtgcagaaattgtacttaaggacttaggagtatatgggaggttattggttttatgtttaaggatacgtttacttgagtttaagatacaggtcatccatcattcttaggctcactttttacagaaagtatgcaaatagtaaagtgacagcactgctaatgtttttccccagtactataacttgtggtttctgaactcattattgttgtatttccaaaaaagtaataccttttaattagtgtattaaaagttaagtataattattttaatgcaatctaatacaatcagattactcagttgccttacctcatgggaagagttacttttttagatctaaaaagctgaatagcatgttagttacttggtttcaacttgagttttcttttaatgttaataagattgaaactttagtatttagtggggaatggaaagagttgcccttgttgcaagtaatgaagcctgatttgattatgaagctgcttaatcactcttcatgtgttcagaattactgttttttttgtttgtttttcctttttgtcactgtgtacattaaaattttggaagatgctttactatgtaaagtatagatggtcattttaatcattcagccacatacggttggctggtaaacagcttattctgatacaagaatgcttgggtgcatatggaaagattgtgaaagagtgtgtcttgcatcaacagctgtcttatttatgatatataagtagaaatagagcaaatgttggaatctgttatttttagtaccatgtctttaataaagctaagtattttagaggaaaatgtttgtttatgcatttcaaaaaagcattttagttttatcctgctcattttagttgtcatagagattgttgtgacgtggagagtgcatgtttgtgtggtgtctataaaacaagtcatttaaagtatgagtgttttcttgtactctggacctattacatgtttctttatgttggtaattaacatttaatttggttcttgctgctaattattttctctgctgatatttattaagctttaaaataatcgtactataatcttgaaacactgatttgtaaaaactaagaatgagtaggaatacaagagatctggaggaacaaatcagattgttattagggtttgactttttttttacatgggcttatggaagcaaggcattctagggtctagagggatgtgtgtgtgtgcttgtgtgtccatgtgtgcgcatgcgcacgtgtgtatctgtttgagacatactttctctgttcacttaaaagagctcatgttttcatttgtttattcttttctttcagggtattttgtttttttctttaagacttctttttttaaatcccaggtagatgttgtcagataaacttgaggtaaggccaagaagacagacattttatgcttcatactttctgtaattatcttttgtagcttgattacatagagtaccctctcttccttaagttgtagttgctatttatcattgtagacaaattctgttgcctttcagcaacgtatgctgaactagtatcataagatggtgcatcagttcataagctagtgcataagttttgtgtcaaaacttttaaatcctgaagttctgcagttatcatcttagttattttctatctaattagcttataattgcaaacactagtcagcttgtgatctctgtgtttcaagttcttttcttcacgaggttcagtacctgctatgttgatctttggcagtgccagaggcttaaattttgacctgctcaattaaaaataaacactggcgtttataatgaaaaggtttttttgtcgggggggggggggtcaagagaatttattttgtgatagtaataattttcaagaccttcagtcattcctatgtctatgttgctatctttattttaaaacttagaaccctgatctaactcccttctcaagtgaagatactgtgtagattcaagaattataatgtagagtaataggcctttaagtttttttttaatctgttagaaataaagagcatgatttaattattgttgaattaacaattaaaatgaatccctttggagggatggcattgaataacttataatttcagtgaatcatttacgttttcattggaagacagtatctgatttcaactggtgcgttacgaagtagagccattcccacaaagtaaatgtgcagtgcccatgtttcttgtgtttaaatattttttattttcactacatatatattattttctcatgtttatttactaatgtaattttcacttaaaattagatgtttattttcaaattttaaaagctagtgctcttaaaagagctaaattatatttctggaagcaggagtttagtataaatgtaataaaattttaaaataaaattgacttccctacttaatcttgggtttgtgggtgagtttgtttttagtacactcttattggtggttttgcctgaagagtaatacattattattattacttttctttttgagacagggtctcactctgtcactcaggctggagtgcagtgacacgatcatggctcactgcaatcttgacctttctcggcatggatgatcctctcacctcagcctcttgaatagctgggaccacagacatgtgccaccaagcccagttaattttagaattttttttgtagagacaggatcttgccatgttgcctagactggtctcaaactcctgggctcaaacaatctgtctgcctcagccttctaaagtgctgagattacaggtgtgaggtactgcacctggcaatacgttattttaaaagtaaacgctaagccatttatgactttggttatattcagtcagttggatttagtaactaataactagctttcttccattctaaggtacttttatagtttctagcaattagtttgttacaattagcttatatcagatataacagttcttaatataatgtttataaaaggttttaagtctgttgcctgatttttaaatttatatctagttaacattttaattttaaaattgccaacttttgggagatttcacatattttacctctatattttatttttccaggattggtatggaggagtagtaccttctattcttggtttatttttatttgctagacataatttcttaactacatatgtaagtataaattcataaaaatcacactgaaagaataggttgatttcaaccattttgagggtactggtaggtaacacactgttggggaataaactaaagaatttctgatttctacaatagatttaagtatgaaatttgagtatactgtgtagctgtgtagatcaacttaatgcttaaaaaattacctccttaatgattagattaatagaacagtgttagattatcaagggaagagtttggaatgtaaacataaacatgctgcataggtggtggttatttgtgagtaggactacttttaaatggtactagtaaagatttatcaaacaatgctgctattatgttgctatatttttaataaaatgaaaatcttaaaatctt

SEQ ID NO: 186094 - DNA, 2433 bp, Homo sapiens
  Payload ID: 16647
  Gene Symbol: SREK1
  Gene Name: splicing regulatory glutamine/lysine-rich protein 1
  Uniprot ID: Q8WXA9
  ENST ID: ENST00000380918
  CDS Start-End: 661-2187
ttatttccccccgaacttaagatggccgcaggtgggcccggaacagccctcatggcaaacgtctcagagcgtttttccactctgaaaatcgcggagaccgcgcctgagccacagtccagtttttaaggccttggtgtcaggccgttttgctgacgagaaagcctgctgctggtgacaagatggaactggggctgtgtttgtttcccaggacggtcgcacaaacttagcattttggtttatctaaccgagcgcatccatgttcccaaagatcatgtctgttagcccttttgacagcagattaaattttcctcctgaaaggtcacactgtcccaaagctttcagaaaaagtcaacgcacctcttgctttttcctccaaagtatgttatgttaagtttcgtgatccatcaagtgttggcgtggcccagcatctaactaacacggtttttattgacagagctctgatagttgttccttgtgcagaagtgatgcagccaacacgaacggttgtcatgtgtaacacaactttcgatcaccgcgaaaacaccgtcctgggaaagcgtccatgcttgatatcgtttggttcatgaacattaagtttccagtacaggtaaaatcccagaggaatccaaagccctctctttattggctcctgctccaaccatgacaagtctgatgcctggtgcaggattgcttccaataccgaccccaaatcctttgactactcttggtgtttcacttagcagtttgggagctataccagcagcagcactagaccccaacattgcaacacttggagagataccacagccaccacttatgggaaacgtggatccttccaaaatagatgaaattaggagaacggtttatgttggaaatctgaattcccagacaacgacagctgatcaactacttgaattttttaaacaagttggagaagtgaagtttgtgcggatggcaggtgatgagactcagccaactcggtttgcttttgtggaatttgcagaccaaaattctgtaccaagggcccttgcttttaatggagttatgtttggagacaggccactgaaaataaatcactccaacaatgcaatagtaaaaccccctgagatgacacctcaggctgcagctaaggagttagaagaagtaatgaagcgagtacgagaagctcagtcatttatctcagcagctattgaaccagagtctggaaagagcaatgaaagaaaaggcggtcgatctcgttcccatactcgctcaaaatccaggtctagctcaaaatcccattctagaaggaaaagatcacaatcaaaacacaggagtagatcccataatagatcacgttcaagacagaaagacagacgtagatctaagagcccacataaaaaacgctctaaatcaagggagagacggaagtcaaggagtcgttcgcattcacgggacaagagaaaagacactcgagaaaagatcaaggaaaaggaaagagtgaaagagaaagacagggaaaaggagagagagagggaaaaggaacgtgaaaaagaaaaggaacggggtaaaaacaaagaccgggacaaggaacgggaaaaggaccgggaaaaagacaaggaaaaggacagagagagagaacgggaaaaagagcatgagaaggatcgagacaaagagaaggaaaaggaacaggacaaagaaaaggaacgagaaaaagacagatccaaagagatagatgaaaaaagaaagaaggataaaaaatccagaacaccacccaggagttacaatgcatcgcgaagatctcgtagttccagcagggaaaggcgtaggaggaggagcaggagttcttccagatcgccaagaacatcaaaaaccataaaaaggaaatcttctagatctccgtcccccaggagcagaaataagaaggataaaaagagagaaaaagaaagggaccacatcagtgaaagaagagagagagaacgttcaacgtctatgagaaagagttctaatgatagagatgggaaggagaagttggagaagaacagtacttcacttaaagagaaagagcacaataaagaaccagattcaagtgtgagcaaagaagtagatgacaaggatgcaccaaggactgaggaaaacaaaatacagcacaatgggaattgtcagctgaatgaagaaaacctctctaccaaaacagaagcagtataggaccgacaagtgtacctctgcactcaatgctggaatcaaatccaaagcttttaattctctcaacaagatgtaaacaggaaagaaatctagttgagcatgaagataggatctaacagcttttccagttgttagatgactttgtggccatcttgttattgagtaagaaaataaagcatggacatcatgaaaataacagatgttacccaaactcatcttctaaaatctgtgcatttccatggtggctga

SEQ ID NO: 186095 - DNA, 2047 bp, Homo sapiens
  Payload ID: 16647
  Gene Symbol: SREK1
  Gene Name: splicing regulatory glutamine/lysine-rich protein 1
  ENST ID: ENST00000522912
  CDS Start-End: 63-461
ggctccgtcgctgacgcgtcgtagacgttggggagcgggaaggcaacggcagcgggatcgggatgaacagcggcggcggcttcggtttgggcttaggcttcggcctcacccccacgtcggtgattcaggtgacgaatctgtcgtcggcggtgaccagcgagcagatgcggacgcttttttccttcctaggagaaatcgaggagctgcggctctaccccccggacaacgcacctcttgctttttcctccaaagtatgttatgttaagtttcgtgatccatcaagtgttggcgtggcccagcatctaactaacacggtttttattgacagagctctgatagttgttccttgtgcagaagtgatgcagccaacacgaacggttgtcatgtgtaacacaactttcgatcaccgcgaaaacaccgtcctgggaaagcgtccatgcttgatatcgtttggttcatgaacattaagtttccagtacaggtaaaatcccagaggaatccaaagccctctctttattggctcctgctccaaccatgacaagtctgatgcctggtgcaggattgcttccaataccgaccccaaatcctttgactactcttggtgtttcacttagcagtttgggagctataccagcagcagcactagaccccaacattgcaacacttggagagataccacagccaccacttatgggaaacgtggatccttccaaaatagatgaaattaggagaacggtttatgttggaaatctgaattcccagacaacgacagctgatcaactacttgaattttttaaacaagttggagaagtgaagtttgtgcggatggcaggtgatgagactcagccaactcggtttgcttttgtggaatttgcagaccaaaattctgtaccaagggcccttgcttttaatggagttatgtttggagacaggccactgaaaataaatcactccaacaatgcaatagtaaaaccccctgagatgacacctcaggctgcagctaaggagttagaagaagtaatgaagcgagtacgagaagctcagtcatttatctcagcagctattgaaccagagtctggaaagagcaatgaaagaaaaggcggtcgatctcgttcccatactcgctcaaaatccaggtctagctcaaaatcccattctagaaggaaaagatcacaatcaaaacacaggagtagatcccataatagatcacgttcaagacagaaagacagacgtagatctaagagcccacataaaaaacgctctaaatcaagggagagacggaagtcaaggagtcgttcgcattcacgggacaagagaaaagacactcgagaaaagatcaaggaaaaggaaagagtgaaagagaaagacagggaaaaggagagagagagggaaaaggaacgtgaaaaagaaaaggaacggggtaaaaacaaagaccgggacaaggaacgggaaaaggaccgggaaaaagacaaggaaaaggacagagagagagaacgggaaaaagagcatgagaaggatcgagacaaagagaaggaaaaggaacaggacaaagaaaaggaacgagaaaaagacagatccaaagagatagatgaaaaaagaaagaaggataaaaaatccagaacaccacccaggagttacaatgcatcgcgaagatctcgtagttccagcagggaaaggcgtaggaggaggagcaggagttcttccagatcgccaagaacatcaaaaaccataaaaaggaaatcttctagatctccgtcccccaggagaaataagaaggataaaaagagagaaaaagaaagggaccacatcagtgaaagaagagagagagaacgttcaacgtctatgagaaagagttctaatgatagagatgggaaggagaagttggagaagaacagtacttcacttaaagagaaagagcacaataaagaaccagattcaagtgtgagcaaagaagtagatgacaaggatgcaccaaggactgaggaaaacaaaatacagcacaatgggaattgtcagctgaatgaagaaaacctctctaccaaaacag

SEQ ID NO: 186096 - DNA, 580 bp, Homo sapiens
  Payload ID: 16647
  Gene Symbol: SREK1
  Gene Name: splicing regulatory glutamine/lysine-rich protein 1
  ENST ID: ENST00000521691
  CDS Start-End: 353-580
agaactgctctctccaaagtcacctcctggttctcagtctacaacgcacctcttgctttttcctccaaagtatgttatgttaagtttcgtgatccatcaagtgttggcgtggcccagcatctaactaacacggtttttattgacagagctctgatagttgttccttgtgcagaagtgatgcagccaacacgaacggttgtcatgtgtaacacaactttcgatcaccgcgaaaacaccgtcctgggaaagcgtccatgcttgatatcgtttggttcatgaacattaagtttccagtacaggtaaaatcccagaggaatccaaagccctctctttattggctcctgctccaaccatgacaagtctgatgcctggtgcaggattgcttccaataccgaccccaaatcctttgactactcttggtgtttcacttagcagtttgggagctataccagcagcagcactagaccccaacattgcaacacttggagagataccacagccaccacttatgggaaacgtggatccttccaaaatagatgaaattaggagaacggtttatgttggaaatctgaattcccag

SEQ ID NO: 186097 - DNA, 2172 bp, Homo sapiens
  Payload ID: 16647
  Gene Symbol: SREK1
  Gene Name: splicing regulatory glutamine/lysine-rich protein 1
  ENST ID: ENST00000520953
  CDS Start-End: 63-191
ggctccgtcgctgacgcgtcgtagacgttggggagcgggaaggcaacggcagcgggatcgggatgaacagcggcggcggcttcggtttgggcttaggcttcggcctcacccccacgtcggtgattcagagctctgatagttgttccttgtgcagaagtgatgcagccaacacgaacggttgtcatgtgtaacacaactttcgatcaccgcgaaaacaccgtcctgggaaagcgtccatgcttgatatcgtttggttcatgaacattaagtttccagtacaggtaaaatcccagaggaatccaaagccctctctttattggctcctgctccaaccatgacaagtctgatgcctggtgcaggattgcttccaataccgaccccaaatcctttgactactcttggtgtttcacttagcagtttgggagctataccagcagcagcactagaccccaacattgcaacacttggagagataccacagccaccacttatgggaaacgtggatccttccaaaatagatgaaattaggagaacggtttatgttggaaatctgaattcccagacaacgacagctgatcaactacttgaattttttaaacaagttggagaagtgaagtttgtgcggatggcaggtgatgagactcagccaactcggtttgcttttgtggaatttgcagaccaaaattctgtaccaagggcccttgcttttaatggagttatgtttggagacaggccactgaaaataaatcactccaacaatgcaatagtaaaaccccctgagatgacacctcaggctgcagctaaggagttagaagaagtaatgaagcgagtacgagaagctcagtcatttatctcagcagctattgaaccagagtctggaaagagcaatgaaagaaaaggcggtcgatctcgttcccatactcgctcaaaatccaggtctagctcaaaatcccattctagaaggaaaagatcacaatcaaaacacaggagtagatcccataatagatcacgttcaagacagaaagacagacgtagatctaagagcccacataaaaaacgctctaaatcaagggagagacggaagtcaaggagtcgttcgcattcacgggacaagagaaaagacactcgagaaaagatcaaggaaaaggaaagagtgaaagagaaagacagggaaaaggagagagagagggaaaaggaacgtgaaaaagaaaaggaacggggtaaaaacaaagaccgggacaaggaacgggaaaaggaccgggaaaaagacaaggaaaaggacagagagagagaacgggaaaaagagcatgagaaggatcgagacaaagagaaggaaaaggaacaggacaaagaaaaggaacgagaaaaagacagatccaaagagatagatgaaaaaagaaagaaggataaaaaatccagaacaccacccaggagttacaatgcatcgcgaagatctcgtagttccagcagggaaaggcgtaggaggaggagcaggagttcttccagatcgccaagaacatcaaaaaccataaaaaggaaatcttctagatctccgtcccccaggagcagaaataagaaggataaaaagagagaaaaagaaagggaccacatcagtgaaagaagagagagagaacgttcaacgtctatgagaaagagttctaatgatagagatgggaaggagaagttggagaagaacagtacttcacttaaagagaaagagcacaataaagaaccagattcaagtgtgagcaaagaagtagatgacaaggatgcaccaaggactgaggaaaacaaaatacagcacaatgggaattgtcagctgaatgaagaaaacctctctaccaaaacagaagcagtataggaccgacaagtgtacctctgcactcaatgctggaatcaaatccaaagcttttaattctctcaacaagatgtaaacaggaaagaaatctagttgagcatgaagataggatctaacagcttttccagttgttagatgactttgtggccatcttgttattgagtaagaaaataaagcatggacatcatgaaaataacagatgttacccaaactcatcttctaaaatctgtgcatttccatggtggctgacacacttgtcatgtggtctgttagtgtttgccaagaaccattgcaaataaattgaacatcaaaga

SEQ ID NO: 186098 - DNA, 606 bp, Homo sapiens
  Payload ID: 16647
  Gene Symbol: SREK1
  Gene Name: splicing regulatory glutamine/lysine-rich protein 1
  ENST ID: ENST00000523655
  CDS Start-End: 1-181
aataaatcactccaacaatgcaatagtaaaaccccctgagatgacacctcaggctgcagctaaggagttagaagaagtaatgaagcgagtacgagaagctcagtcatttatctcagcagctattgaaccagggtggctgcactcaacgagtttatgcaatgactttcttggatgtttctgaaggaggaggatgtacagagagtaggccccttgcactatatgtggtacattccacttgtgcctgattattaactgggatctttaattgttctgagcttacactgcaaagtgattttttcctcccagagtctggaaagagcaatgaaagaaaaggcggtcgatctcgttcccatactcgctcaaaatccaggtctagctcaaaatcccattctagaaggaaaagatcacaatcaaaacacaggagtagatcccataatagatcacgttcaagacagaaagacagacgtagatctaagagcccacataaaaaacgctctaaatcaagggagagacggaagtcaaggagtcgttcgcattcacgggacaagagaaaagacactcgagaaaagatcaaggaaaaggaaagagtgaaagagaaagacaggg

SEQ ID NO: 186099 - DNA, 2128 bp, Homo sapiens
  Payload ID: 16647
  Gene Symbol: SREK1
  Gene Name: splicing regulatory glutamine/lysine-rich protein 1
  ENST ID: ENST00000612404
  CDS Start-End: 160-462
gggagcaggggagttgtgaaatgggcggctagatctgcccggcgctgtgaattcgccagcgggagcgcgctcgcggccgcgcgttctccgctttcccggctccgtcgctgacgcgtcgtagacgttggggagcgggaaggcaacggcagcgggatcgggatgaacagcggcggcggcttcggtttgggcttaggcttcggcctcacccccacgtcggtgattcaggtgacgaatctgtcgtcggcggtgaccagcgagcagatgcggacgcttttttccttcctaggagaaatcgaggagctgcggctctaccccccggacaacgcacctcttgctttttcctccaaagtatgttatgttaagtttcgtgatccatcaagtgttggcgtggcccagcatctaactaacacggtttttattgacagagctctgatagttgttccttgtgcagaagatgactagactggccaaggcagacctgttacacttgcctgagttaggcattgtttgccatgccactaaacctgccgtcaagtgaaaccttcattggggaaatgagatcggagtctgaaccgcagaagatggacgccctgtctctgttttttattgttttactttaatttcatttctttttctttattttgtccctttttttgtttttgtttttgtttttgttttgttaaatctctttcactttaacttgtgagctggttttcccagttctttgtaaatggtatttcattaagggttcataacgtgttgcaaattatattgggagatgattagtagagctcaaccttaagataaagcaaattttcatgtggtaaattaggatacagtgttgtgaagctcattgtgagtcttaatttgtgtgtatggactcataaggtacattttattcttgaaacattaaaacactgataagtatctcaggaacactttctgatctcagcgcaacatttttctagtttttttcccccctagtctacatctctcataaaaactgatagcttctaatttttgtccttccccctggaattttaggcatacaaaatcatcaaggaaaataagtaaatataacaatctgggagtaaagaagagcctttcatttttatgatggttatttatcatataacttatttccttgacttatgaagactttttgttgcctatgtggggaatggatatttgagaaacttaagtatttgcatgtaggtttttgttagcttgaattttttgttgaatatttttcagaggttactagcttctaaatggattctgagattaggactataatactgtgagagatgttttcctcagttgactttgaggagtatagtttgggaaaaatgctaaatgcttatttgttttatacttttataagctctgttatttggagggtaaatttggtagaattctatcttggaaattaagcaatggagctttttcttaaagtacttttgccattacctttaggtaattagaataagtatatagagtaattagaatggtaattgaaagttaatttattaaaaaatgtgcttatagtggatttatacatttatagtagtatactatatttatagtagtatactcttttgaaaggcagtgggagagtttgacaacctactgatacttaagctgaaagtgaaagacttcataatactaagtagtcaacttttggccagtgttgaataccctttttgtttgtatagtctttctacaatgtcttcaataggtagttttacttattaaaggacaagtaatattaaatttgggacattactagattagaactctgagtttccttaggtgcatacattaaggtagtgacgatggagtttctgcctcaaaacctcaatttatcaagaatgttcaggttttacaaaccttttgagataataccaatttataacagataaaacaggtgaaatcaatataaatagtatagtgtatatgtgggtatatataaatacatgtgttaataccaataactaatacatataaagcagattattgttatttgatgttttcagtaaggcctacctgccttttgttgatgcatgttaagaaatctgttctccagaattttcactgaaataataaagataactttgtttttgaaagt

SEQ ID NO: 186100 - DNA, 1314 bp, Homo sapiens
  Payload ID: 16648
  Gene Symbol: SHFM1
  Gene Name: split hand/foot malformation (ectrodactyly) type 1
  Uniprot ID: P60896
  ENST ID: ENST00000248566
  CDS Start-End: 129-341
attctttccccaagtctctatggtagcgtcagcgtcggaggcggtagtgacggtggcgtttccttgaggaagagtgagggttccaacttttctgcttatctgggaggtgttgggcgcggacagtcgagatgtcagagaaaaagcagccggtagacttaggtctgttagaggaagacgacgagtttgaagagttccctgccgaagactgggctggcttagatgaagatgaagatgcacatgtctgggaggataattgggatgatgacaatgtagaggatgacttctctaatcagttacgagctgaactagagaaacatggttataagatggagacttcatagcatccagaagaagtgttgaagtaacctaaacttgacctgcttaatacattctagggcagagaacccaggatgggacactaaaaaaatgtgtttatttcattatctgcttggatttatttgtgtttttgtaacacaaaaaataaatgttttgatataatcttggtttggttcagaagtcttaatcttttgcttctaatcaattttcttgtcatgattttccaaaaccttattatatatagatagtaaaatttcatattatgaaattttcttttttttttttaatgttaactgagtgaggctcaggttaaatgatctggagtagatttcacctgattcccaattcagtacttttcttaaaccacatcaattaattgttacttctattttataaggaatttcttttacatcacattgaaccttaatctcttctgtattttgatagcttaggcaacatttgctgacatttataaggtgacctttcaaaacctgtgttttaaaaatattaatcattttaaattgctgtaatttacttagttcctgagccattaataatattattaatggttgttagcgtattattggtacttaaagtccaaagtagtttaatcacagtaagaatggtgtcttctattaaaattgaggaagtgggctcaagatactttatcaacaagtgcatattttcaggtactacatagcaggctcatttagtacaactgagttttcacagagtgatagctgttgccacatcacttttgtgaatgggagatttaatttggtttgtaaaggattctttgtgatgacttaaatgtacggggtattttttaggaatattttcaaatgtaaatgttgttactaagaactacaatcaatctgtagtgttgagtaatttcaaatgtaaaatttatgtaacaatgcagtgcagataccaaaataggggttggtggcctgaaatacaagttatacttcaaaatga

SEQ ID NO: 186101 - DNA, 2667 bp, Homo sapiens
  Payload ID: 16648
  Gene Symbol: SHFM1
  Gene Name: split hand/foot malformation (ectrodactyly) type 1
  Uniprot ID: Q6ZVN7
  ENST ID: ENST00000356686
  CDS Start-End: 48-434
gagaaacaaatacatcagatgatgctatgcagctctgaaggaagaacatgtattgccaggactccaacatttgtgctgtgtttgctgtacaaggaggaaaagtgggaagaaagcatggcataaaaagggggaggagacccagcataagaagcccagctcagcgggccagaggaccctggatccatgagagtaagcatccggcctttgcaaagcaacagataaacttggagatgcccaactccagagcgacaacagagttagcctgggtctgcagctccacctcaagaaaaaagaagtgggcaaggtccctgactctttccactgctccactgagccccccaccatccttggtgcactgtgaagattgttcttgcctgcctggctgccattcgggtgacctctacaatctggccccagcagaaagaacttgctagcagcatatcaatagcagagatggaagtctggtcatatggtgcccacatctattgaagtaaacatgctgataccagatatccctggctctctgtcttcaaggcacatggtagaactatacttcctagctttctgtgtggctgggtgggtcacatgacaagttcagacagatgaattatgattagaagcatttaattgttaatacatattctagtgctctttccctctgtcatcacaactgacaatgtttcagacagtgacttctccaacaggctggttccagagtgaaaatagagcccagtagagtctgtagctgatgcaatatggacatgtagggtgagtgagaaaatgcttttgttgggttaagcatctgaggtttgatggtttgttgctactgcagcacaaccttacccatcctaacaaatatgactattattgactaacctgacaacagaagagtctttccacttctgctgtgatgaggaacagagttttttccctgttatatcttaatattagatagcagcagcctctggaaatagttctttctctaccacttcttacccatgtggcataaagccagctactaaacctcttcacttttcagctttcccttttaaaagtgggagtaaataagacctttctcatggagttattgatcaaatgaaataattaaataacgagtatttaaattttaaatttaaatgaaaattcaaatgacataatgcctatgaagtacttatttagtccataatatcctcagtaaatggtagttagccttactaacacaaaggaaatggacaaagccatgccattttccaaagtagtttctaggaccatattatctctaaaaatcccaactttctgctgtaaatttgaactaatccagaacaggctaatccattgcaatggcctattcatccttcttcttagagtttagctatcagtcatcttgttgctgagaacaaagccagcctagttgtttgtaagcaagcctctagagagacagaaactgtcttgtatttctttgaatatcctctactgcctctaacactgtgcctcggctatatttctggatctttatttaattgttttgaatgcttcttatgtttaatttctgccatatccattaggaaaacaacgtaatccttcctccaacaccgatggtataagcctccatgaccgggaaacatttgcccccaagtttaaagaatttagttctgtaaggcttgttgacccatctgacaggaattcctgtaccaagtggtcagtcagtgaagatctctttccactggtaactttatcaagaaagtaagatacaagactgtatgtaaagtatattatcctatgtgaaatcaagggacagaaaataactggaaggaaatattccaaaatgttagcagtagtttctcccggagaatgtgatgtatacatttggatgggtgatatataaagtacttttcatagatctgggcaagagatattttagagggctccacataccacaatcacccacaaataaatgtattaaagagcacacagatgcctttatcactcaggatgtggcactcagagctggcccagcatagtctataacacttaacatcactctcatgaccacactgctcaggtcctagggaagtgtgcctctgtatctcttccctgtatccttaaaagaaaagatgacctaatttgaaagttgataaaaatcagggattatgatgatgttgcttcagaattcttggaggacgtaagagaaaaatagtgctgggttatgagaagaacaaaacttaccaaattcctccctgaagataacataaatgcaatagattcttttacaacaaagtgtcatttctcaataatgccaagaatcctttttcatgcttctcttcttgttcacattcctggttcccatgctactcaattaacataatattcagaaaagttgcagatggtgatttaggaacatgttgtaatattaacatttcatattacccttaaatttgcatgcatgcatcatatgtgtatcatggtaccaattctttatattggtaactaggtggatatagaacatttacaatgtgaatagtgttatctctataaaaacaagatttaattaaaatgttcatatatgaaatgaaattttggcatatattaattataacttggattttaccttttaaagttaatagatcattttgaatattttaaaagactttaataaacatataaaat

SEQ ID NO: 186102 - DNA, 1590 bp, Homo sapiens
  Payload ID: 16648
  Gene Symbol: SHFM1
  Gene Name: split hand/foot malformation (ectrodactyly) type 1
  ENST ID: ENST00000444799
  CDS Start-End: 96-284
gtcggaggcggtagtgacggtggcgtttccttgaggaagagtgagggttccaacttttctgcttatctgggaggtgttgggcgcggacagtcgagatgtcagagaaaaagcagccggtagacttaggtctgttagaggaagacgacgagtttgaagagttccctgccgaagactgggctggcttagatgaagatgaagatgcacatgtctgggaggataattgggatgatgacaatgtagaggatgacttctctaatcagttacgctgtgagaaaaagccctgagctgtctccctaaatggctgtgtctcctgcagtggcttggtaccatcaagtcagatgaaggacacattgggcgaggtgcccatctactgcctggagaacatgcccaggaggctggaacctgttccctttcagagatgaaatcctgtcttctcatcaactcacaagacaaagaggacttttctgacatctagctgaaggagagggattgtttcaagtcttgtgcagcggaatttcccatagtttgttctgttgatccttagtttttcaagatgcccataggaaaaaatatttttgtggtcaagtcagttatggaaacctctgcctttgagctatttatagcttcttaaggcatattagcatgaacatgttctgagacttcctgtgttgaaaagaaactctgtttaactttgtttagcttagtgatttccaaatttgtttgaccacagaacccttttttgggaaacattactaatatttcatggaactagtgggctacagaaaacacatgggatatactgatggacggtgttaggatgatggatcagatggagagtgggaagaacaatggatttaaagtcacagacctatgttcaagtctaatcggctgtttaccaaaaatgcaacattttttagggagatctctaaacctctctcactcttggtttcctcatctaaaaatgggaaataataatatttattacacagggtgtttgtggggatgaaaggacacaatgtggaagaacatgggagcagggcttggttcaacttcaattaaatcagactcttcttgacaagtaaacactgggaccagatgacaatgggatactggcacagaagtgatctgcagaagtcttgttgctgtctacatacacatatgtgttccatgacttcatatattgttggaagtagcagcttattgatggcttggggtatagttgaaaaggataggggcccttctatagcaccaagttggctgtcttcagtgttggtcaagattagctgtcttaaagtccaaaggattggaccggctagatattttgttgtacctcagaaaaattatcttaatttcctagatattttgttgtacctcagaaaaattaccttaattttctaccctctccaaattttttcaccacagaatatttttttggagaaaaattatcaatattttatggaactagtgggctatagaaaacacacaggatgtactgataaaacacagtagtaaaacacattggtttatgaatgatctctgtattaaaccatctgtacatattggtttaataaaagttcattgctagatcta

SEQ ID NO: 186103 - DNA, 699 bp, Homo sapiens
  Payload ID: 16648
  Gene Symbol: SHFM1
  Gene Name: split hand/foot malformation (ectrodactyly) type 1
  ENST ID: ENST00000449279
  CDS Start-End: 118-387
aagtctctatggtagcgtcagcgtcggaggcggtagtgacggtggcgtttccttgaggaagagtgagggttccaacttttctgcttatctgggaggtgttgggcgcggacagtcgagatgtcagagaaaaagcagccggtagacttaggtctgttagaggaagacgacgagtttgaagagttccctgccgaagactgggctggcttagatgaagatgaagatgcacatgtctgggaggataattgggatgatgacaatgtagaggatgacttctctaatcagttacgggcaactgtactcctgatgatattggtctgtgaaaccccgtatggctgctatgttctccaccaaaagggaagaatgtgcagtgctttcctctgctgttaacagatcatcaacctatgataaaacagagaaaaacagactaagtgatttacttaaggtcacacctctggaaggaccctggtgaccaggtgcctgaccctgtagaagaggaagtgttattgcatcttgcaggggcaggacagaggacagggaaaaggtatgcatatagtatgctaatgaggttatatttccttttggagttagtgtttatcctaagaatcagatttgggatggtgagaagccactattttgttagcttaactagagagtgtccttccagtggtgttattgttgttctttcatactaagtgtttt

SEQ ID NO: 186104 - DNA, 661 bp, Homo sapiens
  Payload ID: 16648
  Gene Symbol: SHFM1
  Gene Name: split hand/foot malformation (ectrodactyly) type 1
  ENST ID: ENST00000413065
  CDS Start-End: 89-358
gcggtagtgacggtggcgtttccttgaggaagagtgagggttccaacttttctgcttatctgggaggtgttgggcgcggacagtcgagatgtcagagaaaaagcagccggtagacttaggtctgttagaggaagacgacgagtttgaagagttccctgccgaagactgggctggcttagatgaagatgaagatgcacatgtctgggaggataattgggatgatgacaatgtagaggatgacttctctaatcagttacgggcaactgtactcctgatgatattggtctgtgaaaccccgtatggctgctatgttctccaccaaaagggaagaatgtgcagtgctttcctctgctgttaacagatcatcaacctgtatgtgttcatggccccacctaaatgtaaagagctgggatgcacaggattggagagctattattgagcactagtcatgtggatatgtgcatggagtcagtaaggagggagtggggtggtgctacagcatttcaggcaaagagagcagcctgggtgaaggtccagcctgggcaaggtaggattatggttagcatactgcagtattgttgggtagtaagagattatgatacttcctgtagctacataacaggggcttacttgaagggtgaccctatttattgtttcagtc

SEQ ID NO: 186105 - DNA, 350 bp, Homo sapiens
  Payload ID: 16648
  Gene Symbol: SHFM1
  Gene Name: split hand/foot malformation (ectrodactyly) type 1
  ENST ID: ENST00000417009
  CDS Start-End: 99-296
agcgtcggaggcggtagtgacggtggcgtttccttgaggaagagtgagggttccaacttttctgcttatctgggaggtgttgggcgcggacagtcgagatgtcagagaaaaagcagccggtagacttaggtctgttagaggaagacgacgagtttgaagagttccctgccgaagactgggctggcttagatgaagatgaagatgcacatgtctgggaggataattgggatgatgacaatgtagaggatgacttctctaatcagttacgggctggatacagtgaactggaggaatagcggggagaattgccaatactcaggagtcaggcttcacattgatcatgcagctaa

SEQ ID NO: 186106 - DNA, 775 bp, Homo sapiens
  Payload ID: 16648
  Gene Symbol: SHFM1
  Gene Name: split hand/foot malformation (ectrodactyly) type 1
  ENST ID: ENST00000488005
  CDS Start-End: 89-181
gcggtagtgacggtggcgtttccttgaggaagagtgagggttccaacttttctgcttatctgggaggtgttgggcgcggacagtcgagatgtcagagaaaaagcagccggtagacttaggtctgttagaggaagacgacgagtttgaagagttccctgccgaagggcaactgtactcctgatgatattggtctgtgaaaccccgtatggctgctatgttctccaccaaaagggaagaatgtgcagtgctttcctctgctgttaacagatcatcaacctgtatgtgttcatggccccacctaaatgtaaagagctgggatgcacaggattggagagctattattgagcactagtcatgtggatatgtgcatggagtcagtaaggagggagtggggtggtgctacagcatttcaggcaaagagagcagcctgggtgaaggtccagcctgggcaaggtaggattatggttagcatactgcagtattgttgggtagtaagagattatgatacttcctgtagctacataacaggggcttacttgaagggtgaccctatttattgtttcagtcaccagtgttcagtggaaagtcatgtctttcatataaaaaggaggtcaggcacagtggctcatgcctgtaatcccagcactttgggagggcaaggcaggtggatcacctgaggtcaggagttcgagaccagcctggccaacatggtgaaacctgtctctactaaaaatataaaaattagccaggcatggtggtgcatgcctgtaatccc

SEQ ID NO: 186107 - DNA, 462 bp, Homo sapiens
  Payload ID: 16648
  Gene Symbol: SHFM1
  Gene Name: split hand/foot malformation (ectrodactyly) type 1
  ENST ID: ENST00000619259
  CDS Start-End: 13-198
cggacagtcgagatgtcagagaaaaagcagccggtagacttaggtctgttagaggaagacgacgagtttgaagagttccctgccgaagactgggctggcttagatgaagatgaagatgcacatgtctgggaggataattgggatgatgacaatgtagaggatgacttctctaatcagttacgatcccaaaatgggtaggctctgtttgaccttgtggaattgttgaagatgcagttctcaacagcatcactagatgttagaaacaaatacatcagatgatgctatgcagctctgaaggaagaacatgtattgccaggactccaacatttgtgctgtgtttgctgtacaaggaggaaaagtgggaagaaagcatggcataaaaagggggaggagacccagcataagaagcccagctcagcgggccagaggaccctggatccatgagagtaagcatccggcctt

SEQ ID NO: 186108 - DNA, 2637 bp, Homo sapiens
  Payload ID: 16648
  Gene Symbol: SHFM1
  Gene Name: split hand/foot malformation (ectrodactyly) type 1
  ENST ID: ENST00000615352
  CDS Start-End: 48-404
gagaaacaaatacatcagatgatgctatgcagctctgaaggaagaacatgtattgccaggactccaacatttgtgctgtgtttgctgtacaaggaggaaaagtgggaagaaagcatggcataaaaagggggaggagacccagcataagaagcccagctcagcgggccagaggaccctggatccatgagagtaagcatccggcctttgcaaagcaacagataaacttggagatgcccaactccagagcgacaacagagttagcctgggtctgcaggtccctgactctttccactgctccactgagccccccaccatccttggtgcactgtgaagattgttcttgcctgcctggctgccattcgggtgacctctacaatctggccccagcagaaagaacttgctagcagcatatcaatagcagagatggaagtctggtcatatggtgcccacatctattgaagtaaacatgctgataccagatatccctggctctctgtcttcaaggcacatggtagaactatacttcctagctttctgtgtggctgggtgggtcacatgacaagttcagacagatgaattatgattagaagcatttaattgttaatacatattctagtgctctttccctctgtcatcacaactgacaatgtttcagacagtgacttctccaacaggctggttccagagtgaaaatagagcccagtagagtctgtagctgatgcaatatggacatgtagggtgagtgagaaaatgcttttgttgggttaagcatctgaggtttgatggtttgttgctactgcagcacaaccttacccatcctaacaaatatgactattattgactaacctgacaacagaagagtctttccacttctgctgtgatgaggaacagagttttttccctgttatatcttaatattagatagcagcagcctctggaaatagttctttctctaccacttcttacccatgtggcataaagccagctactaaacctcttcacttttcagctttcccttttaaaagtgggagtaaataagacctttctcatggagttattgatcaaatgaaataattaaataacgagtatttaaattttaaatttaaatgaaaattcaaatgacataatgcctatgaagtacttatttagtccataatatcctcagtaaatggtagttagccttactaacacaaaggaaatggacaaagccatgccattttccaaagtagtttctaggaccatattatctctaaaaatcccaactttctgctgtaaatttgaactaatccagaacaggctaatccattgcaatggcctattcatccttcttcttagagtttagctatcagtcatcttgttgctgagaacaaagccagcctagttgtttgtaagcaagcctctagagagacagaaactgtcttgtatttctttgaatatcctctactgcctctaacactgtgcctcggctatatttctggatctttatttaattgttttgaatgcttcttatgtttaatttctgccatatccattaggaaaacaacgtaatccttcctccaacaccgatggtataagcctccatgaccgggaaacatttgcccccaagtttaaagaatttagttctgtaaggcttgttgacccatctgacaggaattcctgtaccaagtggtcagtcagtgaagatctctttccactggtaactttatcaagaaagtaagatacaagactgtatgtaaagtatattatcctatgtgaaatcaagggacagaaaataactggaaggaaatattccaaaatgttagcagtagtttctcccggagaatgtgatgtatacatttggatgggtgatatataaagtacttttcatagatctgggcaagagatattttagagggctccacataccacaatcacccacaaataaatgtattaaagagcacacagatgcctttatcactcaggatgtggcactcagagctggcccagcatagtctataacacttaacatcactctcatgaccacactgctcaggtcctagggaagtgtgcctctgtatctcttccctgtatccttaaaagaaaagatgacctaatttgaaagttgataaaaatcagggattatgatgatgttgcttcagaattcttggaggacgtaagagaaaaatagtgctgggttatgagaagaacaaaacttaccaaattcctccctgaagataacataaatgcaatagattcttttacaacaaagtgtcatttctcaataatgccaagaatcctttttcatgcttctcttcttgttcacattcctggttcccatgctactcaattaacataatattcagaaaagttgcagatggtgatttaggaacatgttgtaatattaacatttcatattacccttaaatttgcatgcatgcatcatatgtgtatcatggtaccaattctttatattggtaactaggtggatatagaacatttacaatgtgaatagtgttatctctataaaaacaagatttaattaaaatgttcatatatgaaatgaaattttggcatatattaattataacttggattttaccttttaaagttaatagatcattttgaatattttaaaagactttaataaacatataaaat

SEQ ID NO: 186109 - DNA, 507 bp, Homo sapiens
  Payload ID: 16648
  Gene Symbol: SHFM1
  Gene Name: split hand/foot malformation (ectrodactyly) type 1
  ENST ID: ENST00000466986
  CDS Start-End: 50-235
gttccaacttttctgcttatctgggaggtgttgggcgcggacagtcgagatgtcagagaaaaagcagccggtagacttaggtctgttagaggaagacgacgagtttgaagagttccctgccgaagactgggctggcttagatgaagatgaagatgcacatgtctgggaggataattgggatgatgacaatgtagaggatgacttctctaatcagttacgatcccaaaatgggtaggctctgtttgaccttgtggaattgttgaagatgcagttctcaacagcatcactagatgttgactccaacatttgtgctgtgtttgctgtacaaggaggaaaagtgggaagaaagcatggcataaaaagggggaggagacccagcataagaagcccagctcagcgggccagaggaccctggatccatgagagtaagcatccggcctttgcaaagcaacagataaacttggagatgcccaactccagagcgacaacagagttagcctgggtctg

SEQ ID NO: 186110 - DNA, 610 bp, Homo sapiens
  Payload ID: 16648
  Gene Symbol: SHFM1
  Gene Name: split hand/foot malformation (ectrodactyly) type 1
  ENST ID: ENST00000613919
  CDS Start-End: 13-213
cggacagtcgagatgtcagagaaaaagcagccggtagacttaggtctgttagaggaagacgacgagtttgaagagttccctgccgaagactgggctggcttagatgaagatgaagatgcacatgtctgggaggataattgggatgatgacaatgtagaggatgacttctctaatcagttacgggatatgggaaacgtgtcaatctctgtgtgagggtgaagaacgcactgagacagccagaagagacatccatggacatgcatcagctggtctccttcaagagaaactcctgggggaggagccaagatggccgaataggaacagctccagtctacagctcccagcgtgagcgacgcagaagatgggtgatttctgcatttccatctgagatcccaaaatgggtaggctctgtttgaccttgtggaattgttgaagatgcagttctcaacagcatcactagatgttgactccaacatttgtgctgtgtttgctgtacaaggaggaaaagtgggaagaaagcatggcataaaaagggggaggagacccagcataagaagcccagctcagcgggccagaggaccctggatccatgagagtaagcatccggcct

SEQ ID NO: 186111 - DNA, 544 bp, Homo sapiens
  Payload ID: 16648
  Gene Symbol: SHFM1
  Gene Name: split hand/foot malformation (ectrodactyly) type 1
  ENST ID: ENST00000618105
  CDS Start-End: 13-282
cggacagtcgagatgtcagagaaaaagcagccggtagacttaggtctgttagaggaagacgacgagtttgaagagttccctgccgaagactgggctggcttagatgaagatgaagatgcacatgtctgggaggataattgggatgatgacaatgtagaggatgacttctctaatcagttacgccatggacatgcatcagctggtctccttcaagagaaactcctgggggaggagccaagatggccgaataggaacagctccagtctacagctcccagcgtgagcgacgcagaagatgggtgatttctgcatttccatctgagatcccaaaatgggtaggctctgtttgaccttgtggaattgttgaagatgcagttctcaacagcatcactagatgttgactccaacatttgtgctgtgtttgctgtacaaggaggaaaagtgggaagaaagcatggcataaaaagggggaggagacccagcataagaagcccagctcagcgggccagaggaccctggatccatgagagtaagcatccggcctt

SEQ ID NO: 186112 - DNA, 591 bp, Homo sapiens
  Payload ID: 16648
  Gene Symbol: SHFM1
  Gene Name: split hand/foot malformation (ectrodactyly) type 1
  ENST ID: ENST00000617133
  CDS Start-End: 13-189
cggacagtcgagatgtcagagaaaaagcagccggtagacttaggtctgttagaggaagacgacgagtttgaagagttccctgccgaagactgggctggcttagatgaagatgaagatgcacatgtctgggaggataattgggatgatgacaatgtagaggatgacttctctaatcagttacggtcctaaactgactctggggactaaagaaaaaaagtataacttatcatggaagttgcttaagtgcaaaattaatcaggtcaggggaggattggatatggagattaaactgtcatgcttggatctggaagatcccaaaatgggtaggctctgtttgaccttgtggaattgttgaagatgcagttctcaacagcatcactagatgttagaaacaaatacatcagatgatgctatgcagctctgaaggaagaacatgtattgccaggactccaacatttgtgctgtgtttgctgtacaaggaggaaaagtgggaagaaagcatggcataaaaagggggaggagacccagcataagaagcccagctcagcgggccagaggaccctggatccatgagagtaagcatccggcctt

SEQ ID NO: 186113 - DNA, 582 bp, Homo sapiens
  Payload ID: 16648
  Gene Symbol: SHFM1
  Gene Name: split hand/foot malformation (ectrodactyly) type 1
  ENST ID: ENST00000623498
  CDS Start-End: 64-237
gaggaagagtgagggttccaacttttctgcttatctgggaggtgttgggcgcggacagtcgagatgtcagagaaaaagcagccggtagacttaggtctgttagaggaagacgacgagtttgaagagttccctgccgaagactgggctggcttagatgaagatgaagatgcacatgtctgggaggataattgggatgatgacaatgtagaggatgacttctctaatcagttacggtagacacagcatcatctctacccataaaagatggcattctgcaagactgagaagatgcccacctccattcccagagtccaggccttcattaactcacacgagaactacagaagcatcacccctagttctcctattagtcactcctcctcaactgcctctaatccatccatccatctatccggcatgggtcatgtaaagttacagctgagaaggtactccctctcttaaactcatcggggctccatgtggcttcaagattgaaaataaaactactgtgtatggtatataaacttaagctctcaagagtgtgcccactccctgtgctccagtcatggaacactctttgca

SEQ ID NO: 186114 - DNA, 729 bp, Homo sapiens
  Payload ID: 16648
  Gene Symbol: SHFM1
  Gene Name: split hand/foot malformation (ectrodactyly) type 1
  ENST ID: ENST00000623693
  CDS Start-End: 18-380
gggcgcggacagtcgagatgtcagagaaaaagcagccggtagacttaggtctgttagaggaagacgacgagtttgaagagttccctgccgaagactgggctggcttagatgaagatgaagatgcacatgtctgggaggataattgggatgatgacaatgtagaggatgacttctctaatcagttacgacacagcatcatctctacccataaaagatggcattctgcaagactgagaagatgcccacctccattcccagagtccaggccttcattaactcacacgagaactacagaagcatcacccctagttctcctattagtcactcctcctcaactgcctctaatccatccatccatctatccggcatgggtcatgtaaagttacagctgagaaggtactccctctcttaaactcatcggggctccatgtggcttcaagattgaaaataaaactactgtgtatggtatataaacttaagctctcaagagtgtgcccactccctgtgctccagtcatggaacactctttgcagttctttgagcatgctccggtctctctttcatgctttatataagctgtcctcttttattggaacatacttccttcccatcctgcccccaacacccaacttgtctacctgaggagcacttagtcattgttaaagacccagtccaagtttttcctccttggaaatacttccctgacctactttgtctggggtttgtgcc

SEQ ID NO: 186115 - DNA, 1666 bp, Homo sapiens
  Payload ID: 16649
  Gene Symbol: SPO11
  Gene Name: SPO11 meiotic protein covalently bound to DSB
  Uniprot ID: Q9Y5K1
  ENST ID: ENST00000345868
  CDS Start-End: 56-1132
caagggcgcagcctaggacaggggcttctggagcttctggcagccgtctgccctcatggcctttgcacctatggggcccgaggcctcgttcttcgacgttttggaccgacacagggagtccctgctggctgccctgaggagaggtggcagggagcccccaactgggggaagccgcctggcctccaggtttgaagattctgtgggtcttcagatggtatcccattgcaccaccagaaagatcaaaagtgattcaccaaaatcagctcaaaaattttctctaatccttaaaatattgtccatgatttataaattagtacagagcaacacttatgcaaccaaaagggacatatattacactgacagtcaactctttggtaaccagactgtcgtcgacaatattatcaatgacatttcttgcatgttaaaagtgtcaaggaggagtctacatatattatctacatcaaaaggtttaattgctggcaacttaagatacatcgaggaagatggcaccaaagtgaattgtacctgtggtgcaacggctgttgctgtgccatcgaatattcaaggaattcggaatttagttacagatgcaaagtttgtattaattgtagaaaaagatgcaacatttcagcggctcctagatgacaacttttgcaacaaattgtctccttgcatcatgattacgggaaagggagttcctgatctaaacacaagacttttagtcaagaaactgtgggatacatttcatgttcctgttttcactcttgtagatgctgatccacatggcatagaaataatgtgcatctataagtatggatctatgtctatgtcttttgaagctcatcatctcacagttccagctattagatggcttggtcttctcccttctgatcttaaaagattaaatgtacctaaagatagtttgattccactgacaaaaagggaccaaatgaaacttgacagtatcctgaggagaccttatgttacctgccaaccattttggagaaaagaaatggaaataatggcagactctaaaatgaaggcagaaattcaagctttgactttcctatcatcagattatctttccagagtgtacttacctaacaaattaaaatttggaggatggatataaaaataaatcagaagaacttctgattgccagaggcttttcattagttttgttttgattggcaaatactattgtggaaagaacatatattatattcttaattctgtaaaagtgaaataaaataactttccgttaattatatatttttgtcaaaacaaatgctgtactccaattttctttgcaaggccttattcttgcctctatagagacagatttctgtcctatcttctaaagcaaattataaaagaatatgttattttgacctttaaattatttttgaaaaaataatattttatacatgtcatcaaagtctacaaaatatttaccttctacgatacaactaatgttaacgcataaagtatcttactggtaacaaaaatcataatgatctgaatttgagatgttgcaaatgaattgtggtgtccggtagtttcttcttacattttcctttgcctttatactttaggggtcttactccattaattcatttgttacattagtaaaattcagtatgaataaatatttggattgatgtag

SEQ ID NO: 186116 - DNA, 1608 bp, Homo sapiens
  Payload ID: 16649
  Gene Symbol: SPO11
  Gene Name: SPO11 meiotic protein covalently bound to DSB
  ENST ID: ENST00000371260
  CDS Start-End: 10-1074
tctgccctcatggcctttgcacctatggggcccgaggcctcgttcttcgacgttttggaccgacacagggagtccctgctggctgccctgaggagaggtggcagggagcccccaactgggggaagccgcctggcctccaggtttgaagattctgtgggtcttcagatggtatcccattgcaccaccagaaagatcaaaagtgattcaccaaaatcagctcaaaaattttctctaatccttaaaatattgtccatgatttataaattagtacagagcaacacttatgcaaccaaaagggacatatattacactgacagtcaactctttggtaaccagactgtcgtcgacaatattatcaatgacatttcttgcatgttaaaagtgtcaaggaggagtctacatatattatctacatcaaaaggtttaattgctggcaacttaagatacatcgaggaagatggcaccaaagtgaattgtacctgtggtgcaacggctgttgctgtgccatcgaatattcaaggaattcggaatgcaaagtttgtattaattgtagaaaaagatgcaacatttcagcggctcctagatgacaacttttgcaacaaattgtctccttgcatcatgattacgggaaagggagttcctgatctaaacacaagacttttagtcaagaaactgtgggatacatttcatgttcctgttttcactcttgtagatgctgatccacatggcatagaaataatgtgcatctataagtatggatctatgtctatgtcttttgaagctcatcatctcacagttccagctattagatggcttggtcttctcccttctgatcttaaaagattaaatgtacctaaagatagtttgattccactgacaaaaagggaccaaatgaaacttgacagtatcctgaggagaccttatgttacctgccaaccattttggagaaaagaaatggaaataatggcagactctaaaatgaaggcagaaattcaagctttgactttcctatcatcagattatctttccagagtgtacttacctaacaaattaaaatttggaggatggatataaaaataaatcagaagaacttctgattgccagaggcttttcattagttttgttttgattggcaaatactattgtggaaagaacatatattatattcttaattctgtaaaagtgaaataaaataactttccgttaattatatatttttgtcaaaacaaatgctgtactccaattttctttgcaaggccttattcttgcctctatagagacagatttctgtcctatcttctaaagcaaattataaaagaatatgttattttgacctttaaattatttttgaaaaaataatattttatacatgtcatcaaagtctacaaaatatttaccttctacgatacaactaatgttaacgcataaagtatcttactggtaacaaaaatcataatgatctgaatttgagatgttgcaaatgaattgtggtgtccggtagtttcttcttacattttcctttgcctttatactttaggggtcttactccattaattcatttgttacattagtaaaattcagtatgaataaatatttggattgatgtag

SEQ ID NO: 186117 - DNA, 1834 bp, Homo sapiens
  Payload ID: 16649
  Gene Symbol: SPO11
  Gene Name: SPO11 meiotic protein covalently bound to DSB
  Uniprot ID: Q9Y5K1
  ENST ID: ENST00000371263
  CDS Start-End: 110-1300
ggcgtgggcacgccggccgctcagaaagcgcgggaaaggcacgcagccacgccccaagggcgcagcctaggacaggggcttctggagcttctggcagccgtctgccctcatggcctttgcacctatggggcccgaggcctcgttcttcgacgttttggaccgacacagggagtccctgctggctgccctgaggagaggtggcagggagcccccaactgggggaagccgcctggcctccagttctgaggttcttgcatctatagaaaatattatccaagacataatcacaagcttggcaagaaatgaagcacctgcattcacgatagacaacagatcaagctgggaaaacataaagtttgaagattctgtgggtcttcagatggtatcccattgcaccaccagaaagatcaaaagtgattcaccaaaatcagctcaaaaattttctctaatccttaaaatattgtccatgatttataaattagtacagagcaacacttatgcaaccaaaagggacatatattacactgacagtcaactctttggtaaccagactgtcgtcgacaatattatcaatgacatttcttgcatgttaaaagtgtcaaggaggagtctacatatattatctacatcaaaaggtttaattgctggcaacttaagatacatcgaggaagatggcaccaaagtgaattgtacctgtggtgcaacggctgttgctgtgccatcgaatattcaaggaattcggaatttagttacagatgcaaagtttgtattaattgtagaaaaagatgcaacatttcagcggctcctagatgacaacttttgcaacaaattgtctccttgcatcatgattacgggaaagggagttcctgatctaaacacaagacttttagtcaagaaactgtgggatacatttcatgttcctgttttcactcttgtagatgctgatccacatggcatagaaataatgtgcatctataagtatggatctatgtctatgtcttttgaagctcatcatctcacagttccagctattagatggcttggtcttctcccttctgatcttaaaagattaaatgtacctaaagatagtttgattccactgacaaaaagggaccaaatgaaacttgacagtatcctgaggagaccttatgttacctgccaaccattttggagaaaagaaatggaaataatggcagactctaaaatgaaggcagaaattcaagctttgactttcctatcatcagattatctttccagagtgtacttacctaacaaattaaaatttggaggatggatataaaaataaatcagaagaacttctgattgccagaggcttttcattagttttgttttgattggcaaatactattgtggaaagaacatatattatattcttaattctgtaaaagtgaaataaaataactttccgttaattatatatttttgtcaaaacaaatgctgtactccaattttctttgcaaggccttattcttgcctctatagagacagatttctgtcctatcttctaaagcaaattataaaagaatatgttattttgacctttaaattatttttgaaaaaataatattttatacatgtcatcaaagtctacaaaatatttaccttctacgatacaactaatgttaacgcataaagtatcttactggtaacaaaaatcataatgatctgaatttgagatgttgcaaatgaattgtggtgtccggtagtttcttcttacattttcctttgcctttatactttaggggtcttactccattaattcatttgttacattagtaaaattcagtatgaataaatatttggattgatgtag

SEQ ID NO: 186118 - DNA, 810 bp, Homo sapiens
  Payload ID: 16649
  Gene Symbol: SPO11
  Gene Name: SPO11 meiotic protein covalently bound to DSB
  ENST ID: ENST00000418127
  CDS Start-End: 1-810
ctgctggctgccctgaggagaggtggcagggagcccccaactgggggaagccgcctggcctccagttctgaggttcttgcatctatagaaaatattatccaagacataatcacaagcttggcaagaaatgaagcacctgcattcacgatagacaacagatcaagctgggaaaacataaagtttgaagattctgtgggtcttcagatggtatcccattgcaccaccagaaagatcaaaagtgattcaccaaaatcagctcaaaaattttctctaatccttaaaatattgtccatgatttataaattagtacagagcaacacttatgcaaccaaaagggacatatattacactgacagtcaactctttggtaaccagactgtcgtcgacaatattatcaatgacatttcttgcatgttaaaagtgtcaaggaggagtctacatatattatctacatcaaaaggtttaattgctggcaacttaagatacatcgaggaagatggcaccaaagtgaattgtacctgtggtgcaacggctgttgctgtgccatcgaatattcaaggaattcggattacagatgcaaagtttgtattaattgtagaaaaagatgcaacatttcagcggctcctagatgacaacttttgcaacaaattgtctccttgcatcatgattacgggaaagggagttcctgatctaaacacaagacttttagtcaagaaactgtgggatacatttcatgttcctgttttcactcttgtagatgctgatccacatggcatagaaataatgtgcatctataagtatggatctatg

SEQ ID NO: 186119 - DNA, 1133 bp, Homo sapiens
  Payload ID: 16649
  Gene Symbol: SPO11
  Gene Name: SPO11 meiotic protein covalently bound to DSB
  ENST ID: ENST00000494972
  CDS Start-End: 1-372
ttatctacatcaaaaggtttaattgctggcaacttaagatacatcgaggaagatggcaccaaagtgaattgtacctgtggtgcaacggctgttgctgtgccatcgaatattcaaggaattcggaatttagttacagatgcaaagtttgtattaattgtagaaaaagatgcaacatttcagcggctcctagatgacaacttttgcaacaaattgtctccttgcatcatgattacgtcaacaccagtctttcagcacctgaaatccaagggaaagggagttcctgatctaaacacaagacttttagtcaagaaactgtgggatacatttcatgttcctgttttcactcttgtagatgctgatccacatgattaaatgtacctaaagatagtttgattccactgacaaaaagggaccaaatgaaacttgacagtatcctgaggagaccttatgttacctgccaaccattttggagaaaagaaatggaaataatggcagactctaaaatgaaggcagaaattcaagctttgactttcctatcatcagattatctttccagagtgtacttacctaacaaattaaaatttggaggatggatataaaaataaatcagaagaacttctgattgccagaggcttttcattagttttgttttgattggcaaatactattgtggaaagaacatatattatattcttaattctgtaaaagtgaaataaaataactttccgttaattatatatttttgtcaaaacaaatgctgtactccaattttctttgcaaggccttattcttgcctctatagagacagatttctgtcctatcttctaaagcaaattataaaagaatatgttattttgacctttaaattatttttgaaaaaataatattttatacatgtcatcaaagtctacaaaatatttaccttctacgatacaactaatgttaacgcataaagtatcttactggtaacaaaaatcataatgatctgaatttgagatgttgcaaatgaattgtggtgtccggtagtttcttcttacattttcctttgcctttatactttaggggtcttactccattaattcatttgttacattagtaaaattcagtatgaataaatatttggattgatgtag

SEQ ID NO: 186120 - DNA, 2472 bp, Homo sapiens
  Payload ID: 16650
  Gene Symbol: SPOCD1
  Gene Name: SPOC domain containing 1
  Uniprot ID: Q6ZMY3
  ENST ID: ENST00000257100
  CDS Start-End: 201-2291
gatctcagctccttttcagctagtgggtggaaccccaggagggaaaactcagggaagcccaggaggaagtgaaaataccccatggagtgaagcttgtgtgctacctgggttccgggccagtgatccagctcctgggggccatcagccacggccaggcaggggggcagctgccaccaaagctggaggttctagaggacttgatggaggtcagctcaccctcacctgcccagaggctcagaaggaagaaaaggcccatggtgcagggccctgctgggtgccaggttttccagccttctccttcaggaggcacagcaggggaccctggtggcctctctgaccccttctaccctccaagaagcggttccctggcccttggcgaccccagctcggaccctgcatgttcccagagtggcccaatggaggctgaagaggattctcttccggagcagccagaggactcagctcagctccaacaggagaagccatccctgtatattggggtgcggggcactgttgtccgttccatgcaggaggtactatggactcgccttcgggagctcccagacccagtgctgagtgaggaggtggtggagggcattgctgctggcattgaggcagccctctgggacctgacacaaggcaccaatggccggtacaagaccaagtatcgcagcctgctgttcaacctgcgggaccccaggaacctggacttgtttctcaaagtggttcatggagatgtcaccccctacgacctggtgcggatgagctcgatgcagctggccccccaggagctggcccgctggcgggaccaggaggagaaaaggggcctgaatatcattgagcagcaacagaaggagccgtgcagacttccagcctccaaaatgacccacaagggcgaagtggagattcagcgggacatggaccagacactgaccctggaggatctggtgggaccgcagatgttcatggactgcagcccacaggccctgcccatcgcatcagaggacaccacggggcagcatgaccaccacttcttagaccccaactgccacatctgcaaggactgggagccctcgaatgagctgctaggctccttcgaagccgccaagagctgcggggacaatatcttccagaaagccctaagccaaactcctatgcctgctccagagatgcccaaaaccagggagttgtctcccacggaaccacaggacagggtccctccatctgggctccatgtgcctgctgcacccacaaaggccctgccctgcctgccaccctgggaaggtgttctggacatgttctccatcaagcggttccgggccagggcccagctggtctcgggacacagctgtcggcttgtccaggctctgcccaccgtgatccgctcggcaggctgcatcccctccaacattgtctgggaccttctggccagcatctgcccagccaaggccaaggacgtctgcgtggtcagactgtgcccacatggggcccgggacacccagaactgccgcctgctctactcatacctcaatgataggcagcgccacgggctggcctctgtggagcacatggggatggtcctgctgcccctgcctgccttccagcccctgcccaccaggctgcgccctttggggggcccaggtctggaggtcactcactcaagtctgttgctggctgtgctgctccccaaggaagggcttccagacacagcagggtccagcccctggttggggaaggttcaaaagatggtctccttcaacagtaaggtggagaagagatactatcagccagatgacaggaggccgaatgtgcccctgaagggcacccctcccccaggaggtgcctggcagcagagccagggcaggggcagtatagctccaaggggaatctctgcttggcagaggccccccagaggcagggggaggctctggccagagcctgaaaactggcagcatcctgggcgagggcagtggcccccagagccaggcttgcgccagtcccagcatccctattcagtagcaccagctggtcatggctttggccgtggccagcacttccacagggactcctgtccccaccaagccctgctccggcacctcgaatccctggcgaccatgagtcaccagctccaagccttactgtgcccccagaccaagagctccatcccccgccctctgcagcgtttgtctagcgcccttgcagctccagagccccctggcccagcccgtgactcctctttggggcctacagatgaagctggctctgagtgtcccttccctagaaaggcctgaccctccttacccaccagaacaggggttttgatgccctcactagtgttgaagcctgttccagagagaggtgggactgcaaggagaggatggtcagccctacccacctgccctgtttgaacttcctgtttgacaatgtttgctgttgattttttgttcaataaagaatttggtaaaattggga

SEQ ID NO: 186121 - DNA, 3960 bp, Homo sapiens
  Payload ID: 16650
  Gene Symbol: SPOCD1
  Gene Name: SPOC domain containing 1
  Uniprot ID: Q6ZMY3
  ENST ID: ENST00000360482
  CDS Start-End: 131-3781
agcaagggcctccctcccccgcatcacgtgatctcagctccttttcagctagtgggtggaaccccaggagggaaaactcagggaagcccagggcccgtgttgtgcttttggcccaggtaggtggacagacatgtcccaggcgggggacgtagaaggccccagcacaggagaccctgtgctcagtccccaacacaactgtgagcttttacagaacatggaaggagccagctccatgccaggcctgtcaccagatgggccgggagcaagctctgggcccggagtcagggctggcagcagaaggaagatccccaggaaggaggcccttcgaggtggcagctcccgggctgcaggtgctgctgaggtccggccaggggtcttggagctgctagctgtggtacagagccggggctcgatgctggctcctgggctccacatgcagctgccctcggtgcctactcaggggagagctctgacctccaagaggctccaggtttctctgtgtgacatcttagatgacagttgccccaggaaactttgtagcaggtctgctggcctcccagagagagctctggcctgcagggagaggcttgcaggagtggaggaggtgagctgcctcaggcccagggaggccagagacggtggaatgagttctccagggtgtgacagaagaagccccacactcagcaaagaggagccccctggaaggcccctgacatcctcaccagacccagtccctgtgagggtaagaaagaaatggaggaggcaaggggctcattcagagtgtgaggaaggggctggtgacttcctgtggcttgatcagagccctcgtggggacaacctcctgtctgtgggagaccctccccaagttgctgacctggagtccttgggaggcccttgcagacctccctctccaaaagacactgggtctgggcctggagagccaggtggaagtggggcaggatgtgcctcagggactgagaaatttggatatttgcccgctacaggggatgggccccagccaggcagcccctgtggccctgtcgggttcccagtgcccagtggaggggagtccctcagttcagctgcacaggctcctccacagagcgcagcactgtgcctgggggcgtcagcacaggcctctgcagagcagcaagaagctgtgtgtgtcgtgcggactggcagcgatgaaggccaggctccagcacaggaccaggaggagctggaggccaaggctcagccagcttccaggggaaggctggagcaaggactcgctgcccccgctgacacctgtgccagctcccgggagcccttgggcggcctcagctcctccctggatactgaagccagcagggcctgctcaggcccattcatggagcagagaagatccaagggcactaagaacctgaagaaaggtccagtgccctgtgcccaagaccggggcacagacagaagctcagacaactcccaccaggacaggccagaggaacccagcccaggaggctgccccagactggaggaagtgaaaataccccatggagtgaagcttgtgtgctacctgggttccgggccagtgatccagctcctgggggccatcagccacggccaggcaggggggcagctgccaccaaagctggaggttctagaggacttgatggaggtcagctcaccctcacctgcccagaggctcagaaggaagaaaaggcccatggtgcagggccctgctgggtgccaggttttccagccttctccttcaggaggcacagcaggggaccctggtggcctctctgaccccttctaccctccaagaagcggttccctggcccttggcgaccccagctcggaccctgcatgttcccagagtggcccaatggaggctgaagaggattctcttccggagcagccagaggactcagctcagctccaacaggagaagccatccctgtatattggggtgcggggcactgttgtccgttccatgcaggaggtactatggactcgccttcgggagctcccagacccagtgctgagtgaggaggtggtggagggcattgctgctggcattgaggcagccctctgggacctgacacaaggcaccaatggccggtacaagaccaagtatcgcagcctgctgttcaacctgcgggaccccaggaacctggacttgtttctcaaagtggttcatggagatgtcaccccctacgacctggtgcggatgagctcgatgcagctggccccccaggagctggcccgctggcgggaccaggaggagaaaaggggcctgaatatcattgagcagcaacagaaggagccgtgcagacttccagcctccaaaatgacccacaagggcgaagtggagattcagcgggacatggaccagacactgaccctggaggatctggtgggaccgcagatgttcatggactgcagcccacaggccctgcccatcgcatcagaggacaccacggggcagcatgaccaccacttcttagaccccaactgccacatctgcaaggactgggagccctcgaatgagctgctaggctccttcgaagccgccaagagctgcggggacaatatcttccagaaagccctaagccaaactcctatgcctgctccagagatgcccaaaaccagggagttgtctcccacggaaccacaggacagggtccctccatctgggctccatgtgcctgctgcacccacaaaggccctgccctgcctgccaccctgggaaggtgttctggacatgttctccatcaagcggttccgggccagggcccagctggtctcgggacacagctgtcggcttgtccaggctctgcccaccgtgatccgctcggcaggctgcatcccctccaacattgtctgggaccttctggccagcatctgcccagccaaggccaaggacgtctgcgtggtcagactgtgcccacatggggcccgggacacccagaactgccgcctgctctactcatacctcaatgataggcagcgccacgggctggcctctgtggagcacatggggatggtcctgctgcccctgcctgccttccagcccctgcccaccaggctgcgccctttggggggcccaggcctttgggctcttcctgtctcccctctcctttccccaggtctggaggtcactcactcaagtctgttgctggctgtgctgctccccaaggaagggcttccagacacagcagggtccagcccctggttggggaaggttcaaaagatggtctccttcaacagtaaggtggagaagagatactatcagccagatgacaggaggccgaatgtgcccctgaagggcacccctcccccaggaggtgcctggcagcagagccagggcaggggcagtatagctccaaggggaatctctgcttggcagaggccccccagaggcagggggaggctctggccagagcctgaaaactggcagcatcctgggcgagggcagtggcccccagagccaggcttgcgccagtcccagcatccctattcagtagcaccagctggtcatggctttggccgtggccagcacttccacagggactcctgtccccaccaagccctgctccggcacctcgaatccctggcgaccatgagtcaccagctccaagccttactgtgcccccagaccaagagctccatcccccgccctctgcagcgtttgtctagcgcccttgcagctccagagccccctggcccagcccgtgactcctctttggggcctacagatgaagctggctctgagtgtcccttccctagaaaggcctgaccctccttacccaccagaacaggggttttgatgccctcactagtgttgaagcctgttccagagagaggtgggactgcaaggagaggatggtcagccctacccacctgccctgtttgaacttcctgtttgacaatgtttgctgttgattttttgttcaataaagaatttggtaaaattgg

SEQ ID NO: 186122 - DNA, 2105 bp, Homo sapiens
  Payload ID: 16650
  Gene Symbol: SPOCD1
  Gene Name: SPOC domain containing 1
  ENST ID: ENST00000452755
  CDS Start-End: 60-1979
agttgtgagtaagcctcttattttccctgagccccagtaaccccatccataaaaggagaatgatcctatttcctcctcacggagttggggtgagaataagtaggttcctgcagggaaacacccacgacaggaacaagttggcccagaccctgccgcccacccagctgcctccctctgggactaagtgcctggagagcctcctgggctcagtgcccccgccctgccctggcctccacagccttcgggagctcccagacccagtgctgagtgaggaggtggtggagggcattgctgctggcattgaggcagccctctgggacctgacacaaggcaccaatggccggtacaagaccaagtatcgcagcctgctgttcaacctgcgggaccccaggaacctggacttgtttctcaaagtggttcatggagatgtcaccccctacgacctggtgcggatgagctcgatgcagctggccccccaggagctggcccgctggcgggaccaggaggagaaaaggggcctgaatatcattgagcagcaacagaaggagccgtgcagacttccagcctccaaaatgacccacaagggcgaagtggagattcagcgggacatggaccagacactgaccctggaggatctgggaccgcagatgttcatggactgcagcccacaggccctgcccatcgcatcagaggacaccacggggcagcatgaccaccacttcttagaccccaactgccacatctgcaaggactgggagccctcgaatgagctgctaggctccttcgaagccgccaagagctgcggggacaatatcttccagaaagccctaagccaaactcctatgcctgctccagagatgcccaaaaccagggagttgtctcccacggaaccacaggacagggtccctccatctgggctccatgtgcctgctgcacccacaaaggccctgccctgcctgccaccctgggaaggtgttctggacatgttctccatcaagcggttccgggccagggcccagctggtctcgggacacagctgtcggcttgtccaggctctgcccaccgtgatccgctcggcaggctgcatcccctccaacattgtctgggaccttctggccagcatctgcccagccaaggccaaggacgtctgcgtggtcagactgtgcccacatggggcccgggacacccagaactgccgcctgctctactcatacctcaatgataggcagcgccacgggctggcctctgtggagcacatggggatggtcctgctgcccctgcctgccttccagcccctgcccaccaggctgcgccctttggggggcccaggtctggaggtcactcactcaagtctgttgctggctgtgctgctccccaaggaagggcttccagacacagcagggtccagcccctggttggggaaggttcaaaagatggtctccttcaacagtaaggtggagaagagatactatcagccagatgacaggaggccgaatgtgcccctgaagggcacccctcccccaggaggtgcctggcagcagagccagggcaggggcagtatagctccaaggggaatctctgcttggcagaggccccccagaggcagggggaggctctggccagagcctgaaaactggcagcatcctgggcgagggcagtggcccccagagccaggcttgcgccagtcccagcatccctattcagtagcaccagctggtcatggctttggccgtggccagcacttccacagggactcctgtccccaccaagccctgctccggcacctcgaatccctggcgaccatgagtcaccagctccaagccttactgtgcccccagaccaagagctccatcccccgccctctgcagcgtttgtctagcgcccttgcagctccagagccccctggcccagcccgtgactcctctttggggcctacagatgaagctggctctgagtgtcccttccctagaaaggcctgaccctccttacccaccagaacaggggttttgatgccctcactagtgttgaagcctgttccagagagaggtgggactgcaaggagaggatggtcagccctacccacctgccctgtttgaacttcctgt

SEQ ID NO: 186123 - DNA, 487 bp, Homo sapiens
  Payload ID: 16650
  Gene Symbol: SPOCD1
  Gene Name: SPOC domain containing 1
  ENST ID: ENST00000528791
  CDS Start-End: 226-487
gatctcagctccttttcagctagtgggtggaaccccaggagggaaaactcagggaagcccagggcccgtgttgtgcttttggcccaggaggaagtgaaaataccccatggagtgaagcttgtgtgctacctgggttccgggccagtgatccagctcctgggggccatcagccacggccaggcaggggggcagctgccaccaaagctggaggttctagaggacttgatggaggtcagctcaccctcacctgcccagaggctcagaaggaagaaaaggcccatggtgcagggccctgctgggtgccaggttttccagccttctccttcaggaggcacagcaggggaccctggtggcctctctgaccccttctaccctccaagaagcggttccctggcccttggcgaccccagctcggaccctgcatgttcccagagtggcccaatggaggctgaagaggattctcttccggagcagccagaggactcag

SEQ ID NO: 186124 - DNA, 3774 bp, Homo sapiens
  Payload ID: 16650
  Gene Symbol: SPOCD1
  Gene Name: SPOC domain containing 1
  Uniprot ID: Q6ZMY3
  ENST ID: ENST00000533231
  CDS Start-End: 43-3654
cagggcccgtgttgtgcttttggcccaggtaggtggacagacatgtcccaggcgggggacgtagaaggccccagcacaggagaccctgtgctcagtccccaacacaactgtgagcttttacagaacatggaaggagccagctccatgccaggcctgtcaccagatgggccgggagcaagctctgggcccggagtcagggctggcagcagaaggaagatccccaggaaggaggcccttcgaggtggcagctcccgggctgcaggtgctgctgaggtccggccaggggtcttggagctgctagctgtggtacagagccggggctcgatgctggctcctgggctccacatgcagctgccctcggtgcctactcaggggagagctctgacctccaagaggctccaggtttctctgtgtgacatcttagatgacagttgccccaggaaactttgtagcaggtctgctggcctcccagagagagctctggcctgcagggagaggcttgcaggagtggaggaggtgagctgcctcaggcccagggaggccagagacggtggaatgagttctccagggtgtgacagaagaagccccacactcagcaaagaggagccccctggaaggcccctgacatcctcaccagacccagtccctgtgagggtaagaaagaaatggaggaggcaaggggctcattcagagtgtgaggaaggggctggtgacttcctgtggcttgatcagagccctcgtggggacaacctcctgtctgtgggagaccctccccaagttgctgacctggagtccttgggaggcccttgcagacctccctctccaaaagacactgggtctgggcctggagagccaggtggaagtggggcaggatgtgcctcagggactgagaaatttggatatttgcccgctacaggggatgggccccagccaggcagcccctgtggccctgtcgggttcccagtgcccagtggaggggagtccctcagttcagctgcacaggctcctccacagagcgcagcactgtgcctgggggcgtcagcacaggcctctgcagagcagcaagaagctgtgtgtgtcgtgcggactggcagcgatgaaggccaggctccagcacaggaccaggaggagctggaggccaaggctcagccagcttccaggggaaggctggagcaaggactcgctgcccccgctgacacctgtgccagctcccgggagcccttgggcggcctcagctcctccctggatactgaagccagcagggcctgctcaggcccattcatggagcagagaagatccaagggcactaagaacctgaagaaaggtccagtgccctgtgcccaagaccggggcacagacagaagctcagacaactcccaccaggacaggccagaggaacccagcccaggaggctgccccagactggaggaagtgaaaataccccatggagtgaagcttgtgtgctacctgggttccgggccagtgatccagctcctgggggccatcagccacggccaggcaggggggcagctgccaccaaagctggaggttctagaggacttgatggaggtcagctcaccctcacctgcccagaggctcagaaggaagaaaaggcccatggtgcagggccctgctgggtgccaggttttccagccttctccttcaggaggcacagcaggggaccctggtggcctctctgaccccttctaccctccaagaagcggttccctggcccttggcgaccccagctcggaccctgcatgttcccagagtggcccaatggaggctgaagaggattctcttccggagcagccagaggactcagctcagctccaacaggagaagccatccctgtatattggggtgcggggcactgttgtccgttccatgcaggaggtactatggactcgccttcgggagctcccagacccagtgctgagtgaggaggtggtggagggcattgctgctggcattgaggcagccctctgggacctgacacaaggcaccaatggccggtacaagaccaagtatcgcagcctgctgttcaacctgcgggaccccaggaacctggacttgtttctcaaagtggttcatggagatgtcaccccctacgacctggtgcggatgagctcgatgcagctggccccccaggagctggcccgctggcgggaccaggaggagaaaaggggcctgaatatcattgagcagcaacagaaggagccgtgcagacttccagcctccaaaatgacccacaagggcgaagtggagattcagcgggacatggaccagacactgaccctggaggatctggtgggaccgcagatgttcatggactgcagcccacaggccctgcccatcgcatcagaggacaccacggggcagcatgaccaccacttcttagaccccaactgccacatctgcaaggactgggagccctcgaatgagctgctaggctccttcgaagccgccaagagctgcggggacaatatcttccagaaagccctaagccaaactcctatgcctgctccagagatgcccaaaaccagggagttgtctcccacggaaccacaggacagggtccctccatctgggctccatgtgcctgctgcacccacaaaggccctgccctgcctgccaccctgggaaggtgttctggacatgttctccatcaagcggttccgggccagggcccagctggtctcgggacacagctgtcggcttgtccaggctctgcccaccgtgatccgctcggcaggctgcatcccctccaacattgtctgggaccttctggccagcatctgcccagccaaggccaaggacgtctgcgtggtcagactgtgcccacatggggcccgggacacccagaactgccgcctgctctactcatacctcaatgataggcagcgccacgggctggcctctgtggagcacatggggatggtcctgctgcccctgcctgccttccagcccctgcccaccaggctgcgccctttggggggcccaggtctggaggtcactcactcaagtctgttgctggctgtgctgctccccaaggaagggcttccagacacagcagggtccagcccctggttggggaaggttcaaaagatggtctccttcaacagtaaggtggagaagagatactatcagccagatgacaggaggccgaatgtgcccctgaagggcacccctcccccaggaggtgcctggcagcagagccagggcaggggcagtatagctccaaggggaatctctgcttggcagaggccccccagaggcagggggaggctctggccagagcctgaaaactggcagcatcctgggcgagggcagtggcccccagagccaggcttgcgccagtcccagcatccctattcagtagcaccagctggtcatggctttggccgtggccagcacttccacagggactcctgtccccaccaagccctgctccggcacctcgaatccctggcgaccatgagtcaccagctccaagccttactgtgcccccagaccaagagctccatcccccgccctctgcagcgtttgtctagcgcccttgcagctccagagccccctggcccagcccgtgactcctctttggggcctacagatgaagctggctctgagtgtcccttccctagaaaggcctgaccctccttacccaccagaacaggggttttgatgccctcactagtgttgaagcctgttccagagagaggtgggactgcaaggagaggatggtcagccctacccacctgccctgtttgaact

SEQ ID NO: 186125 - DNA, 477 bp, Homo sapiens
  Payload ID: 16650
  Gene Symbol: SPOCD1
  Gene Name: SPOC domain containing 1
  ENST ID: ENST00000525930
  CDS Start-End: 416-477
tctcagctccttttcagctagtgggtggaaccccaggagggaaaactcagggaagcccaggtgagagcgacgcgaccgatggggcccggatttcttggatgctgggggactgtcccagtaaggcttgggaacctgggtggggcgcctttcagaacgggaccgatgggagagagacgagaagggttatgggcacgaaccccgttcagtatctgctccttgcgcagtgtgagaactgggagagagactcctggcccttccacttcctgtgcttccttgggaggaagtgaaaataccccatggagtgaagcttgtgtgctacctgggttccgggccagtgatccagctcctgggggccatcagccacggccaggcaggggggcagctgccaccaaagctggaggttctagaggacttgatggaggtcagctcaccctcacctgcccagaggctcagaaggaagaaaaggcccatggtgca

SEQ ID NO: 186126 - DNA, 765 bp, Homo sapiens
  Payload ID: 16650
  Gene Symbol: SPOCD1
  Gene Name: SPOC domain containing 1
  ENST ID: ENST00000528579
  CDS Start-End: 1-765
acgacaggaacaagttggcccagaccctgccgcccacccagctgcctccctctgggactaagtgcctggagagcctcctgggctcagtgcccccgccctgccctggcctccacagccttcgggagctcccagacccagtgctgagtgaggaggtggtggagggcattgctgctggcattgaggcagccctctgggacctgacacaaggcaccaatggccggtacaagaccaagtatcgcagcctgctgttcaacctgcgggaccccaggaacctggacttgtttctcaaagtggttcatggagatgtcaccccctacgacctggtgcggatgagctcgatgcagctggccccccaggagctggcccgctggcgggaccaggaggagaaaaggggaccgcagatgttcatggactgcagcccacaggccctgcccatcgcatcagaggacaccacggggcagcatgaccaccacttcttagaccccaactgccacatctgcaaggactgggagccctcgaatgagctgctaggctccttcgaagccgccaagagctgcggggacaatatcttccagaaagccctaagccaaactcctatgcctgctccagagatgcccaaaaccagggagttgtctcccacggaaccacaggacagggtccctccatctgggctccatgtgcctgctgcacccacaaaggccctgccctgcctgccaccctgggaaggtgttctggacatgttctccatcaagcggttccgggcca

SEQ ID NO: 186127 - DNA, 563 bp, Homo sapiens
  Payload ID: 16650
  Gene Symbol: SPOCD1
  Gene Name: SPOC domain containing 1
  ENST ID: ENST00000529396
  CDS Start-End: 434-563
tagtgggtggaaccccaggagggaaaactcagggaagcccaggtgagagcgacgcgaccgatggggcccggatttcttggatgctgggggactgtcccagtaaggcttgggaacctgggtggggcgcctttcagaacgggaccgatgggagagagacgagaagggttatgggcacgaaccccgttcagtatctgctccttgcgcagtgtgagaactgggagagagactcctggcccttccacttcctgtgcttccttgggaagtgaaaataccccatggagtgaagcttgtgtgctacgttttccagccttctccttcaggaggcacagcaggggaccctggtggcctctctgaccccttctaccctccaagaagcggttccctggcccttggcgaccccagctcggaccctgcatgttcccagagtggcccaatggaggctgaagaggattctcttccggagcagccagaggactcagctcagctccaacaggagaagccatccctgtatattggggtgcggggcactgttgtccgttccatgcaggaggtactatggactc

SEQ ID NO: 186128 - DNA, 4837 bp, Homo sapiens
  Payload ID: 16651
  Gene Symbol: SPON1
  Gene Name: spondin 1, extracellular matrix protein
  Uniprot ID: Q9HCB6
  ENST ID: ENST00000576479
  CDS Start-End: 217-2640
gcgctgctctcgttcgcttggctcagctcagctcagctcagcgcagctccgcggccgccaagccgaggcgggcacggtctccgagtcgcggacgccagctccgagctccctctctccgccgcgcctccgccaggtcgcgccttcgtcgggaccacttcgggcaggagtcgcgtggcgaaggcctgcggccgcggcacaaagttgggggccgcgaagatgaggctgtccccggcgcccctgaagctgagccggactccggcactgctggccctggcgctgcccctggccgcggcgctggccttctccgacgagaccctggacaaagtgcccaagtcagagggctactgcagccgtatcctgcgcgcccagggcacgcggcgcgagggctacaccgagttcagcctccgcgtggagggcgaccccgacttctacaagccgggaaccagctaccgcgtaacactttcagctgctcctccctcctacttcagaggattcacattaattgccctcagagagaacagagagggtgataaggaagaagaccatgctgggaccttccagatcatagacgaagaagaaactcagtttatgagcaattgccctgttgcagtcactgaaagcactccacggaggaggacccggatccaggtgttttggatagcaccaccagcgggaacaggctgcgtgattctgaaggccagcatcgtacaaaaacgcattatttattttcaagatgagggctctctgaccaagaaactttgtgaacaagattccacatttgatggggtgactgacaaacccatcttagactgctgtgcctgcggaactgccaagtacagactcacattttatgggaattggtccgagaagacacacccaaaggattaccctcgtcgggccaaccactggtctgcgatcatcggaggatcccactccaagaattatgtactgtgggaatatggaggatatgccagcgaaggcgtcaaacaagttgcagaattgggctcacccgtgaaaatggaggaagaaattcgacaacagagtgatgaggtcctcaccgtcatcaaagccaaagcccaatggccagcctggcagcctctcaacgtgagagcagcaccttcagctgaattttccgtggacagaacgcgccatttaatgtccttcctgaccatgatgggccctagtcccgactggaacgtaggcttatctgcagaagatctgtgcaccaaggaatgtggctgggtccagaaggtggtgcaagacctgattccctgggacgctggcaccgacagcggggtgacctatgagtcacccaacaaacccaccattccccaggagaaaatccggcccctgaccagcctggaccatcctcagagtcctttctatgacccagagggtgggtccatcactcaagtagccagagttgtcatcgagagaatcgcacggaagggtgaacaatgcaatattgtacctgacaatgtcgatgatattgtagctgacctggctccagaagagaaagatgaagatgacacccctgaaacctgcatctactccaactggtccccatggtccgcctgcagctcctccacctgtgacaaaggcaagaggatgcgacagcgcatgctgaaagcacagctggacctcagcgtcccctgccctgacacccaggacttccagccctgcatgggccctggctgcagtgacgaagacggctccacctgcaccatgtccgagtggatcacctggtcgccctgcagcatctcctgcggcatgggcatgaggtcccgggagaggtatgtgaagcagttcccggaggacggctccgtgtgcacgctgcccactgaggaaacggagaagtgcacggtcaacgaggagtgctctcccagcagctgcctgatgaccgagtggggcgagtgggacgagtgcagcgccacctgcggcatgggcatgaagaagcggcaccgcatgatcaagatgaaccccgcagatggctccatgtgcaaagccgagacatcacaggcagagaagtgcatgatgccagagtgccacaccatcccatgcttgctgtccccatggtccgagtggagtgactgcagcgtgacctgcgggaagggcatgcgaacccgacagcggatgctcaagtctctggcagaacttggagactgcaatgaggatctggagcaggtggagaagtgcatgctccctgaatgccccattgactgtgagctcaccgagtggtcccagtggtcggaatgtaacaagtcatgtgggaaaggccacgtgattcgaacccggatgatccaaatggagcctcagtttggaggtgcaccctgcccagagactgtgcagcgaaaaaagtgccgcatccgaaaatgccttcgaaatccatccatccaaaagctacgctggagggaggcccgagagagccggcggagtgagcagctgaaggaagagtctgaaggggagcagttcccaggttgtaggatgcgcccatggacggcctggtcagaatgcaccaaactgtgcggaggtggaattcaggaacgttacatgactgtaaagaagagattcaaaagctcccagtttaccagctgcaaagacaagaaggagatcagagcatgcaatgttcatccttgttagcaagggtacgagttccccagggctgcactctagattccagagtcaccaatggctggattatttgcttgtttaagacaatttaaattgtgtacgctagttttcatttttgcagtgtggttcgcccagtagtcttgtggatgccagagacatcctttctgaatacttcttgatgggtacaggctgagtggggcgccctcacctccagccagcctcttcctgcagaggagtagtgtcagccaccttgtactaagctgaaacatgtccctctggagcttccacctggccagggaggacggagactttgacctactccacatggagaggcaaccatgtctggaagtgactatgcctgagtcccagggtgcggcaggtaggaaacattcacagatgaagacagcagattccccacattctcatctttggcctgttcaatgaaaccattgtttgcccatctcttcttagtggaactttaggtctcttttcaagtctcctcagtcatcaatagttcctggggaaaaacagagctggtagacttgaagaggagcattgatgttgggtggcttttgttctttcactgagaaattcggaatacatttgtctcacccctgatattggttcctgatgcccccccaacaaaaataaataaataaattatggctgctttatttaaatataaggtagctagtttttacacctgagataaataataagcttagagtgtatttttcccttgcttttgggggttcagaggagtatgtacaattcttctgggaagccagccttctgaactttttggtactaaatccttattggaaccaagacaaaggaagcaaaattggtctctttagagaccaatttgcctaaattttaaaatcttcctacacacatctagacgttcaagtttgcaaatcagtttttagcaagaaaacatttttgctatacaaacattttgctaagtctgcccaaagcccccccaatgcattccttcaacaaaatacaatctctgtactttaaagttattttagtcatgaaattttatatgcagagagaaaaagttaccgagacagaaaacaaatctaagggaaaggaatattatgggattaagctgagcaagcaattctggtggaaagtcaaacctgtcagtgctccacaccagggctgtggtcctcccagacatgcataggaatggccacaggtttacactgccttcccagcaattataagcacaccagattcagggagactgaccaccaagggatagtgtaaaaggacattttctcagttgggtccatcagcagtttttcttcctgcatttattgttgaaaactattgtttcatttcttcttttataggccttattactgcttaatccaaatgtgtaccattggtgagacacatacaatgctctgaatacactacgaatttgtattaaacacatcagaatatttccaaatacaacatagtatagtcctgaatatgtacttttaacacaagagagactattcaataaaaactcactgggtctttcatgtctttaagctaagtaagtgttcagaaggttcttttttatattgtcctccacctccatcattttcaataaaagatagggcttttgctcccttgttcttggagggaccattattacatctctgaactacctttgtatccaacatgttttaaatccttaaatgaattgctttctcccaaaaaaagcacaatataaagaaacacaagatttaattatttttctacttggggggaaaaaagtcctcatgtagaagcacccacttttgcaatgttgttctaagctatctatctaactctcagcccatgataaagttccttaagctggtgattcctaatcaaggacaagccaccctagtgtctcatgtttgtatttggtcccagttgggtacattttaaaatcctgattttggagacttaaaaccaggttaatggctaagaatgggtaacatgactcttgttggattgttattttttgtttgcaatggggaatttataagaagcatcaagtctctttcttaccaaagtcttgttaggtggtttatagttcttttggctaacaaatcattttggaaataaagattttttactacaaaaatgaaatttgtttggacttccacttgagacagtaaagagagtattagacacccagtaaaaactgccatataaagaa

SEQ ID NO: 186129 - DNA, 1869 bp, Homo sapiens
  Payload ID: 16652
  Gene Symbol: SPON2
  Gene Name: spondin 2, extracellular matrix protein
  Uniprot ID: Q9BUD6
  ENST ID: ENST00000290902
  CDS Start-End: 334-1329
gacagggaggggaggggagggataggacagacagacaaagaaaggggtgcggcagcactgccaggggaagagggtgatccgacccggggaaggtcgctgggcagggcgagttgggaaagcggcagcccccgccgcccccgcagccccttctcctcctttctcccacgtcctatctgcctctcgctggaggccaggccgtgcagcatcgaagacaggaggaactggagcctcattggccggcccggggcgccggcctcgggcttaaataggagctccgggctctggctgggacccgaccgctgccggccgcgctcccgctgctcctgccgggtgatggaaaaccccagcccggccgccgccctgggcaaggccctctgcgctctcctcctggccactctcggcgccgccggccagcctcttgggggagagtccatctgttccgccagagccctggccaaatacagcatcaccttcacgggcaagtggagccagacggccttccccaagcagtaccccctgttccgcccccctgcgcagtggtcttcgctgctgggggccgcgcatagctccgactacagcatgtggaggaagaaccagtacgtcagtaacgggctgcgcgactttgcggagcgcggcgaggcctgggcgctgatgaaggagatcgaggcggcgggggaggcgctgcagagcgtgcacgcggtgttttcggcgcccgccgtccccagcggcaccgggcagacgtcggcggagctggaggtgcagcgcaggcactcgctggtctcgtttgtggtgcgcatcgtgcccagccccgactggttcgtgggcgtggacagcctggacctgtgcgacggggaccgttggcgggaacaggcggcgctggacctgtacccctacgacgccgggacggacagcggcttcaccttctcctcccccaacttcgccaccatcccgcaggacacggtgaccgagataacgtcctcctctcccagccacccggccaactccttctactacccgcggctgaaggccctgcctcccatcgccagggtgacactggtgcggctgcgacagagccccagggccttcatccctcccgccccagtcctgcccagcagggacaatgagattgtagacagcgcctcagttccagaaacgccgctggactgcgaggtctccctgtggtcgtcctggggactgtgcggaggccactgtgggaggctcgggaccaagagcaggactcgctacgtccgggtccagcccgccaacaacgggagcccctgccccgagctcgaagaagaggctgagtgcgtccctgataactgcgtctaagaccagagccccgcagcccctggggccccccggagccatggggtgtcgggggctcctgtgcaggctcatgctgcaggcggccgagggcacagggggtttcgcgctgctcctgaccgcggtgaggccgcgccgaccatctctgcactgaagggccctctggtggccggcacgggcattgggaaacagcctcctcctttcccaaccttgcttcttaggggcccccgtgtcccgtctgctctcagcctcctcctcctgcaggataaagtcatccccaaggctccagctactctaaattatgtctccttataagttattgctgctccaggagattgtccttcatcgtccaggggcctggctcccacgtggttgcagatacctcagacctggtgctctaggctgtgctgagcccactctcccgagggcgcatccaagcgggggccacttgagaagtgaataaatggggcggtttcggaagcgtcagtgtttccatgttatggatctctctgcgtttgaataaagactatctctgttgctcacaaa

SEQ ID NO: 186130 - DNA, 1802 bp, Homo sapiens
  Payload ID: 16652
  Gene Symbol: SPON2
  Gene Name: spondin 2, extracellular matrix protein
  Uniprot ID: Q9BUD6
  ENST ID: ENST00000431380
  CDS Start-End: 272-1267
gatgcctgcgccgggagccaggagcttccccagccacttccagcatgtagactgaagtcaggccacgcacagggctctccaggtcacaccctgcgcaagaaggtgtagcacgctggctctaatttcgagaaggccgtgcagcatcgaagacaggaggaactggagcctcattggccggcccggggcgccggcctcgggcttaaataggagctccgggctctggctgggacccgaccgctgccggccgcgctcccgctgctcctgccgggtgatggaaaaccccagcccggccgccgccctgggcaaggccctctgcgctctcctcctggccactctcggcgccgccggccagcctcttgggggagagtccatctgttccgccagagccctggccaaatacagcatcaccttcacgggcaagtggagccagacggccttccccaagcagtaccccctgttccgcccccctgcgcagtggtcttcgctgctgggggccgcgcatagctccgactacagcatgtggaggaagaaccagtacgtcagtaacgggctgcgcgactttgcggagcgcggcgaggcctgggcgctgatgaaggagatcgaggcggcgggggaggcgctgcagagcgtgcacgcggtgttttcggcgcccgccgtccccagcggcaccgggcagacgtcggcggagctggaggtgcagcgcaggcactcgctggtctcgtttgtggtgcgcatcgtgcccagccccgactggttcgtgggcgtggacagcctggacctgtgcgacggggaccgttggcgggaacaggcggcgctggacctgtacccctacgacgccgggacggacagcggcttcaccttctcctcccccaacttcgccaccatcccgcaggacacggtgaccgagataacgtcctcctctcccagccacccggccaactccttctactacccgcggctgaaggccctgcctcccatcgccagggtgacactggtgcggctgcgacagagccccagggccttcatccctcccgccccagtcctgcccagcagggacaatgagattgtagacagcgcctcagttccagaaacgccgctggactgcgaggtctccctgtggtcgtcctggggactgtgcggaggccactgtgggaggctcgggaccaagagcaggactcgctacgtccgggtccagcccgccaacaacgggagcccctgccccgagctcgaagaagaggctgagtgcgtccctgataactgcgtctaagaccagagccccgcagcccctggggccccccggagccatggggtgtcgggggctcctgtgcaggctcatgctgcaggcggccgagggcacagggggtttcgcgctgctcctgaccgcggtgaggccgcgccgaccatctctgcactgaagggccctctggtggccggcacgggcattgggaaacagcctcctcctttcccaaccttgcttcttaggggcccccgtgtcccgtctgctctcagcctcctcctcctgcaggataaagtcatccccaaggctccagctactctaaattatgtctccttataagttattgctgctccaggagattgtccttcatcgtccaggggcctggctcccacgtggttgcagatacctcagacctggtgctctaggctgtgctgagcccactctcccgagggcgcatccaagcgggggccacttgagaagtgaataaatggggcggtttcggaagcgtcagtgtttccatgttatggatctctctgcgtttgaataaagactatctctgttgctc

SEQ ID NO: 186131 - DNA, 549 bp, Homo sapiens
  Payload ID: 16652
  Gene Symbol: SPON2
  Gene Name: spondin 2, extracellular matrix protein
  ENST ID: ENST00000509233
  CDS Start-End: 500-549
agagaaacccaagagcagctgcatgagccctcccaggcctacccccgcagccggcactccctgcagcaaagaaaaccatctggccactgggccctgagcccggcgcccggaggaggacctctgccccgctgagcagctctgctccccaggctggccctgggcctctcgcggcctgacccgctccccttggcatcaagcaccaggagggacggggtggcccggccagggcgtgggtgttccccggcccctctgagcaccagcacctgtttcctcactgcttggaggaagatgagaattctcagaggtccttatgctgccctttttgctgcagtcttgacatcttaacgtggatagaaaaaggccgtgcagcatcgaagacaggaggaactggagcctcattggccggcccggggcgccggcctcgggcttaaataggagctccgggctctggctgggacccgaccgctgccggccgcgctcccgctgctcctgccgggtgatggaaaaccccagcccggccgccgccctgggcaaggccctctgcgctct

SEQ ID NO: 186132 - DNA, 307 bp, Homo sapiens
  Payload ID: 16652
  Gene Symbol: SPON2
  Gene Name: spondin 2, extracellular matrix protein
  ENST ID: ENST00000514490
  CDS Start-End: 236-307
agcatgtagactgaagtcaggccacgcacagggctctccaggtcacaccctgcgcaagaaggtgtagcacgctggctctaatttcgagaaggccaggccgtgcagcatcgaagacaggaggaactggagcctcattggccggcccggggcgccggcctcgggcttaaataggagctccgggctctggctgggacccgaccgctgccggccgcgctcccgctgctcctgccgggtgatggaaaaccccagcccggccgccgccctgggcaaggccctctgcgctctcctcctggccactctcggcgcc

SEQ ID NO: 186133 - DNA, 557 bp, Homo sapiens
  Payload ID: 16652
  Gene Symbol: SPON2
  Gene Name: spondin 2, extracellular matrix protein
  ENST ID: ENST00000511672
  CDS Start-End: 535-557
aagagccccgggaagagctgcatgcacacggctggagagaggctctgcacccgagcacagcctgctgcgactcctcatagacccggaaaactgattagaaggcagagggcctcctccctccctgcgtggtttgggggctgttcctgatagcacagatgccctgatcacaaacacctgcctgcattgctgaccacaggcctggcctggagaaacccacagcctcttcagggaagcgagcaaggggcttggaagtgcctgaagccagtgggctggggactcacggccgggacactcagggcagtttcctcactgcttggaggaagatgagaattctcagaggtccttatgctgccctttttgctgcagtcttgacatcttaacgtggatagaaaaaggccgtgcagcatcgaagacaggaggaactggagcctcattggccggcccggggcgccggcctcgggcttaaataggagctccgggctctggctgggacccgaccgctgccggccgcgctcccgctgctcctgccgggtgatggaaaaccccagcccggccgc

SEQ ID NO: 186134 - DNA, 571 bp, Homo sapiens
  Payload ID: 16652
  Gene Symbol: SPON2
  Gene Name: spondin 2, extracellular matrix protein
  ENST ID: ENST00000502483
  CDS Start-End: 389-571
gagccctgagccgccggctgcggggttggagccgccggctgcggggttggagccgccggctgcggggttggagacgccggctgcggggttggagccgccggctgcggggttggagccgccggctgcggggttggaaccgccggctgtgagtttcctcactgcttggaggaagatgagaattctcagaggtccttatgctgccctttttgctgcagtcttgacatcttaacgtggatagaaaaaggccaggccgtgcagcatcgaagacaggaggaactggagcctcattggccggcccggggcgccggcctcgggcttaaataggagctccgggctctggctgggacccgaccgctgccggccgcgctcccgctgctcctgccgggtgatggaaaaccccagcccggccgccgccctgggcaaggccctctgcgctctcctcctggccactctcggcgccgccggccagcctcttgggggagagtccatctgttccgccagagccctggccaaatacagcatcaccttcacgggcaagtggagccagacggccttccccaagcagtacccc

SEQ ID NO: 186135 - DNA, 556 bp, Homo sapiens
  Payload ID: 16652
  Gene Symbol: SPON2
  Gene Name: spondin 2, extracellular matrix protein
  ENST ID: ENST00000511679
  CDS Start-End: 510-556
gtgtgtttgtgaactggcgatgtgatcgagggcacgggtgctgggcttccccctcatgggtaaaaccagagctactgtatgccagccgtggaggcatggacggcccctgagctcggacagcagacggacagaccgttgacgcgttggcaccgtggccagagtccgttcaagaaaggtcggcagagagggctgagaacgcggcaggcacatcctccaagggccctgctggaacccctggagcaggaggaagcggtgattctccaggccttggtttcctcactgcttggaggaagatgagaattctcagaggtccttatgctgccctttttgctgcagtcttgacatcttaacgtggatagaaaaaggccaggccgtgcagcatcgaagacaggaggaactggagcctcattggccggcccggggcgccggcctcgggcttaaataggagctccgggctctggctgggacccgaccgctgccggccgcgctcccgctgctcctgccgggtgatggaaaaccccagcccggccgccgccctgggcaaggccctctgcgc

SEQ ID NO: 186136 - DNA, 597 bp, Homo sapiens
  Payload ID: 16652
  Gene Symbol: SPON2
  Gene Name: spondin 2, extracellular matrix protein
  ENST ID: ENST00000503765
  CDS Start-End: 272-597
gatgcctgcgccgggagccaggagcttccccagccacttccagcatgtagactgaagtcaggccacgcacagggctctccaggtcacaccctgcgcaagaaggtgtagcacgctggctctaatttcgagaaggccgtgcagcatcgaagacaggaggaactggagcctcattggccggcccggggcgccggcctcgggcttaaataggagctccgggctctggctgggacccgaccgctgccggccgcgctcccgctgctcctgccgggtgatggaaaaccccagcccggccgccgccctgggcaaggccctctgcgctctcctcctggccactctcggcgccgccggccagcctcttgggggagagtccatctgttccgccagagccctggccaaatacagcatcaccttcacgggcaagtggagccagacggccttccccaagcagtaccccctgttccgcccccctgcgcagtggtcttcgctgctgggggccgcgcatagctccgactacagcatgtggaggaagaaccagtacgtcagtaacgggctgcgcgactttgcggagcgcggcgaggcctgggcgctgatgaagga

SEQ ID NO: 186137 - DNA, 571 bp, Homo sapiens
  Payload ID: 16652
  Gene Symbol: SPON2
  Gene Name: spondin 2, extracellular matrix protein
  ENST ID: ENST00000515004
  CDS Start-End: 379-571
ctgagccgccggctgcggggttggagccgccggctgcggggttggagccgccggctgcggggttggagacgccggctgcggggttggagccgccggctgcggggttggagccgccggctgcggggttggaaccgccggctgtgagtttcctcactgcttggaggaagatgagaattctcagaggtccttatgctgccctttttgctgcagtcttgacatcttaacgtggatagaaaaaggccgtgcagcatcgaagacaggaggaactggagcctcattggccggcccggggcgccggcctcgggcttaaataggagctccgggctctggctgggacccgaccgctgccggccgcgctcccgctgctcctgccgggtgatggaaaaccccagcccggccgccgccctgggcaaggccctctgcgctctcctcctggccactctcggcgccgccggccagcctcttgggggagagtccatctgttccgccagagccctggccaaatacagcatcaccttcacgggcaagtggagccagacggccttccccaagcagtaccccctgttccgcc

SEQ ID NO: 186138 - DNA, 2156 bp, Homo sapiens
  Payload ID: 16652
  Gene Symbol: SPON2
  Gene Name: spondin 2, extracellular matrix protein
  Uniprot ID: Q9BUD6
  ENST ID: ENST00000617421
  CDS Start-End: 626-1621
ggttctgacactgagggctccggggcaggggcagggcccgctggcttggcgtgcgcgtgcgtgcacaggtgtgtgggtgtctgcctggtgggcgggcggcgtgtgcgtgtgcgcatgtgtgtttgtgaactggcgatgtgatcgagggcacgggtgctgggcttccccctcatgggtaaaaccagagctactgtatgccagccgtggaggcatggacggcccctgagctcggacagcagacggacagaccgttgacgcgttggcaccgtggccagagtccgttcaagaaaggtcggcagagagggctgagaacgcggcaggcacatcctccaagggccctgctggaacccctggagcaggaggaagcggtgattctccaggccttggtttcctcactgcttggaggaagatgagaattctcagaggtccttatgctgccctttttgctgcagtcttgacatcttaacgtggatagaaaaaggccaggccgtgcagcatcgaagacaggaggaactggagcctcattggccggcccggggcgccggcctcgggcttaaataggagctccgggctctggctgggacccgaccgctgccggccgcgctcccgctgctcctgccgggtgatggaaaaccccagcccggccgccgccctgggcaaggccctctgcgctctcctcctggccactctcggcgccgccggccagcctcttgggggagagtccatctgttccgccagagccctggccaaatacagcatcaccttcacgggcaagtggagccagacggccttccccaagcagtaccccctgttccgcccccctgcgcagtggtcttcgctgctgggggccgcgcatagctccgactacagcatgtggaggaagaaccagtacgtcagtaacgggctgcgcgactttgcggagcgcggcgaggcctgggcgctgatgaaggagatcgaggcggcgggggaggcgctgcagagcgtgcacgcggtgttttcggcgcccgccgtccccagcggcaccgggcagacgtcggcggagctggaggtgcagcgcaggcactcgctggtctcgtttgtggtgcgcatcgtgcccagccccgactggttcgtgggcgtggacagcctggacctgtgcgacggggaccgttggcgggaacaggcggcgctggacctgtacccctacgacgccgggacggacagcggcttcaccttctcctcccccaacttcgccaccatcccgcaggacacggtgaccgagataacgtcctcctctcccagccacccggccaactccttctactacccgcggctgaaggccctgcctcccatcgccagggtgacactggtgcggctgcgacagagccccagggccttcatccctcccgccccagtcctgcccagcagggacaatgagattgtagacagcgcctcagttccagaaacgccgctggactgcgaggtctccctgtggtcgtcctggggactgtgcggaggccactgtgggaggctcgggaccaagagcaggactcgctacgtccgggtccagcccgccaacaacgggagcccctgccccgagctcgaagaagaggctgagtgcgtccctgataactgcgtctaagaccagagccccgcagcccctggggccccccggagccatggggtgtcgggggctcctgtgcaggctcatgctgcaggcggccgagggcacagggggtttcgcgctgctcctgaccgcggtgaggccgcgccgaccatctctgcactgaagggccctctggtggccggcacgggcattgggaaacagcctcctcctttcccaaccttgcttcttaggggcccccgtgtcccgtctgctctcagcctcctcctcctgcaggataaagtcatccccaaggctccagctactctaaattatgtctccttataagttattgctgctccaggagattgtccttcatcgtccaggggcctggctcccacgtggttgcagatacctcagacctggtgctctaggctgtgctgagcccactctcccgagggcgcatccaagcgggggccacttgagaagtgaataaatggggcggtttcggaagcgtcagtgtttccatgttatggatctctctgcgtttgaataaagactatctctgttgctc

SEQ ID NO: 186139 - DNA, 2348 bp, Homo sapiens
  Payload ID: 16653
  Gene Symbol: SPRY1
  Gene Name: sprouty RTK signaling antagonist 1
  Uniprot ID: O43609
  ENST ID: ENST00000339241
  CDS Start-End: 188-1147
ggagtgagaccgctctgcaaaccactgcgtgctttgcagagtgattatcagcacagttccctgccctggataaggaacagctacagtcgctgttaaatgtgcctgaaaagcaatttgcaatctttgcattaggatttcagatgcatgccaggtttccactgattgccagaactcgagatcactacacatggatccccaaaatcaacatggcagtggcagttcgttagttgtgatccagcagccttctttggatagccgtcagagattagactatgagagagagattcagcctactgctattttgtccttagaccagatcaaggccataagaggcagcaatgaatacacagaagggccttcggtggtgaaaagacctgctcctcggacagcaccaagacaagaaaagcatgaaaggactcatgaaatcataccaattaatgtgaataataactacgagcacagacacacaagccacctgggacatgcagtactcccaagtaatgccaggggccccattttgagcagatcaaccagcactggaagtgcagccagctctgggagcaacagcagtgcctcttctgaacagggactgttaggaaggtcaccaccaaccagaccagtccctggtcataggtctgaaagggcaatccggacccagcccaagcaactgattgtggatgacttgaagggttccttgaaagaggacctgacacagcacaagttcatttgtgaacagtgtgggaagtgcaagtgtggagaatgcactgctcccaggaccctaccatcctgtttggcctgtaaccggcagtgcctttgctctgctgagagcatggtggaatatggaacctgcatgtgcttagtcaagggcatcttctaccactgctccaatgacgacgaaggggattcctattcagataatccttgctcctgttcacaatcacactgctgctctagatacctgtgtatgggagccatgtctttatttttaccttgcttactctgttatcctcctgctaaaggatgcctgaagctgtgcaggaggtgttatgactggatccatcgcccagggtgcagatgtaagaactccaacactgtctattgtaagctggagagctgcccctcccggggtcagggtaaaccatcatgatttttggaggtgggttgtacctcctgaacttttagctttcaagttgtggctgttttttgtttttgtttttgtttttgttttctttagaatttttccctgtttcccaccttctcttcccctgttgccaaggtctaactcatggatttttctctttcctcatggatgatcttcagcaagagtggactgggaagctgcacctggctcccactttcaacaagagcctctgccatccacttgagggtattgagagccagtgggcttttgtgtagcctttttgttctgcaagcaactttctaaagttgtgtacatgaacatacacccacatccagactacagtgatttagagttgttttgattgggtaccgtgggagcagggaaattggttttttaaaaagcaactgtttaattgcttaaataagctatgtattaaatctgtctccagttagggctatcttcctagcataggccccttaagtagcatgggggatatattttttgctataacgtaaaaattttcctttaaccactgccctctccttctttctccttcaaggttctttccccctcagttttgttgttgtcttactctggagatgccaagtgtattttttctttctatgtaattttagattcgccttacaatgtaaatcttcacattggagataatattggttggaccttgcccatcttcactctagccttcgtatttgtgaaggactcagccaccttccttcttcaccccatgcttctcaccaaatttttgttgtcattgagggcacttggataactcaagttgatatttatagctgatcaatctatatgtgtcacagaactatgctgcctaaagtgatcttggctccttaatggtccttttggccccttggatagttaacagctgagtaattctaatctcttctgtgttttccttgccttaaccacaaattgtggtgctttttgtatattttatgtataaatcacaaagttgaattctgactatttttaagacaaaagtctgttaaacttttttattgtaaagaatatttattatgcgaatctctattattttatggtatttattgcaaaagactgttgaaatgtactcatgtttgaatataacaaaatatcaatacttaacggaaaataaggtgacacgaagaaagtacatatgttaactataatgcagaaaatatattaattaatg

SEQ ID NO: 186140 - DNA, 2504 bp, Homo sapiens
  Payload ID: 16653
  Gene Symbol: SPRY1
  Gene Name: sprouty RTK signaling antagonist 1
  Uniprot ID: O43609
  ENST ID: ENST00000394339
  CDS Start-End: 341-1300
tatttattcagtgcggattgcagagggcgcagctccaccgtggtaacttgcaatgtggccgcccctgcgctggcttctttctcctcggccctcggtgaacccagcttttcctttaaagcatagacaaatccttgcttagggtcagccagaccgtgggcttgctttgggctcccgcgtggacgctgaaggctcttcatgatttctcagaaaccttggtgggccacccaaaaagtgtgttggaaatccacggtgatccttaatatggtgatgggattgtccgaaaaggatttcagatgcatgccaggtttccactgattgccagaactcgagatcactacacatggatccccaaaatcaacatggcagtggcagttcgttagttgtgatccagcagccttctttggatagccgtcagagattagactatgagagagagattcagcctactgctattttgtccttagaccagatcaaggccataagaggcagcaatgaatacacagaagggccttcggtggtgaaaagacctgctcctcggacagcaccaagacaagaaaagcatgaaaggactcatgaaatcataccaattaatgtgaataataactacgagcacagacacacaagccacctgggacatgcagtactcccaagtaatgccaggggccccattttgagcagatcaaccagcactggaagtgcagccagctctgggagcaacagcagtgcctcttctgaacagggactgttaggaaggtcaccaccaaccagaccagtccctggtcataggtctgaaagggcaatccggacccagcccaagcaactgattgtggatgacttgaagggttccttgaaagaggacctgacacagcacaagttcatttgtgaacagtgtgggaagtgcaagtgtggagaatgcactgctcccaggaccctaccatcctgtttggcctgtaaccggcagtgcctttgctctgctgagagcatggtggaatatggaacctgcatgtgcttagtcaagggcatcttctaccactgctccaatgacgacgaaggggattcctattcagataatccttgctcctgttcacaatcacactgctgctctagatacctgtgtatgggagccatgtctttatttttaccttgcttactctgttatcctcctgctaaaggatgcctgaagctgtgcaggaggtgttatgactggatccatcgcccagggtgcagatgtaagaactccaacactgtctattgtaagctggagagctgcccctcccggggtcagggtaaaccatcatgatttttggaggtgggttgtacctcctgaacttttagctttcaagttgtggctgttttttgtttttgtttttgtttttgttttctttagaatttttccctgtttcccaccttctcttcccctgttgccaaggtctaactcatggatttttctctttcctcatggatgatcttcagcaagagtggactgggaagctgcacctggctcccactttcaacaagagcctctgccatccacttgagggtattgagagccagtgggcttttgtgtagcctttttgttctgcaagcaactttctaaagttgtgtacatgaacatacacccacatccagactacagtgatttagagttgttttgattgggtaccgtgggagcagggaaattggttttttaaaaagcaactgtttaattgcttaaataagctatgtattaaatctgtctccagttagggctatcttcctagcataggccccttaagtagcatgggggatatattttttgctataacgtaaaaattttcctttaaccactgccctctccttctttctccttcaaggttctttccccctcagttttgttgttgtcttactctggagatgccaagtgtattttttctttctatgtaattttagattcgccttacaatgtaaatcttcacattggagataatattggttggaccttgcccatcttcactctagccttcgtatttgtgaaggactcagccaccttccttcttcaccccatgcttctcaccaaatttttgttgtcattgagggcacttggataactcaagttgatatttatagctgatcaatctatatgtgtcacagaactatgctgcctaaagtgatcttggctccttaatggtccttttggccccttggatagttaacagctgagtaattctaatctcttctgtgttttccttgccttaaccacaaattgtggtgctttttgtatattttatgtataaatcacaaagttgaattctgactatttttaagacaaaagtctgttaaacttttttattgtaaagaatatttattatgcgaatctctattattttatggtatttattgcaaaagactgttgaaatgtactcatgtttgaatataacaaaatatcaatacttaacggaaaataaggtgacacgaagaaagtacatatgttaactataatgcagaaaatatattaattaatgaaa

SEQ ID NO: 186141 - DNA, 1012 bp, Homo sapiens
  Payload ID: 16653
  Gene Symbol: SPRY1
  Gene Name: sprouty RTK signaling antagonist 1
  ENST ID: ENST00000507703
  CDS Start-End: 385-1012
ttgtaaaaactggttcttggaaaggggctgcagaagacctcccgaggtggatgttactgagccgcccggcgagcaccagccgtgacaggtccgggcccggccgcgcggagccgcgggagaactgccctccgcagccggaagggggccgcggggagcgctcctggccggtggcggcgggggcgggggaggccgcgagccgaggcgctccaactccggcgatgccgcctcgccctccccgccgcggttgatgcggcacgtgcacgccgccgcccgcaccaggacctgggccgggtcgcacggcttggcccccggccaccgcttcggcctaggatttcagatgcatgccaggtttccactgattgccagaactcgagatcactacacatggatccccaaaatcaacatggcagtggcagttcgttagttgtgatccagcagccttctttggatagccgtcagagattagactatgagagagagattcagcctactgctattttgtccttagaccagatcaaggccataagaggcagcaatgaatacacagaagggccttcggtggtgaaaagacctgctcctcggacagcaccaagacaagaaaagcatgaaaggactcatgaaatcataccaattaatgtgaataataactacgagcacagacacacaagccacctgggacatgcagtactcccaagtaatgccaggggccccattttgagcagatcaaccagcactggaagtgcagccagctctgggagcaacagcagtgcctcttctgaacagggactgttaggaaggtcaccaccaaccagaccagtccctggtcataggtctgaaagggcaatccggacccagcccaagcaactgattgtggatgacttgaagggttccttgaaagaggacctgacacagcacaagttcatttgtgaacagtgtgggaagtgcaagtgtggagaatgcactgctcccaggaccctaccatcctgtttggcctgtaaccggcagtgccttt

SEQ ID NO: 186142 - DNA, 641 bp, Homo sapiens
  Payload ID: 16653
  Gene Symbol: SPRY1
  Gene Name: sprouty RTK signaling antagonist 1
  ENST ID: ENST00000505319
  CDS Start-End: 440-641
gtagccggagtgagaccgctctgcaaaccactgcgtgctttgcagagtgattatcagcacagttccctgccctggataaggaacagctacagtcgctgttaaatgtgcctgaaaagcaatttgcaatctttgcattaggcatttcggccgtggaaccccaggctcggaggactgggtgtgagcgctgcccgggagaggctgacctgccgggaccggagtgcccggggacgctgtgcccccacttgcccaacgtgcggaatcggctaagcgcgtcggcctgcgcggggcacaagggacgacgcccgcctttctctctccgagaaggatccccaaacctcactctcttcactcctccccgctaaaaaaaaaaaaaaaaagaaaagggatttcagatgcatgccaggtttccactgattgccagaactcgagatcactacacatggatccccaaaatcaacatggcagtggcagttcgttagttgtgatccagcagccttctttggatagccgtcagagattagactatgagagagagattcagcctactgctattttgtccttagaccagatcaaggccataagaggcagcaatgaatacacagaagggccttcggtggtgaaaagacctgctcctcggacag

SEQ ID NO: 186143 - DNA, 573 bp, Homo sapiens
  Payload ID: 16653
  Gene Symbol: SPRY1
  Gene Name: sprouty RTK signaling antagonist 1
  ENST ID: ENST00000508849
  CDS Start-End: 469-573
agtatgaagtttgttacaactatcattggaaatgcaaattgaagttgtgcctggtgttatgggttacactattcaaatcctctgcggttttgtgaatctggcttagtacttttagctaccttttgctttgaaagcactgagttaagaagttcttgaagaagaggaataattgtgcaggagtcaggattagatgttgaggactccgagactaaatccccgcaggttatgaatgtgttactcctcatgcgcaaagaaggtagaataaagtagaaactcgagagagctgagttgtgaaaacgagggggagctccaagaagttaacatgtaagacatagtttagagacattagtttaggaaatataggaaatggacttctttctgcgttgttccttaaaccatgttttttgcctcaggatttcagatgcatgccaggtttccactgattgccagaactcgagatcactacacatggatccccaaaatcaacatggcagtggcagttcgttagttgtgatccagcagccttctttggatagccgtcagagattagactatgagagagagattcagcct

SEQ ID NO: 186144 - DNA, 2352 bp, Homo sapiens
  Payload ID: 16653
  Gene Symbol: SPRY1
  Gene Name: sprouty RTK signaling antagonist 1
  Uniprot ID: O43609
  ENST ID: ENST00000622283
  CDS Start-End: 184-1143
gcgctccaactccggcgatgccgcctcgccctccccgccgcggttgatgcggcacgtgcacgccgccgcccgcaccaggacctgggccgggtcgcacggcttggcccccggccaccgcttcggcctaggatttcagatgcatgccaggtttccactgattgccagaactcgagatcactacacatggatccccaaaatcaacatggcagtggcagttcgttagttgtgatccagcagccttctttggatagccgtcagagattagactatgagagagagattcagcctactgctattttgtccttagaccagatcaaggccataagaggcagcaatgaatacacagaagggccttcggtggtgaaaagacctgctcctcggacagcaccaagacaagaaaagcatgaaaggactcatgaaatcataccaattaatgtgaataataactacgagcacagacacacaagccacctgggacatgcagtactcccaagtaatgccaggggccccattttgagcagatcaaccagcactggaagtgcagccagctctgggagcaacagcagtgcctcttctgaacagggactgttaggaaggtcaccaccaaccagaccagtccctggtcataggtctgaaagggcaatccggacccagcccaagcaactgattgtggatgacttgaagggttccttgaaagaggacctgacacagcacaagttcatttgtgaacagtgtgggaagtgcaagtgtggagaatgcactgctcccaggaccctaccatcctgtttggcctgtaaccggcagtgcctttgctctgctgagagcatggtggaatatggaacctgcatgtgcttagtcaagggcatcttctaccactgctccaatgacgacgaaggggattcctattcagataatccttgctcctgttcacaatcacactgctgctctagatacctgtgtatgggagccatgtctttatttttaccttgcttactctgttatcctcctgctaaaggatgcctgaagctgtgcaggaggtgttatgactggatccatcgcccagggtgcagatgtaagaactccaacactgtctattgtaagctggagagctgcccctcccggggtcagggtaaaccatcatgatttttggaggtgggttgtacctcctgaacttttagctttcaagttgtggctgttttttgtttttgtttttgtttttgttttctttagaatttttccctgtttcccaccttctcttcccctgttgccaaggtctaactcatggatttttctctttcctcatggatgatcttcagcaagagtggactgggaagctgcacctggctcccactttcaacaagagcctctgccatccacttgagggtattgagagccagtgggcttttgtgtagcctttttgttctgcaagcaactttctaaagttgtgtacatgaacatacacccacatccagactacagtgatttagagttgttttgattgggtaccgtgggagcagggaaattggttttttaaaaagcaactgtttaattgcttaaataagctatgtattaaatctgtctccagttagggctatcttcctagcataggccccttaagtagcatgggggatatattttttgctataacgtaaaaattttcctttaaccactgccctctccttctttctccttcaaggttctttccccctcagttttgttgttgtcttactctggagatgccaagtgtattttttctttctatgtaattttagattcgccttacaatgtaaatcttcacattggagataatattggttggaccttgcccatcttcactctagccttcgtatttgtgaaggactcagccaccttccttcttcaccccatgcttctcaccaaatttttgttgtcattgagggcacttggataactcaagttgatatttatagctgatcaatctatatgtgtcacagaactatgctgcctaaagtgatcttggctccttaatggtccttttggccccttggatagttaacagctgagtaattctaatctcttctgtgttttccttgccttaaccacaaattgtggtgctttttgtatattttatgtataaatcacaaagttgaattctgactatttttaagacaaaagtctgttaaacttttttattgtaaagaatatttattatgcgaatctctattattttatggtatttattgcaaaagactgttgaaatgtactcatgtttgaatataacaaaatatcaatacttaacggaaaataaggtgacacgaagaaagtacatatgttaactataatgcagaaaatatattaattaatgaaactgtc

SEQ ID NO: 186145 - DNA, 2608 bp, Homo sapiens
  Payload ID: 16653
  Gene Symbol: SPRY1
  Gene Name: sprouty RTK signaling antagonist 1
  Uniprot ID: O43609
  ENST ID: ENST00000610581
  CDS Start-End: 440-1399
gtagccggagtgagaccgctctgcaaaccactgcgtgctttgcagagtgattatcagcacagttccctgccctggataaggaacagctacagtcgctgttaaatgtgcctgaaaagcaatttgcaatctttgcattaggcatttcggccgtggaaccccaggctcggaggactgggtgtgagcgctgcccgggagaggctgacctgccgggaccggagtgcccggggacgctgtgcccccacttgcccaacgtgcggaatcggctaagcgcgtcggcctgcgcggggcacaagggacgacgcccgcctttctctctccgagaaggatccccaaacctcactctcttcactcctccccgctaaaaaaaaaaaaaaaaagaaaagggatttcagatgcatgccaggtttccactgattgccagaactcgagatcactacacatggatccccaaaatcaacatggcagtggcagttcgttagttgtgatccagcagccttctttggatagccgtcagagattagactatgagagagagattcagcctactgctattttgtccttagaccagatcaaggccataagaggcagcaatgaatacacagaagggccttcggtggtgaaaagacctgctcctcggacagcaccaagacaagaaaagcatgaaaggactcatgaaatcataccaattaatgtgaataataactacgagcacagacacacaagccacctgggacatgcagtactcccaagtaatgccaggggccccattttgagcagatcaaccagcactggaagtgcagccagctctgggagcaacagcagtgcctcttctgaacagggactgttaggaaggtcaccaccaaccagaccagtccctggtcataggtctgaaagggcaatccggacccagcccaagcaactgattgtggatgacttgaagggttccttgaaagaggacctgacacagcacaagttcatttgtgaacagtgtgggaagtgcaagtgtggagaatgcactgctcccaggaccctaccatcctgtttggcctgtaaccggcagtgcctttgctctgctgagagcatggtggaatatggaacctgcatgtgcttagtcaagggcatcttctaccactgctccaatgacgacgaaggggattcctattcagataatccttgctcctgttcacaatcacactgctgctctagatacctgtgtatgggagccatgtctttatttttaccttgcttactctgttatcctcctgctaaaggatgcctgaagctgtgcaggaggtgttatgactggatccatcgcccagggtgcagatgtaagaactccaacactgtctattgtaagctggagagctgcccctcccggggtcagggtaaaccatcatgatttttggaggtgggttgtacctcctgaacttttagctttcaagttgtggctgttttttgtttttgtttttgtttttgttttctttagaatttttccctgtttcccaccttctcttcccctgttgccaaggtctaactcatggatttttctctttcctcatggatgatcttcagcaagagtggactgggaagctgcacctggctcccactttcaacaagagcctctgccatccacttgagggtattgagagccagtgggcttttgtgtagcctttttgttctgcaagcaactttctaaagttgtgtacatgaacatacacccacatccagactacagtgatttagagttgttttgattgggtaccgtgggagcagggaaattggttttttaaaaagcaactgtttaattgcttaaataagctatgtattaaatctgtctccagttagggctatcttcctagcataggccccttaagtagcatgggggatatattttttgctataacgtaaaaattttcctttaaccactgccctctccttctttctccttcaaggttctttccccctcagttttgttgttgtcttactctggagatgccaagtgtattttttctttctatgtaattttagattcgccttacaatgtaaatcttcacattggagataatattggttggaccttgcccatcttcactctagccttcgtatttgtgaaggactcagccaccttccttcttcaccccatgcttctcaccaaatttttgttgtcattgagggcacttggataactcaagttgatatttatagctgatcaatctatatgtgtcacagaactatgctgcctaaagtgatcttggctccttaatggtccttttggccccttggatagttaacagctgagtaattctaatctcttctgtgttttccttgccttaaccacaaattgtggtgctttttgtatattttatgtataaatcacaaagttgaattctgactatttttaagacaaaagtctgttaaacttttttattgtaaagaatatttattatgcgaatctctattattttatggtatttattgcaaaagactgttgaaatgtactcatgtttgaatataacaaaatatcaatacttaacggaaaataaggtgacacgaagaaagtacatatgttaactataatgcagaaaatatattaattaatgaaactgtc

SEQ ID NO: 186146 - DNA, 2708 bp, Homo sapiens
  Payload ID: 16654
  Gene Symbol: SPRY2
  Gene Name: sprouty RTK signaling antagonist 2
  Uniprot ID: O43597
  ENST ID: ENST00000377102
  CDS Start-End: 979-1926
ggggggactgggaaagagaagaggggcggaggtagggagtccagctttgaagaaggaggccagggatcggatcggcagaaatcacttaaaaaataaaaacaaaaaagcccccttttatttcaaagatgctactttgactgcaagcaaatctgcaccgaaagtttacagctccgggagctgggtcctgcgcgcccggagtgagcagtgggaccctggaaaatgccctttttttaaaaagccatttttctttcactttaagaaatatgatatcttttttttttctctcgacccaaaaggagataggcgtgtgcagattacaggcaatgcccccttcggtcagtgcagcgtggagtcgccgtgtgtgcgtgggttggacttgtgcgtcctggctgcgtgtctcaggcagggctttcgtgctcgcagtgtcggggtgggaaacctgtgccggatgtccgaggggctttgcagaaagcctggcagtgggcggcgtgacctctgcctgggggcggagtggctccttggggctggaaggcagttctcttgagttgggggagatcttagctggggagagggaggcgggggaagtgtgctcctgcatttcgtgacacgtacccttcggaggcgcccgcggcccccgcctgtctgagtctggggatcgtaagcaggggggcagcctggcccatggacagcgtcagtccgcctggagaaactcccctggggatcggctgtgtcccacctgctggggacggtgttggggcacagagaggcgataaactaagtgaaagcaaagagcagcgttgtcttctgccattcttttggaggtgaggagatccggtttccagcactgccttgctccgaattgggagacgtttgtcacctgccttgttcgctgtggcctctattctaaagagcggagatcggataaaggagttcagatgtgttctaagcctgctggagtgaccacacttccaagacctgatggaggccagagctcagagtggcaacgggtcgcagcccttgctgcagacgccccgtgacggtggcagacagcgtggggagcccgaccccagagacgccctcacccagcaggtacatgtcttgtctctggatcagatcagagccatccgaaacaccaatgagtacacagaggggcctactgtcgtcccaagacctgggctcaagcctgctcctcgcccctccactcagcacaaacacgagagactccacggtctgcctgagcaccgccagcctcctaggctccagcactcgcaggtccattcttctgcacgagcccctctgtccagatccataagcacggtcagctcagggtcgcggagcagtacgaggacaagtaccagcagcagctcctctgaacagagactgctaggatcatccttctcctccgggcctgttgctgatggcataatccgggtgcaacccaaatctgagctcaagccaggtgagcttaagccactgagcaaggaagatttgggcctgcacgcctacaggtgtgaggactgtggcaagtgcaaatgtaaggagtgcacctacccaaggcctctgccatcagactggatctgcgacaagcagtgcctttgctcggcccagaacgtgattgactatgggacttgtgtatgctgtgtgaaaggtctcttctatcactgttctaatgatgatgaggacaactgtgctgacaacccatgttcttgcagccagtctcactgttgtacacgatggtcagccatgggtgtcatgtccctctttttgccttgtttatggtgttaccttccagccaagggttgccttaaattgtgccaggggtgttatgaccgggttaacaggcctggttgccgctgtaaaaactcaaacacagtttgctgcaaagttcccactgtcccccctaggaactttgaaaaaccaacatagcatcattaatcaggaatattacagtaatgaggattttttctttctttttttaatacacatatgcaaccaactaaacagttataatcttggcactgttaatagaaaggtgggatagtctttgctgtttgcggtgaaatgctttttgtccatgtgccgttttaactgatatgcttgttagaactcagctaatggagctcaaagtatgagatacagaacttggtgacccatgtattgcataagctaaagcaacacagacactcctaggcaaagtttttgtttgtgaatagtacttgcaaaacttgtaaattagcagatgacttttttccattgttttctccagagagaatgtgctatatttttgtatatacaataatatttgcaactgtgaaaaacaagttgtgccatactacatggcacagacacaaaatattatactaatatgttgtacattcggaagaatgtgaatcaatcagtatgtttttagattgtattttgccttacagaaagcctttattgtaagactctgatttccctttggacttcatgtatattgtacagttacagtaaaattcaacctttattttctaattttttcaacatattgtttagtgtaaagaatatttatttgaagttttattattttataaaaaagaatatttattttaagaggcatcttacaaattttgccccttttatgaggatgtgatagttgctgcaaatgaggggttacagatgcatatgtccaatataaaatagaaaatatattaacgtttgaaattaaa

SEQ ID NO: 186147 - DNA, 2111 bp, Homo sapiens
  Payload ID: 16654
  Gene Symbol: SPRY2
  Gene Name: sprouty RTK signaling antagonist 2
  Uniprot ID: O43597
  ENST ID: ENST00000377104
  CDS Start-End: 382-1329
gtaaggccgttttcttttcccattcgctcatctgccaggaaaagggacttgccgttggcgcttcggcctcttgttcattgagaaaaaagaggaaatactccgcgtgcgcttgtagaaggggagtcgtctccagctccgaaccccggagtgttcatcagcggggaatctggctccgaattctctttttttctcccgccgattgctcggaagttggtctaaagcagaggttggaaagaaaggaaaaaagtttgcatcgagactggatttatttgcacatcgcagaaagaagagaatccaagggagaggggttggtgcaaagccgcgatcacggagttcagatgtgttctaagcctgctggagtgaccacacttccaagacctgatggaggccagagctcagagtggcaacgggtcgcagcccttgctgcagacgccccgtgacggtggcagacagcgtggggagcccgaccccagagacgccctcacccagcaggtacatgtcttgtctctggatcagatcagagccatccgaaacaccaatgagtacacagaggggcctactgtcgtcccaagacctgggctcaagcctgctcctcgcccctccactcagcacaaacacgagagactccacggtctgcctgagcaccgccagcctcctaggctccagcactcgcaggtccattcttctgcacgagcccctctgtccagatccataagcacggtcagctcagggtcgcggagcagtacgaggacaagtaccagcagcagctcctctgaacagagactgctaggatcatccttctcctccgggcctgttgctgatggcataatccgggtgcaacccaaatctgagctcaagccaggtgagcttaagccactgagcaaggaagatttgggcctgcacgcctacaggtgtgaggactgtggcaagtgcaaatgtaaggagtgcacctacccaaggcctctgccatcagactggatctgcgacaagcagtgcctttgctcggcccagaacgtgattgactatgggacttgtgtatgctgtgtgaaaggtctcttctatcactgttctaatgatgatgaggacaactgtgctgacaacccatgttcttgcagccagtctcactgttgtacacgatggtcagccatgggtgtcatgtccctctttttgccttgtttatggtgttaccttccagccaagggttgccttaaattgtgccaggggtgttatgaccgggttaacaggcctggttgccgctgtaaaaactcaaacacagtttgctgcaaagttcccactgtcccccctaggaactttgaaaaaccaacatagcatcattaatcaggaatattacagtaatgaggattttttctttctttttttaatacacatatgcaaccaactaaacagttataatcttggcactgttaatagaaaggtgggatagtctttgctgtttgcggtgaaatgctttttgtccatgtgccgttttaactgatatgcttgttagaactcagctaatggagctcaaagtatgagatacagaacttggtgacccatgtattgcataagctaaagcaacacagacactcctaggcaaagtttttgtttgtgaatagtacttgcaaaacttgtaaattagcagatgacttttttccattgttttctccagagagaatgtgctatatttttgtatatacaataatatttgcaactgtgaaaaacaagttgtgccatactacatggcacagacacaaaatattatactaatatgttgtacattcggaagaatgtgaatcaatcagtatgtttttagattgtattttgccttacagaaagcctttattgtaagactctgatttccctttggacttcatgtatattgtacagttacagtaaaattcaacctttattttctaattttttcaacatattgtttagtgtaaagaatatttatttgaagttttattattttataaaaaagaatatttattttaagaggcatcttacaaattttgccccttttatgaggatgtgatagttgctgcaaatgaggggttacagatgcatatgtccaatataaaatagaaaatatattaacgtttgaaattaaa

SEQ ID NO: 186148 - DNA, 1689 bp, Homo sapiens
  Payload ID: 16654
  Gene Symbol: SPRY2
  Gene Name: sprouty RTK signaling antagonist 2
  ENST ID: ENST00000540649
  CDS Start-End: 157-1218
tgaggagatccggtttccagcactgccttgctccgaattgggagacgtttgtcacctgccttgttcgctgtggcctctattctaaagagcggagatcggataaaggagttcagatgtgttctaagcctgctggagtgaccacacttccaagacctgatggaggccagagctcagagtggcaacgggtcgcagcccttgctgcagacgccccgtgacggtggcagacagcgtggggagcccgaccccagagacgccctcacccagcaggtacatgtcttgtctctggatcagatcagagccatccgaaacaccaatgagtacacagaggggcctactgtcgtcccaagacctgggctcaagcctgctcctcgcccctccactcagcacaaacacgagagactccacggtctgcctgagcaccgccagcctcctaggctccagcactcgcaggtccattcttctgcacgagcccctctgtccagatccataagcacggtcagctcagggtcgcggagcagtacgaggacaagtaccagcagcagctcctctgaacagagactgctaggatcatccttctcctccgggcctgttgctgatggcataatccgggtgcaacccaaatctgagctcaagccaggtgagcttaagccactgagcaaggaagatttgggcctgcacgcctacaggtgtgaggactgtggcaagtgcaaatgtaaggagtgcacctacccaaggcctctgccatcagactggatctgcgacaagcagtgcctttgctcggcccagaacgtgattgactatgggacttgtgtatgctgtgtgaaaggtctcttctatcactgttctaatgatgatgaggacaactgtgctgacaacccatgttcttgcagccagtctcactgttgtacacgatggtcagccatgggtgtcatgtccctctttttgccttgtttatggtgttaccttccagccaagggttgccttaaattgtgccaggggtgttatgaccgggttaacaggcctggttgccgctgtaaaaactcaaacacagtttgctgcaaagttcccactgtcccccctaggactttgaaaaaccaacatagcatcattaatcaggaatattacagtaatgaggattttttctttctttttttaatacacatatgcaaccaactaaacagttataatcttggcactgttaatagaaaggtgggatagtctttgctgtttgcggtgaaatgctttttgtccatgtgccgttttaactgatatgcttgttagaactcagctaatggagctcaaagtatgagatacagaacttggtgacccatgtattgcataagctaaagcaacacagacactcctaggcaaagtttttgtttgtgaatagtacttgcaaaacttgtaaattagcagatgacttttttccattgttttctccagagagaatgtgctatatttttgtatatacaataatatttgcaactgtgaaaaacaagttgtgccatactacatggcacagacacaaaatattatactaatatgttgtacattcggaagaatgtgaatcaatcagtatgtttttagattgtattttgccttacagaaagcctttattgtaagactctgatttccctttggacttcatgtatattgtacagttacagtaaaattcaacctttattttct

SEQ ID NO: 186149 - DNA, 9019 bp, Homo sapiens
  Payload ID: 16655
  Gene Symbol: SPRY3
  Gene Name: sprouty RTK signaling antagonist 3
  Uniprot ID: O43610
  ENST ID: ENST00000302805
  CDS Start-End: 432-1298
tttgggaaatacgtccatcaagatttagatctgcctgtaaaatctatacaaagtatatgccactacaggtttgactcgccccctcccccgtttttttgttttgttttgttttgttttgttttgttttgtgttttctctgctgtgtcaaagaacaagacagaactatctctgtttctggctccactgcctgccagtgaaggagttttcattcagactttccgaagagaggtggagaaacctaaagactgaggagaagagatcctttgagccagatggggcattagttcttctgcttttctcagcatggataaaccatttcctcaaggattttctcatgtgccctgaaatccatgtaactacaagggctcctctttatcaccataagtgccaccctgacttaaaaccactcagagctaaaaaatcaaggcaaaatggatgctgcggtgacagatgattttcaacaaattctgcctattgaacagctgcgctctactcatgctagcaatgactacgtggaacggcctccagccccctgtaaacaggccctctccagcccttcccttattgtgcaaacccacaagtctgattggtctctggctaccatgcctacttctctcccccgcagtctcagccagtgccatcaactgcagcccttgcctcagcatctgagccaatctagcattgccagctcaatgtcccatagcaccactgcctctgatcaaaggctcttggccagcattacaccctcaccttcaggccaatccatcatccgaacccaacctggagcaggggtccacccaaaggctgatggtgctctgaagggagaagctgagcaatctgcagggcaccctagtgagcacctcttcatctgtgaggaatgtgggcgctgcaagtgcgtcccctgcacagcagctcgccctctcccctcctgctggctgtgcaaccagcgctgcctttgctctgctgagagcctcctcgattatggcacttgtctctgctgtgtcaagggcctcttctaccactgctccactgatgatgaagacaactgtgctgatgagccctgctcttgtgggcctagttcttgctttgtccgctgggcagccatgagcctcatctccctcttcctaccctgcctgtgctgctacctgcctacccgtggatgcctccatctgtgccaacagggctatgatagcctccggcgaccaggctgccgctgcaagaggcacaccaacactgtgtgcagaaagatctcttctggtagtgcacccttccccaaggcccaggaaaagtctgtatgaccttccaacaaggtggatccagagcttttctccttcgagtccccaacagcaaagcataggcctcatctttggagagggggaggagtgataaactagccaaagttagggcctctcttttgttcctgcagtgtcaggggaatgaccaagtacatcctggtgcaggatgccttgttctttctcacagtatctatcccactcctcttcagtctttacaccctgccagctcagcctttatggttgtcatggcaaattcaggtgatatatgggtatgaggtttgaacactgaggactgacagggccagcaacgtggaggtttaggggctccccaatgtaatacctctcgatgcaggctctgatcgtcactctgttttctgctgtgcctttggaagctttcttctaagatggttttcacaggtacatgtggaacagcgttcaaccttccagggaatacgaccccttctccctgttactgcccttctcttctttattcctctctcctctttcattattctgttctgtattcctttccccttcattctcaccctgtctgcttttactttttctctttcttcctccctttctccttctcccctccttctttttcagactgatcctttctctgcctgtatttctatctcatttgatctatatttgtctctctctacctgtccctttttctctaacatgtccaaaagtgctgtttttccatagatgtttccttagatgccaaactttgctatgctatactatttactaatttttattaagggaaatggattactgtaatgaactgatcactagcaatagtgtgtatcccgatgtgtgtgtgtgctcacaaccactctcacctgttcgtgagcgcatgaggcgaagttatcttatatttccaggtttaactagttggagtttttctccctttctcaataatcaacttatagtgctgacagattccactagcatgctgagtaggatagtaaatcaggatgctcataactttgtatgtctgacccaagtgccaaaggcagacgtgctttatagctaaatgaacaaagcaaaggatacagaggtatgttctctcttagaagctaacttccctgagactgcatggctcaggcgttaataatggacataaaaagtcataaaacgttagagctggaaggaatcttaactattaatctagttcaatgcccttattttacagatgggaaaactgaggcctggaggtaggaagggacttgcccccaaggccgcacactgagttaacagcagaattgagactggaatataggccttctgactcctagttcagtattcttacccctgtaccacattgagtcatgggactttttcctagggctctattaacagtgacagaaagccattcccattcaattacttttcaggaaccatgcctagttagtgtggtggtctttctccagtgcatggtgggtagctaattaactatcaggtgttgaggctgcccccagtggacatcacctttggctctgtcaccttgtagaagctcaagtgtggaaaagaaaagcttaaagaagccctaaccaagctgtatcttcgccattgcatctactctttgctgcacacactgtgcttgctcctggctttgtctgcaatggcagctgcctgagaacttaaatttcagcaacagtgaaaaactgagatgaaagatgtataatgtagagaactgacttctctcttaaaaagtacagagagcctgtgctgtgaacccccttcaatgggaaaaagctgcagtggtgatggcaggctcctaaagactgctgctaaaagacacaagaattatacagtttccctctataagtgaatccaaaattcactgacgaattcagagattgagggcacttgcttgaaatcaaggtgctccaacttagtttaagacctccagactctaactttatagatcatctcttctagagtgtgcatggatgtgtgttgcagggtggagaagtggggagaagtgtatagtagtacacggggggaagaggggacctccatgtccctttgttggatacatattacagaaatatgtgccactcactttttgttggttctgaatcttcctgaagtgtactgacatttgggctgcacagagccccacaccttcacttacacctcctcttctagaattgctttgctctatttttgtatatataaatatgttatgatgattattaataatgttaatgatattgctgcaaatggtgccatatataaggttaggcttcttggaacatttataaacccaaaccaatacctgtaacctcttatgttgctttcagatccttcaattttaagtaactttttaatcttacaagtctgcttgattgtactttacacttatctaccctgaaaagctctgcccagttctctgggtcaagctggatggtgatgagtagcaacacacacttctctgcttctgcctgaaatgtgcttagagctcagttatctaaggattctctgacactagtgcattgttcctggagctaaattattctatggatgtttgcttattagtttcaggccccaaaataacacgagcccctcctccttgatagctccttgatatcccaatcttgcagtcctaactcaggcaaattgtgcactgccagaggggccctgggttctgccatatacccagaggagcctttctcagtgtgtttctaaatggccttacacttggtagaagaaattgaagggttactcaaatacagttgcaatctgcaatctgctgttgagtcagggctttcacttgtgtccaagttggcctgatatggactgcatctgctttacgtatagatgggtcctgttgggatatgcgcatggacgtgtgagtgagtgtgcgtatgtatcccttctgtgattatatatattcacacatctctatatattttaatgtattgcacatgtatatttaaaatatatacgaaagaactctaaatcctgcagggaggctctgttttcattatttttctactttgtgtcatgtcctgtataaacaggaatatttagagggtgtttcctgcttagcatttttttgcagttaaatcatctgttagcccctaactctactgccttccacatattggttccttgatacatttcatatgatatcagccaagagttttcctgtggttccagcccatcttccctaatcacaatagcaataataaatatagtgaatacttacatagtgcttactatatgctaagcactatttttagcatgttatttatattagctcattcattcctcacaattctacaacataggtatcattccaacctctattttacagatgagaaaactgaagcacagagaagttaagtgacttgccaaaaggtaacaattgtaaatggtagagctaagatttgaacccagggtgtctgactcccaggtccatgctccagagtcagatatagaaggctggagcacagtgtaaaccattctggagtaacaagcctcaaatggtgaataattctttccctaactctggtccacctgcaacctaggagttaaaataagtatcttgctatgttaagagtaaagcaatagttacaggcatcatatattagctgtcttgctcccaaaatggtgacattacaaacttttccactattccctttgaaaacatgcttgcagccagttaccatttcttagcttatgatgtagagctattaagggagtattttcacttgtgccaaagagggtaagcgtttattagccttatctttattggccagggaaaactaattcaatttttttttgaacaaagtataactgagactatttttggagcttaagatttgttagagctgttaacattcaaccttattgattatattgagagcgctcttctgattcaaatgtaagcaaaccactgatgaccactggtccgtataacacattttaccaacagctccttcacactgaatcctttaacttggccaaaggacccttaaagaacatctagtccaatgtcaacattttatagctggagaaagggatgcacagagagggaaaataacctgtccaaagtcacacagttctgaaaattgagtggaattatgactttataccagagttcctaatttccaggtatcttagcctcagtttcttaaaaaatagagtttgaagcaaaagctatgtacgatccagggtagtatgagtaaggaaagggttaatgagggagggaagaaagaagaacaaataaaaagcatgtcactgagttggccacagtctgttccttggcaagctaatttcgcaattttttgtgacagaccatataaaactactacatctccatacagcccacgtggtggaggaaaggaggtgaattcatctgctagctctcatctcattagtcaaattcttccccatgtgatatttacccttctacatttttgggtagtgcgtgatgggcacttaaatatgtaccttggcatttcatgcttcagcaataatgggaaggattgtggctccactataaacagtaaggcaagtatatgaatatagggagattaaatttaaagtgctacactagggtggtgcttttaccttatgtctttaatcacattccttcgaagtaagttagagataacctaccacctttaaagtaaataaagctttattgtggctcttagaactgtactatgtttgccttcctgaacctatttattctctagcttgctttaaagggcttcttttttatatggaaattaattccctgttcaattaaaggagtaacaaactctcaaaatatctttcttcttaatataaaaaggaatttcatattattgaactcctcaaaaagcatgtgtaagtcaaaatatgtatgtgaaggcacatatgttcttttaggttccatgagcataatagcaggaaaactggttaagtcaataaatgctggggaaaaaatggctaaacaaggtattctgtaacatgaaaataaagcaatgagttggttggctggctttttaaaaaatatttcagccactaattatgacacagacacattataagaattatgctaccttttattcacatatacaatagttccctgtgtcctatagatcattgtcacataaagcaaaagcattagtgccccatttggacctttggccgaaggtttgataagattttgtaggactgaaattcttggtccctttatcctagtttaggcccatatccttattttcactctcaaagataagatcatgacactaccagtgttgctgctgttaaaggccaggatggacaagataaggaaaggcattttgggaatgacactgactaatgttaggaatcttgctgtcattacaatccaagttatatatgtttgctcccatatgtatttgttggccaatctcctgaaaaagaagaaggtaattctaacccacacattgtcattcccaaactaacctggcaatccttttgaccataccaggtaatagtcatccctctgatggtaaaagacagagatgtcaaggctctggaagctcccaggtccttgaagaactaactaaactgctgaacacagaagtggtaatgtaggcaagccacaggtatgttctcttgtaacaagatggggttgaccatatgtgaaccctgaagagtcattttgaacctgtgtcctaaggcctagagtactttaatcctcatcttcaaagtcttaccactctgataacaaaaagaaacactacaaagaaactgcaaggaaagggacagtcattttttttaatatctaccaattatttagttattcatatatgcatttctttatatagaaaagtatttatatgaagtttccaaaagactctgatattcagctttatagtcttggatagaaaatcatgtgtccttggatggggattcacacaccaaggcttaacagaattagtttggggaatactcatttttactctagagattagttggcttaaacaactttactcgtgaatttttttcttaatggaggtgaagacctcccaaagaggagaaggccccaggcctttcttaatatataaaccatattgaaagaaagaaagaaaaaagtaatgggaagtaatagtaaatgtggatccagaaagaaaaacaaaggttaagaaaatgatgtatgtgaaagaaaaaaagctctataatcagtgtgtttctctcacctaaaacaccatttactaactacttggttcagttgtaccctttaactctattttgtccttgacttatatcaacactcttcttttccaaactcctatagctctccatctggaatgattctatggggtggggggtcgggggaggagaaagggagacagcagaagaaagaaagagagagaaagatagagagagagagagagatgggtggagacttggcctctctcctagaggttcaaagttagaatatgccactaacactatctgcctttcaaactcccttctaggacatgctccatagtacttagatcttatatcaaatgacaaggtttctctccttcagagagaaataccagactggatttgtggtttccctggattggttttttctgagtcaaagtggtgttgtagaaatcacagtaccctgagaccaattaagtcagaatctttggaggtgttgaggaatggatttttaaagttcccagatgattataatatgcaaacagatttgagaaaattgaatcactttattccataaatgcagatagtgaggctaagagagggaaagtgacttactcataaccacaccgtgagttagtgaccaagtcaggataagaatccaggtctgctgactcctaggccagaattcttgtctttatactacactgcttctatctctaccctattccccctctgagcctttgcttttctcatctgtaaaatgacgataataaagcctagagagtgtatgagaatcattaaagcagaagcatttttcttaatgtacaaggttctatacaaatgcaagggaattaatgtataacatatatgtggggctaagtctctaaaacaacataataaaagttgtttttattttagtcaatcttttaggtattgtgtctacctgatagcatgtaacaagattgaacacttgtgtaggtcgtatgtgcctttaatctgaggttggcctcagtgacaatcaaaattagcagttgaggaaaaaggtcatacatttttctcttgcccttgctggaatagggatcaagaggaatataaaagcagtgggatatctggatttcttatactcagtcaaccacaacatggccttagtactgaactagcccagggtttcaatggaactcgtagatctcattcccaaggctggtcctggttgaagggagaaggtcaaaaaaggacgtgtcttctgaaaggcattacccatggaaagccaagggggagggttgcccactaggaggagcttcttttgtagaagccagaatggaggaaaggggctttctgacttggagcatctgaggaaatagattatttgaggatctagtactcccagaataatctgtaaccacaagaaacacatttcttgaactccagcgccccagaacaggatatccatatccaatcccatcgtatccatcctggatgttatgaatttccagagagggccacttctacccccctaggagtcatacatctggctacttatttgttaaaaataaaattctgtaccatttataaaa

SEQ ID NO: 186150 - DNA, 4938 bp, Homo sapiens
  Payload ID: 16656
  Gene Symbol: SPRY4
  Gene Name: sprouty RTK signaling antagonist 4
  ENST ID: ENST00000344120
  CDS Start-End: 188-1156
gcgagctgagctgacagcgcggagctggcgctgtggagcgcagggagccttgccggttcctccgaccggcgtctgcgagtacagcggcggctaacctgccccggcttcaggatttacacagacgtggggcgatgcttgtgaccctgcagctcctcaaaccagcctgtattgagcggtttgcagcctgatgctcagccccctccccacagggcccctagaagcctgtttctccgtacagtccaggacctccagccccatggagcccccgatcccacagagcgcccccttgactcccaactcagtcatggtccagccccttcttgacagccggatgtcccacagccggctccagcacccactcaccatcctacccattgaccaggtgaagaccagccatgtggagaatgactacatagacaaccctagcctggccctgaccaccggcccaaagcggacccggggcggggccccagagctggccccgacgcccgcccgctgtgaccaggatgtcacccaccattggatctccttcagcgggcgccccagctctgtgagcagcagcagcagcacatcctctgaccaacggctcttagaccacatggcaccaccacccgtggctgaccaggcctcaccaagggctgtgcgcatccagcccaaggtggtccactgccagccgctggacctcaagggcccggcggtcccacccgagctggacaagcacttcttgctgtgcgaggcctgtgggaagtgtaaatgcaaggagtgtgcatccccccggacgttgccttcctgctgggtctgcaaccaggagtgcctgtgctcagcccagactctggtcaactatggcacgtgcatgtgtttggtgcagggcatcttctaccactgcacgaatgaggacgatgagggctcctgcgctgaccacccctgctcctgctcccgctccaactgctgcgcccgctggtccttcatgggtgctctctccgtggtgctgccctgcctgctctgctacctgcctgccaccggctgcgtgaagctggcccagcgtggctacgaccgtctgcgccgccctggttgccgctgcaagcacacgaacagcgtcatctgcaaagcagccagcggggatgccaagaccagcaggcccgacaagcctttctgacagtttgtgtcgaagccccagtgctctgcctggaaacctggttctcttctgacatctaagaagactgcagcaaggtcagaggttttagcctcctgaggctgaccttgctagtctgcccactccctacccccagcttcggaaaatacagagaccaccaccacgtaccctgtattccccaaggtgatgaagaagcactttggggctttttttcagggtcctgaaactttgtgtcaaacagacaatgcaggggcagggtgtggtttggggggaaatttttctttttcagaagacagaacacagatgtggacacatatccggaaactgcagctgcttgaatgccttcccagcccctccttctccctccctccctccgcccccccccccttcctcttttccattgtctttggctctcacaggagctagctgcctgggaggaattgttaactgagtaccagggtacctttaaagaagacccttggagtcttctataccttcttctccttccccatctcactccaccccactttgtccctgatgtcttggggaaggtgtagaacaccctagcagttcctattgtatatacttgggagccactgagaacagaggacggccagtgagtccaagcctcgttcctccttctgcctccccggagccacaggatggatttaggagccactgctcagtgcacttctcccttccaactgcatcaactaactctcgggggtgttctgctcaccacaccgtccttcggttcttactgagtcacagactcgcctgcccactacgtgtcctgggttctctctactcagatcccttccagaaactttatatgggtagaggaagccagggcggcaaatgcgagaccaaatatcattttgccaatgagtctgaggctgtggtctctggatccagtcattatgtttttatagaataattaaaccggatgctaacggtgttttaaaaaataataataaaacaacttgtttccttttggccacccccaggaagggctgatttcaaaatctgggggcgagcaacctcaaggaacacaatttccctccctatcaacaagaggattttaacagcaaagaagagaggcagcacctcccattggcagaatgaccgctgagccaggctgggtttgggtttcttctcttctgattctgctgctcactgtcatagccttttgtgtatagtgatgtgtctgtatctttaatgtaaatagagagatgatgaaaaaagagtctattttagtgttaggaagccccagcaggggagtcggaagagcttggaagagctggggagagggtaggggaaaggtttttccaggggccactgggtttgagccctgcttctgtgcacagccacaccaccctctcccgacagccctcaaagacgtagcaactctttctctcaaggtgctaaaggactcagaaggtgcagcacgtccagtgggtaggtacttgttgcatgcaaaagctgtagtgtatctggtccttcctccccagcttttgtgtggggttcttgctttgtgtggtattttgttttcccctctaatgagagggcatggcctgagtcagaagagctaccccaggtgaaactggaagtgcatgaggcagagcgtccgtagcatttccagtttgttctgtataggaacagaggtgcctccgggaaggaggcagcgaggtaggtagctatgataggcacctaatgcttctcaaggacttattttttccttcttgaagactagtagtaacatcttatgatttagagtaagttgattgtaaccataggtatttattgattggaggaagggagggtcatattattttcggctttatttatgtaacatttgctagcttgtaaaaggcgaatgtgaaatattgcatctgcattttccaaggctgattcgtgtagctacccttgccacagttgtgacggatgtatggatgttcttgaacatttcagaaggagtggtagaaaaaaacacacattcagccaaccacttatatgaattgaatgtatcagaagtgtactgaagggactggagatggttttcctcagatgagggggccccaaaattgatagtgcacatctgcacgctttctgcgaggcctcagaacttcccagggcccctccctcaaattgtctccatgggaaacttgacccagtggcaagttgcactttggtgatcttggtggtctacacacccgttctgtggagagtcgatttacataagctgtgtatacacacacacacacacacacacacacccctaccccacactgactgtctaccgacaaagaccctatttcctggcaaacggcctcctgaaccctgactttttgtgtacatacttgtaaacacggatttttctgggttttggtttgctttttccttttttccccctgcccctgttctagcttgttcttcttggtttgctttcaacctgcttgatggatgtctgcagagtgctctctaagagtccacctcagtgcctcgtgtgctcagtggtcatgggaaaggagcgaaggaaccatccttggttctcccagcttggttgtgtagcaatccctcagcattgtttttctcagcttcttggcaaaaattaaaacaacaacaacaacaacaacaacaacaacaaacagaaggataaactggcttgcctgtggaccctccccggctctggggccagtcgagagccactgagggacccagcactcagagacacaacacacatgtgtagctgcttctggctgagtgtgtttcctgtcaccaatggcctgtttggctggacgatgcctcggcttgaccttttttgaaaagtgctggttagttcccgcccctggtaaacctggggtaggtgggggttctgtcttaactcgaggggcacctgggatccaggacgcttctagggggctctggctgcccgtgttaatgaaggacagcgcttccgcgagcaccctgggaactgggtcttgggtagcaaagccctcccagagaaaagattgggcacaactaaggctttcctgagcaggaagggggtgaagaccaatcccttcctttggtcctttggtacgcaccccctcagagctgagatggaagacatggctagttcttttcagccttgtggagcctgtcagtcgccatcatacctcgagtgaggcccagctagataatgacttgtccaagatggcacacgtggaaagttgatctgcaccagaacccggatgactgtcaccttgaagcatcctgttctccttctgtgctgtcccaggaagtgtctggcgggcgtgggcagcacagctctacactgtacgattcactagggcatcctgcgagcctcactagccttctggttcatgcctttgacaagcatttttgtgccccctctgcttactgtgacagtcgatgatgaatcttgcgttgccattttctgctgtgggtaactgcgtgcagtgtcttgccttgctttctcttcttactgtcccacagcttggtttcatgttacaaacagaaaagctcgaggctcccaccccgccacatcccaacttcatttccccctcactgtagcccatttccaccccaccacaaagttgccacaggttttctttgtatagaatatttattttgaagctctattttaatagtatttattttagaaagtctactattgtaagagttcttctgtttgtgaagaaaaaaacaagttaaaaactgaatgtactgatttagaaaatatatataaatatatattgttaaatatacacgggactgccgtt

SEQ ID NO: 186151 - DNA, 2379 bp, Homo sapiens
  Payload ID: 16656
  Gene Symbol: SPRY4
  Gene Name: sprouty RTK signaling antagonist 4
  Uniprot ID: Q9C004
  ENST ID: ENST00000434127
  CDS Start-End: 245-1144
attttcccaggcagtggttgcaacatcgccgcggaggtagcgagctgagctgacagcgcggagctggcgctgtggagcgcagggagccttgccggttcctccgaccggcgtctgcgagtacagcggcggctaacctgccccggcttcaggatttacacagacgtggggcgatgcttgtgaccctgcagctcctcaaaggcccctagaagcctgtttctccgtacagtccaggacctccagccccatggagcccccgatcccacagagcgcccccttgactcccaactcagtcatggtccagccccttcttgacagccggatgtcccacagccggctccagcacccactcaccatcctacccattgaccaggtgaagaccagccatgtggagaatgactacatagacaaccctagcctggccctgaccaccggcccaaagcggacccggggcggggccccagagctggccccgacgcccgcccgctgtgaccaggatgtcacccaccattggatctccttcagcgggcgccccagctctgtgagcagcagcagcagcacatcctctgaccaacggctcttagaccacatggcaccaccacccgtggctgaccaggcctcaccaagggctgtgcgcatccagcccaaggtggtccactgccagccgctggacctcaagggcccggcggtcccacccgagctggacaagcacttcttgctgtgcgaggcctgtgggaagtgtaaatgcaaggagtgtgcatccccccggacgttgccttcctgctgggtctgcaaccaggagtgcctgtgctcagcccagactctggtcaactatggcacgtgcatgtgtttggtgcagggcatcttctaccactgcacgaatgaggacgatgagggctcctgcgctgaccacccctgctcctgctcccgctccaactgctgcgcccgctggtccttcatgggtgctctctccgtggtgctgccctgcctgctctgctacctgcctgccaccggctgcgtgaagctggcccagcgtggctacgaccgtctgcgccgccctggttgccgctgcaagcacacgaacagcgtcatctgcaaagcagccagcggggatgccaagaccagcaggcccgacaagcctttctgacagtttgtgtcgaagccccagtgctctgcctggaaacctggttctcttctgacatctaagaagactgcagcaaggtcagaggttttagcctcctgaggctgaccttgctagtctgcccactccctacccccagcttcggaaaatacagagaccaccaccacgtaccctgtattccccaaggtgatgaagaagcactttggggctttttttcagggtcctgaaactttgtgtcaaacagacaatgcaggggcagggtgtggtttggggggaaatttttctttttcagaagacagaacacagatgtggacacatatccggaaactgcagctgcttgaatgccttcccagcccctccttctccctccctccctccgcccccccccccttcctcttttccattgtctttggctctcacaggagctagctgcctgggaggaattgttaactgagtaccagggtacctttaaagaagacccttggagtcttctataccttcttctccttccccatctcactccaccccactttgtccctgatgtcttggggaaggtgtagaacaccctagcagttcctattgtatatacttgggagccactgagaacagaggacggccagtgagtccaagcctcgttcctccttctgcctccccggagccacaggatggatttaggagccactgctcagtgcacttctcccttccaactgcatcaactaactctcgggggtgttctgctcaccacaccgtccttcggttcttactgagtcacagactcgcctgcccactacgtgtcctgggttctctctactcagatcccttccagaaactttatatgggtagaggaagccagggcggcaaatgcgagaccaaatatcattttgccaatgagtctgaggctgtggtctctggatccagtcattatgtttttatagaataattaaaccggatgctaacggtgttttaaaaaataataataaaacaacttgtttccttttggccacccccaggaagggctgatttcaaaatctgggggcgagcaacctcaaggaacacaatttccctccctatcaacaagaggattttaacagcaaagaagagaggcagcacctcccattggcagaatgaccgctgagccaggctgggtttgggtttcttctcttctgattctgctgctcactgtcatagccttttgtgtatagtgatgtgtctgtatctttaatgtaaatagagagatgatg

SEQ ID NO: 186152 - DNA, 553 bp, Homo sapiens
  Payload ID: 16656
  Gene Symbol: SPRY4
  Gene Name: sprouty RTK signaling antagonist 4
  ENST ID: ENST00000511815
  CDS Start-End: 403-553
ttttatgctatgcaactgccttgcagttgactttttcttgcctggcctctgtaaggcctgaggctcctcggccaccctgtacctccctatcctcgggcaccgagctgtgccaggccccggagcccccaggccgcgctagggctgcggtgggggttgaaggtgcgtttacataacaccaggcgtgtgggagctggaggaagaggttgcgaatgtaggagagataaggctcctgctttccctccttccttcttggtggtaccaggcttgacatcacagagaagaggatagagacgccagcctgtattgagcggtttgcagcctgatgctcagccccctccccacaggtacaaatgcaggcccctagaagcctgtttctccgtacagtccaggacctccagccccatggagcccccgatcccacagagcgcccccttgactcccaactcagtcatggtccagccccttcttgacagccggatgtcccacagccggctccagcacccactcaccatcctacccattgaccaggtgaagaccagccatgtggagaatg

SEQ ID NO: 186153 - DNA, 7780 bp, Homo sapiens
  Payload ID: 16657
  Gene Symbol: SPRED1
  Gene Name: sprouty-related, EVH1 domain containing 1
  Uniprot ID: Q7Z699
  ENST ID: ENST00000299084
  CDS Start-End: 861-2195
ctctcgggcgtgaggagctggcccgctgagctgctggtgggcactggctggcggggaacctgcagccgctcttgtcctctcccgccgcttctcgggatcctgccccccggacccgggcccgcccgctcttctccggccgggtgggaacgatcggtttgcctgcccctcgcctcacacgctccccgccgccccctccacccccctgaggaggagtcccggctggagcgtgtctggaggaatccgccgccgcggggcccctagccctgctctgccggcgcctgaggaccgacccagacgccgccgggggttgaggggcagccggcggcgaggcgggagatggtggggtgggctccggcaggaccgcgccgccgctgcccggagcctgggctcggcacccccccgccggcccccaccgagcggagctctgcttcctcctcgccgcatccctgagggaagcgccgcctctgctcccgggttctccgcccgccgactccttcctggccggaccccgctgcgctccaccccagtggctggaggagcagctctccagtcagcctttgcagcccctctctttttccctttccaccgggcctcctcggatcccttggctgggcactgaggcgggggaagaggctggggtcgccacggcggaggttgctgccgccacccccctgcgggggtggccggggttcccggctgggggggtaccgttctgggtgaggcatccaccatggtgaggcccctgtgccgctgcccccgcgcccccccggccgccgctgcctcctgcccctcggtgctgctgttgctcccccgcctgctgttgctcctccatctccagatcggatcacggtgagggaaagatgagcgaggagacggcgacttctgacaacgataatagttatgcacgagtgcgagctgtggtgatgacccgagatgactcaagtggtggatggttaccacttggagggagtggactaagcagcgtcactgtcttcaaagtccctcatcaggaagagaatggctgtgctgacttttttatccgtggagagcgactcagggacaaaatggtggttttggaatgtatgcttaaaaaagacctcatttataataaggtcactccaacatttcaccactggaagattgatgacaagaagtttggtcttacgtttcaaagtcctgctgatgctagggcttttgatagaggtatccgaagagctatagaggatatttctcaaggatgccccgaatcaaaaaatgaagctgaaggggcagatgacttacaagcaaatgaagaggattcttccagttctctagtgaaggatcacctttttcagcaagagacagttgttaccagtgagccttatagaagctcaaatataagaccttctccctttgaagatctgaatgccagaagagtctacatgcaaagccaagccaatcagataacatttggtcagccaggcttggacattcagagcagaagtatggaatacgtacagcggcaaatatccaaggaatgtggaagcctaaagtcccaaaatagggtccctttgaaatcaatcagacatgtcagctttcaagatgaggatgagattgtcagaataaaccctcgagatatcttaatacgtcgctatgcagactacagacatcctgacatgtggaaaaatgacttggaaagagatgatgctgattccagtattcagttttctaaaccagacagtaaaaaatcagactatctgtactcttgtggggatgagactaagttaagttcacccaaagactctgtggtatttaagacgcagccttcctcattaaaaattaagaagtcaaaacgaagaaaagaggatggtgaacgttctcgctgcgtatactgccaggaaaggtttaatcatgaagaaaatgttaggggaaaatgtcaggatgctccagaccctattaaaagatgcatatatcaagttagttgcatgctctgtgcagagagcatgttgtatcattgtatgtcagactcagagggagatttttctgatccctgttcgtgtgacactagcgacgacaagttctgcttgcgatggttagccctggtagctttgtctttcattgtaccatgtatgtgctgctacgtccctttgagaatgtgccatcgctgtggtgaggcatgtggttgctgtggtgggaaacataaagctgctggatgaaatggtccagtgccaaaatgagcttaaaatctttgtttccaggaattagctaacttggatttgtggaagcttttggcaagcaatatggaatcttgcctggtatcattgagcccacacatggaggaagcagaactcatcagttcttggcgtttcacgccatgcctaacttttcccttgagtgcatggcatgttttgttacaggttgtagagtatttgcagaaggaaaccatttctggttatttggctataaaaagtcagcataaaatatgatccaactaaaagggattaatttttggcatttttgtatatttatgcattaggtgatgggacttttaaaggtttgaatttattaggacacgaactaaaaataaaagtgcactaggggacagttgatttcaatctaagaaaagttaacacttgggaattacaagaagtaaaacaagtgcaactaaatcatttattagttgttttttgaaagcagttttatgtataaataacaaatgtttatatttaactaaatgtaaggtacgaattattacatattaaacttttcttccccttcctagttctgaagtagatatatatatatatatatctactgtcacattccatatattttgaatatttaactcatctagttaataatgtttttattccatgcgaatgatttgatattttcatccttatttctctttggctacaatttatattgagttatatctgtacattctggtaatctaaaatccttaaaaatactctaatagccttgagtgaccaactttttttttaaagcacagatgtaattgtctaatgttctgatgggaacgtaacacttatttttatataaaaagagactgagtaaacaaacattatagaaaaaaagtgaagttttttagttgttttttgtggtattcaaccagcaagttgttttctttcagagtttcctccttcaaaaagttatattgcatttacaaatgttttacaaggcagaaagtttgactggatagttagtgtaaaagcttcatgttgagatcttcacgtatcattctgctaaaccagaatatgttcagctgtgttactaatttttcagcttaatcctcagtgcttattatttacataacaataactttttatcagttacattttatttttatttaaactggccaaaagcaaaattattttatgttaaaatgtgtgctaaactatcccaggaaagtatttaatccaacattgtaaatgaagtatcttgtacatataaatttatttcttttgcagagcattatattactggatgtttaatttacaaaatagttgggtaaatgttccaacaaactttaaagtaccttgaagtcaaattgtctgtttttgttttgttgttgttgttgttgttttcttaagtgttacattaaaactctaaccaaggaaagggttctttaagaacattcccttagagggataaagttgagaagtgtgccttttttttaatggcttgaagtttcagaggtgataaaaattaaaatcacactactatttgaagctcattttctatgcaggtttttaaacgtcatttatgtatcattctttttatatatcacacttaagcttgtgttagcttttttcttttgccccagatcaaactgaacaatgtatataacactatctgtctgtaaaatactttttttaagaaagcatttatatttatatgacagcttgaactgacaacattgtgtatatagatcatcttgaagtattatttcacattgaaaagaagaaaatatattgataactatagatgttatgaagaagagggtatttctagttttgtactaaaaatcaattggatgaactaaatccaaaacatgacactgtaggcagcagttttaagtcttatttttactgtttatatatttgaatgctgctacaacagatgatcttcatccctgaagttttcagctaaacttggtttcctagaatagactgttaactttcaaaatttttattggtgaaatggaaatactgtttttccttgtgaatgaattttcatatttgtaagtgctaagtttataattcaggtttgatcaaggtgtgaataactgaagaaaataacttgctggctatataggaaaatgctgtggaaatgaactgtgtatatacttctgggaggaacaaatttaatcatttcttctgttaagcactaatcagtatagtgcaactcctggttctgtactgtattttatatgcaacatatatgctttaatattttaatgtttgtgcattaatattttcaatttgtttaaccactttgctgctaagattttgccgtcccattcccattttttcctttacaattttaaacaagtttcttcattaaaaactatggtgatgaaatggtttttattttaccttggatctttatagttaacatacccagtttcttaatcagtctacaagactaactgatgatataatgttctctgaatccctatatggaaattttcttttgagtaaatgagaattcctttgtgaaagcaaatgggtagtttaaatcactgattcttaaacatgtgtataggcaccttcaggaacattttctcattctctgtacagattcggcactgccaattggcttttcctctaaaacttttctttgtttttatctgatataagcagatggctcaagacaactgcttgagtaatagtattgaaaatggaatcatctagacggcatgacaagcaagactggtctgatgaacttgttcagaattgataattcttaaatatttctcttggcttcaaaagggacatcatttgatttctgaagaagtatgtcgtgtggagcttcagcaccacctactggatgatttccaggccagagacatgagatggcaatagggatctgacagggttcatcactactaccattaaagggctatttatgtggtgaccacctctaccagggaaaccaggaataagaactgtctcaaaggaattgtaaaatggttatttacctaatgtgtcttgttggcttgctgaaagattttaagcacttttttcttacatatcctgttttaaaatatttgttgatatttgggactggcaatcaaacttaatggatgtactgaggcatttatagaaccagttgctttaactctcaaaagccattaccaaaatggtatttttttcctccttccgccagtcagggagaatttttaaaaataataatcaaaacatgaaaaaacataatcacacctgtattttatcatgacagcttcagagagtgtgtgtgtacgtttttctctcttttatttgagacggagtttcactcttgttgcccaggctggagtgcaatggtgcgatctcagctcactgcaacctccgcctcctgggttcaagcgattctcctgcctcagcctcccaagtagctgggattacaggcacccaccaccatgcccagctaagttttggtattttagtagagatggggtttcaccatgttggccaggctggtcttgaactcctgaccttaggtgatccacccacctcggcctcccaaagtgctgggattacaggcatgagctactgcgcccagccgtgtgtatgtttctgaaatgatgatggggtggggttaaaatctaaagggaaaaacttgaaactacctattttcattggttattcagcagtgcctaaaatgagcttttgaagtaatgtaaatgcactttcaattcatgtgtatagtgccatctgatatcttgggtaagtcttgctttttcttttctttttcctctcccctgcccccttaattaaatggcacggaaatgtttcttaatatgcacgtgagtctccagagtacaggaaatgtgctttcctctaaatggtcaatgtaaagaatcttaaggatatttcttgtgttgaaatttacattcgattttgtgattacacttggaagtatgtgttaaattgggtttttaattgtagcccaaaggtgcattaagcaagtgtaacattttttccacataaaacttagaaaactttagttacctgaaaagcaaggattctttactaattattatgctcattcttgatttgacttccatgttcacacttcaaagtgtaagaggaagcactagaaactggcattattgttgcactaaaaaagtctataaatcataatagcaccatgaggtgttttgcaatgagacaaacatgaagaatgaatttctttaagagagaaacacaaccggaggtgatttatataaaccaaaagaaaaaaaaaggctttaaggtattaggtactgtttgcctagcagccaggtggttataaaagattcatatgctttggtacactgataaatgttagccattattcctgaaagcttcttaaattgcatcagttgttttgaaattttttcaagaataaactagttgaaaagtctttgtattaaaaatacacatagatttttgtgaacatttccagtgtgtagtgtcgtttgctttctatttctgacctcaaaagtgcctcacttgtatattatttccattaaaagcttgactgcattctttctaatgaacaatgaaaaactgtttaactcatgtcataatgtgtctcctcagatatagttaactagcttgatagttttgagtatataatgtaaataatacattataagtttgtaaccatttctgttacttcatacccgtgtaattggacatagcagatgattatcataagaatttgttttaatggtttttttccctcctggaattacctgattaaacctgtcatgaattataaaaggactttttcttattctcctagagcttatcaaattatcacataagagataattactggaggagaaagtaaaaatggaagcttttgataattagctctgttctttaaaagtatacttttaaactgaaagttcacatatagttcatcttaataacatatttattcatccttaattgtattcagatttttttttaagtctctaagctaataatgttatatttattggtttggtaacatgttgcagctaagctaatgaccttaagtggcaattgtttaacccaggactactgatttttttatattcaagtcagtttcatcgttttacttaactcgccatataaccaaaaataacgaataatctaaaggaaaggttattaggacagtaataaaaaattatagtgtatctcaacactagaataagttggattactatattatagtttatttgaaaaatcaaggagtaactgtatctttaccattaattatgaaatgtagtctcatgtgcttatttacaggtttttcagaatttgctttacattcttcacatcaagttaatacccacaagtaagtagaatagcttttataacaaggaaattgaaactagggttctagcttggctatcaatataagtgtcatgcacatagtgctccttaaagaaaaagacatcgacatcaatggtatgaaagctgtagtcactctttaaattgaactgctctaagatttgcagttttagtgagatctgaaatgatggttcaaaaaatacattcataataaaagtcttaacaaaatcaca

SEQ ID NO: 186154 - DNA, 527 bp, Homo sapiens
  Payload ID: 16657
  Gene Symbol: SPRED1
  Gene Name: sprouty-related, EVH1 domain containing 1
  ENST ID: ENST00000561317
  CDS Start-End: 133-527
gaaagatgagcgaggagacggcgacttctgacaacgactacagcaattcaattctgaattcttctgcagtccctcacagctcagccttgaaacccactctttaatagttatgcacgagtgcgagctgtggtgatgacccgagatgactcaagtggtggatggttaccacttggagggagtggactaagcagcgtcactgtcttcaaagtccctcatcaggaagagaatggctgtgctgacttttttatccgtggagagcgactcagggacaaaatggtggttttggaatgtatgcttaaaaaagacctcatttataataaggtcactccaacatttcaccactggaagattgatgacaagaagtttggtcttacgtttcaaagtcctgctgatgctagggcttttgatagaggtatccgaagagctatagaggatatttctcaaggatgccccgaatcaaaaaatgaagctgaaggggcagatgacttacaagcaaatgaagaggattcttccagttctctagtgaa

SEQ ID NO: 186155 - DNA, 4097 bp, Homo sapiens
  Payload ID: 16658
  Gene Symbol: SPRED2
  Gene Name: sprouty-related, EVH1 domain containing 2
  Uniprot ID: Q7Z698
  ENST ID: ENST00000356388
  CDS Start-End: 191-1447
tgcaccccttcccccaaaccctatcccgcgccctgcttccccttctgctgcggcgccctcttcatctctagccgccccccctccccaaatcaggcgatctccggagatgtgaagaaggggggcgagcggacaggaagatgaagggagcaaagctgcccgccgcgggacaggcgtctaggtgaacaagaaaatgaccgaagaaacacacccagacgatgacagctatattgtgcgtgtcaaggctgtggttatgaccagagatgactccagcgggggatggttcccacaggaaggaggcgggatcagtcgcgtcggggtctgtaaggtcatgcaccccgaaggcaatggacgaagcggctttctcatccatggtgaacgacagaaagacaaactggtggtattggaatgctatgtaagaaaggacttggtctacaccaaagccaatccaacgtttcatcactggaaggtcgataataggaagtttggacttactttccaaagccctgctgatgcccgagcctttgacaggggagtaaggaaagcaatcgaagaccttatagaaggttcaacaacgtcatcttccaccatccataatgaagctgagcttggcgatgatgacgtttttacaacagctacagacagttcttctaattcctctcagaagagagagcaacctactcggacaatctcctctcccacatcctgtgagcaccggaggatttataccctgggccacctccacgactcataccccacagaccactatcacctcgatcagccgatgccaaggccctaccgccaggtgagcttcccggacgacgacgaggagatcgtgcgcatcaacccccgggagaagatctggatgacggggtacgaggattaccggcacgcacccgtcaggggcaagtacccggacccctcggaggacgcggactcctcctacgtgcgcttcgccaagggcgaggtccccaagcatgactacaactacccctacgtggactcctcagactttggcctaggcgaggaccccaaaggccgcgggggcagcgtgatcaagacgcagccctcccggggcaagtcgcggcggcggaaggaggacggagagcgctcgcggtgcgtgtactgcagggacatgttcaaccacgaggagaaccgccggggccactgccaggacgcgcccgactccgtgagaacttgcatccgccgggtgagctgcatgtggtgcgcggacagcatgctctatcactgtatgtcggaccccgagggagactatacagacccttgctcgtgcgatactagcgacgagaagttttgcctccggtggatggctcttattgccttgtctttcctggccccctgtatgtgctgttacctgccccttcgggcctgctaccactgcggagtgatgtgcaggtgctgtggcgggaagcacaaagcggccgcgtgactcagtttccctcccttctccctccatccgcagccacaggggaactcgtctcttacatactctcatcttctcccccgctcccttccactccaaggagcgaggagggcaagcggcctcccagctccctggtacctcgaggcaccattccagccagggacgctgccgggtagactctccactccccctgccgcccacactgcagcagccacatccatacacacacgctcgcacagtgttctgaggaaggaaccttcgccacagactcctgtactattaacaatctgtaaccaagctaactgtctcatccatgtgttgatttcctgtttcctcctcccccgcctcttccagttcaaaggagtctgcaattggaactgctgattttcggtgggttttgtagttgatttttccaagagcgtcgaagactctctttctcttggttcaccttgcctgtcgctagcaagcatctggttcagcggaaatgggatgtgagaatgatgaaacccgacagaagtatctcagcctgcagtcagttattatgtataggaggtgagctagttaacaaacttgtaccacaaaacaatatcgctttaacttttctaaagccaaatttcccatgtaagctgcagtttctatctttagcccatcatcattttctgcccccccaaaatctgttgaaatgattcactgatgcaaaacattcacccgtaatagactgagaattgagccttaacttcagattaacttgtgagaatcaggaaaattccttcaactgcattgcatcctcttggaccagggctagaatggggatttcaggtttctatgagcctccccattacccctaaagtagaacattttttaaattgtgttgccaccacttctaaaaatttagcaatattagaataggatactagtgaagtaagaaattttgcttgttgttttgcaaaccaaatagtttcctcaaacacaaatcagtgttcccacgaacaagttccagttgagaaacactaaggttatggtgaataaaaccatagggagcttcttccccccaacccctggctattttatattaatggggagaggggatttttaaatgtcataaatttgaagagtggtgggttgcattttcttcatgggtttatgttttcgtttcattttggactcaatttcacatcaccaaattcctcatttatacttggggaaaaaacaaggccatatgtaaaaacccttccaatgcctaagtgtctttctcctgcaactccaaacccagactcgccactttgggtgcacaggtggttaggtcagccaactggttctgcctgtcgccttgccacggaggaggcttctaattagctggaaaagagtatttttctaatacgttgcaaggattagccaaatcttcttattgaagaaagaagaaaagtgaagagtggttacctatacctagcatagtacaatcagaacctcgtggagaccaccggggacaggcttgcggacgccggctgttcttcccgccacgatctttctgtggtagcggccagcagaagacatggcctgctccccactccctttccccactccttctttattgcacacaggacaccagtcttcaaggaaagggacttttttccagtctgccaatcatattgggaaagtgctagctgtgctcaccttcatggggctgtttccagctcgtccacaagctcatcgattttctttagtagattaccggtgtaaatacccagtgtgcttatgagtcagttagtagacgtcttcattcattggagtaactggtttaggctttccagtttggaaaaggagcagagagctgtccatctggattgatggaagaaaagagaacctcatccatgcctggagaacatctagaaaaccttcagccagcctccagtgctgtcgagagaccaccttcccccgacccggaggcacttccttggggtctttctctagggtctcttctctacaaagcacaacactaatgttcgtttccttagacctcagttcaagtgcccctatttatttcaataagaacgcacatatcccagctgttttttgtttgtcacctctatttagttgttacctgtttctctcttctttcaccccttgtccttttccacccttttaagagttacgctagcagatcttactccacgtatactttttggtttgtgaaggcatcggttaagggcacaaagacagccatggggacatttatgtaaatacgtctctaattgccacactgcagctgaacagtgtgtagtattttcccagtcagctttgccatactgacgtcaatcatttgagagaaattattcagattttatttttgtatctgtggtaacaaaacattaaccaaaagattttctgtccagaagcctccccgaccccccaagctatttgctcacattaacaaattaaagtgcctgaagcataattcattctttacctgtatactaaaaaccctgttgtattgatttttttataataagcctttttacctctgtgtaaaaaatatatatacaagtgtatgatgtacattttagttcttaacttttttttatggtttctaatatgtatgaccaatgtagccattgctttaaaatgtaccgtgtaaatataaacacatcctatcaga

SEQ ID NO: 186156 - DNA, 1365 bp, Homo sapiens
  Payload ID: 16658
  Gene Symbol: SPRED2
  Gene Name: sprouty-related, EVH1 domain containing 2
  ENST ID: ENST00000452315
  CDS Start-End: 68-1365
ccaggacttgtgttctgatggaaggaccagccaacacccacacagccttcctttccttggtgtgcagatggctctatgcagtcttatctccagctgggcatctgggttcaggtcagacgatgaccaggaaaggaggggtgacagctatattgtgcgtgtcaaggctgtggttatgaccagagatgactccagcgggggatggttcccacaggaaggaggcgggatcagtcgcgtcggggtctgtaaggtcatgcaccccgaaggcaatggacgaagcggctttctcatccatggtgaacgacagaaagacaaactggtggtattggaatgctatgtaagaaaggacttggtctacaccaaagccaatccaacgtttcatcactggaaggtcgataataggaagtttggacttactttccaaagccctgctgatgcccgagcctttgacaggggagtaaggaaagcaatcgaagaccttatagaaggttcaacaacgtcatcttccaccatccataatgaagctgagcttggcgatgatgacgtttttacaacagctacagacagttcttctaattcctctcagaagagagagcaacctactcggacaatctcctctcccacatcctgtgagcaccggaggatttataccctgggccacctccacgactcataccccacagaccactatcacctcgatcagccgatgccaaggccctaccgccaggtgagcttcccggacgacgacgaggagatcgtgcgcatcaacccccgggagaagatctggatgacggggtacgaggattaccggcacgcacccgtcaggggcaagtacccggacccctcggaggacgcggactcctcctacgtgcgcttcgccaagggcgaggtccccaagcatgactacaactacccctacgtggactcctcagactttggcctaggcgaggaccccaaaggccgcgggggcagcgtgatcaagacgcagccctcccggggcaagtcgcggcggcggaaggaggacggagagcgctcgcggtgcgtgtactgcagggacatgttcaaccacgaggagaaccgccggggccactgccaggacgcgcccgactccgtgagaacttgcatccgccgggtgagctgcatgtggtgcgcggacagcatgctctatcactgtatgtcggaccccgagggagactatacagacccttgctcgtgcgatactagcgacgagaagttttgcctccggtggatggctcttattgccttgtctttcctggccccctgtatgtgctgttacctgccccttcgggcctgctaccactgcggagtgatgtgcaggtgctgtggcgggaagcacaaagcggccgc

SEQ ID NO: 186157 - DNA, 467 bp, Homo sapiens
  Payload ID: 16658
  Gene Symbol: SPRED2
  Gene Name: sprouty-related, EVH1 domain containing 2
  ENST ID: ENST00000427238
  CDS Start-End: 1-143
tcatgcaccccgaaggcaatggacgaagcggctttctcatccatggtgaacgacagaaagacaaactgcttcaaaagttagaaccccggagctggtgccaaattgtaaaacgtgactgtcctttccagcaaagtctcttttgaccacacgctttatccgagatgcttagaagtatatttggctgttttatttgcatctttgattaagatgtctatcattgtaaaaaggtattcaaaacaaaagtgtactcttttattattatgaatcacattgtactgagctgtgaagtcagtgttttaaaaatgtagagtttattcatggagcatgccattgaggtttggatggtggcaggtaaaacagaaaggcaagatgtcatctgacattaggctacttataaataaatgtttatctagcttttatttcatgccctaatgaataaaacatgcttggaaaaagaaagtaacaag

SEQ ID NO: 186158 - DNA, 1800 bp, Homo sapiens
  Payload ID: 16658
  Gene Symbol: SPRED2
  Gene Name: sprouty-related, EVH1 domain containing 2
  Uniprot ID: Q7Z698
  ENST ID: ENST00000443619
  CDS Start-End: 45-1292
aataatgctaatacccagcactcgggctccacaatgtagaggaaatggcatcgcctggcagtgacagctatattgtgcgtgtcaaggctgtggttatgaccagagatgactccagcgggggatggttcccacaggaaggaggcgggatcagtcgcgtcggggtctgtaaggtcatgcaccccgaaggcaatggacgaagcggctttctcatccatggtgaacgacagaaagacaaactggtggtattggaatgctatgtaagaaaggacttggtctacaccaaagccaatccaacgtttcatcactggaaggtcgataataggaagtttggacttactttccaaagccctgctgatgcccgagcctttgacaggggagtaaggaaagcaatcgaagaccttatagaaggttcaacaacgtcatcttccaccatccataatgaagctgagcttggcgatgatgacgtttttacaacagctacagacagttcttctaattcctctcagaagagagagcaacctactcggacaatctcctctcccacatcctgtgagcaccggaggatttataccctgggccacctccacgactcataccccacagaccactatcacctcgatcagccgatgccaaggccctaccgccaggtgagcttcccggacgacgacgaggagatcgtgcgcatcaacccccgggagaagatctggatgacggggtacgaggattaccggcacgcacccgtcaggggcaagtacccggacccctcggaggacgcggactcctcctacgtgcgcttcgccaagggcgaggtccccaagcatgactacaactacccctacgtggactcctcagactttggcctaggcgaggaccccaaaggccgcgggggcagcgtgatcaagacgcagccctcccggggcaagtcgcggcggcggaaggaggacggagagcgctcgcggtgcgtgtactgcagggacatgttcaaccacgaggagaaccgccggggccactgccaggacgcgcccgactccgtgagaacttgcatccgccgggtgagctgcatgtggtgcgcggacagcatgctctatcactgtatgtcggaccccgagggagactatacagacccttgctcgtgcgatactagcgacgagaagttttgcctccggtggatggctcttattgccttgtctttcctggccccctgtatgtgctgttacctgccccttcgggcctgctaccactgcggagtgatgtgcaggtgctgtggcgggaagcacaaagcggccgcgtgactcagtttccctcccttctccctccatccgcagccacaggggaactcgtctcttacatactctcatcttctcccccgctcccttccactccaaggagcgaggagggcaagcggcctcccagctccctggtacctcgaggcaccattccagccagggacgctgccgggtagactctccactccccctgccgcccacactgcagcagccacatccatacacacacgctcgcacagtgttctgaggaaggaaccttcgccacagactcctgtactattaacaatctgtaaccaagctaactgtctcatccatgtgttgatttcctgtttcctcctcccccgcctcttccagttcaaaggagtctgcaattggaactgctgattttcggtgggttttgtagttgatttttccaagagcgtcgaagactctctttctcttggttcaccttgcctgtcgctagcaagcatctggttcagcggaaatgggatgtgagaatgatgaaacccgacag

SEQ ID NO: 186159 - DNA, 555 bp, Homo sapiens
  Payload ID: 16658
  Gene Symbol: SPRED2
  Gene Name: sprouty-related, EVH1 domain containing 2
  ENST ID: ENST00000440972
  CDS Start-End: 207-555
cttctccctttttttcggtcgcaagtaggaagctttttgcactccaccacctctggccgctgggaagacgtcatcgcttccgccctacttcctcctcctgttggcggcggcgatctccggagatgtgaagaaggggggcgagcggacaggaagatgaagggagcaaagctgcccgccgcgggacaggcgtctaggtgaacaagaaaatgaccgaagaaacacacccagacgatgacagctatattgtgcgtgtcaaggctgtggttatgaccagagatgactccagcgggggatggttcccacaggaaggaggcgggatcagtcgcgtcggggtctgtaaggtcatgcaccccgaaggcaatggacgaagcggctttctcatccatggtgaacgacagaaagacaaactggtggtattggaatgctatgtaagaaaggacttggtctacaccaaagccaatccaacgtttcatcactggaaggtcgataataggaagtttggacttactttccaaagccctgctgatgcccgagcctttgacaggggagtaagga

SEQ ID NO: 186160 - DNA, 701 bp, Homo sapiens
  Payload ID: 16658
  Gene Symbol: SPRED2
  Gene Name: sprouty-related, EVH1 domain containing 2
  ENST ID: ENST00000421087
  CDS Start-End: 1-701
gtggtattggaatgctatgtaagaaaggacttggtctacaccaaagccaatccaacgtttcatcactggaaggtcgataataggaagtttggacttactttccaaagccctgctgatgcccgagcctttgacaggggagtaaggaaagcaatcgaagaccttatagaaggttcaacaacgtcatcttccaccatccataatgaagctgagcttggcgatgatgacgtttttacaccgatgccaaggccctaccgccaggtgagcttcccggacgacgacgaggagatcgtgcgcatcaacccccgggagaagatctggatgacggggtacgaggattaccggcacgcacccgtcaggggcaagtacccggacccctcggaggacgcggactcctcctacgtgcgcttcgccaagggcgaggtccccaagcatgactacaactacccctacgtggactcctcagactttggcctaggcgaggaccccaaaggccgcgggggcagcgtgatcaagacgcagccctcccggggcaagtcgcggcggcggaaggaggacggagagcgctcgcggtgcgtgtactgcagggacatgttcaaccacgaggagaaccgccggggccactgccaggacgcgcccgactccgtgagaacttgcatccgccgggtgagctgcatgtggtgcgcggacagcatgctctatca

SEQ ID NO: 186161 - DNA, 498 bp, Homo sapiens
  Payload ID: 16658
  Gene Symbol: SPRED2
  Gene Name: sprouty-related, EVH1 domain containing 2
  ENST ID: ENST00000426832
  CDS Start-End: 1-312
ggggtctgtaaggtcatgcaccccgaaggcaatggacgaagcggctttctcatccatggtgaacgacagaaagacaaactggtggtattggaatgctatgtaagaaaggacttggtctacaccaaagccaatccaacgtttcatcactggaaggtcgataataggaagtttggacttactttccaaagccctgctgatgcccgagcctttgacaggggagtaaggaaagcaatcgaagaccttatagaagaagtagagaatggattctggcgggcccagaaggctcctggcctacccactgtcctcctgtaatcagaggcccagggtgtacagctgccactgaaaaggaaagggatctgtgacctctggagccctggttcggtttaggccttggtctatggcagcgagtgcagaagtttgagagattaattgggaacaacagcaggcaaagttaatttagggagcatcctggcaagaatcaattaaagaagagtaaat

SEQ ID NO: 186162 - DNA, 4778 bp, Homo sapiens
  Payload ID: 16659
  Gene Symbol: SPRED3
  Gene Name: sprouty-related, EVH1 domain containing 3
  Uniprot ID: Q2MJR0
  ENST ID: ENST00000338502
  CDS Start-End: 104-1336
aagttggaggggagatgagggttgagggaacattccatgggagagcagggtttgagctcatgactgtgttgtccctgtccttccccccacctcctgcaggtacatggtgcgggtccgagctgtggtgatggcccgagatgactccagtgggggctggctgcctgtggggggcgggggcctcagccaggtgagcgtgtgtcgggtccgaggggccaggcccgaggggggggcccgccaggggcactacgtcatccacggggaacgcctccgggaccagaaaacaaccttggagtgtacactgaagccaggcttggtttacaacaaggtgaatcccatctttcaccactggagcctgggtgactgcaagtttggactgacgtttcagagccctgcagaggctgatgagttccagaagagcctgctggctgcgctggccgcactgggtcgaggctcactcaccccctcctcctcctcctcctcctcctctccttcccaggatactgcagagaccccctgccctctgacgtcccacgtggacagcgactcctcctccagtcacagccgccaggagactcctcccagcgccgctgcggcccccatcatcacgatggagtcagcttcaggcttcgggccgaccacgcccccccagcgccgccgctcctccgctcagagctaccctccgcttctaccgttcacggggattccggaaccctcagagcccctggcaggggcagggggcctggggtggggcggccgcggctacgaggattaccggcgctccgggccacccgcgcccctcgccctgtccacctgcgtcgtgcgcttcgccaagaccggcgcgttgaggggcgctgccctgggtcccccagcggcactacctgcccctttgaccgaggctgcgcccccagcgccccccgctcgcccaccccccggcccgggcccatcctctgcgcctgccaaggcctccccggaagcggaggaggcagcgcgctgcgtgcattgccgcgcgctcttccgtcgcagagcagacgggcgtggcggccgctgcgcagaggccccggacccgggtcgcctcctggtgcgccgtctaagctgcctgtggtgcgccgagagcttgctctaccactgcctgtcggacgccgagggcgacttctcggacccgtgcgcctgcgagccgggccacccgcgccccgccgcgcgctgggccgcgctggccgcgctctccctggcagtgccctgcctctgctgctacgcgcccctgcgcgcgtgccactgggtcgcagcgcgatgcggctgcgccggctgcgggggtcgccacgaggaggctgcgcggtgaggacggcctggtgggtcccctagccggcccgaggacccaaaattgagggtccaggaccccggactccgttcggacctaaaacccaaacctaggcacatccggaacttggagcttgagtttggattgagagatctcagacctggaacctggaacccaaacctaggactgagagaccccagccccagcttcattggggtgtctgtctaagaagtcccaggcgtcctgagttctggcgttcccccacccccacaccccacgaggaggctccaggcgtccccatactttgcatctcagaaaggccagggagcacatagatcccgaaaagggcaggtccctgttgaaatgaacaacctagaacccggtcacgcctggcaccatgtccctcagattacagccccacaattagtcaggacttgcccataactggctctgcctttattcaactcccagatcagatcttgagaccataggacctggagtcacccacaaacagttcctgaatattcacctaagacctggtgcccccacatctgagacattctcatagtcccaggacccctgagacagcaggacccctgagaaagtttcaaacagagtttgaaactctgttatgctctggaatctccagatgctgcccctcaaatctacccacgacttagtgcccacagacctggcctccagtccgggaacactgaagtctaagatgtccagggaactcccagacaccctgggaccccagactcttaagatgcactgagtgctcggatatactgaaacacgagctgttctcttaccaaaatgacttgggagacccatcccagagcccccaagatccagatatcagacaccaagatgctctggaagccagggatcaaagacctccataggtccacccacccccaagccagggttctcaggagctttggatatcatttataggactcagaggtgcctggggtcctcagatgtgcgactgaaggccaccaacacctcaggacccgagatactggtctcgagttctcaaatagccctctcttgcagtccctcctggacctggattttgagaccccaaatgtcctggaatcttcagcttctttctacccacagattcccaaccccttaagggctgggagtccagctcccagaagaggggatgctcatggtgacccagacctctgatgcccttggccctcagcccttgagtgaccctaaggtactttaggagcactggatccaataccccaaaggtgccactgacccccaaatgcaaggctcaagaccctacaacattgggattgttcctgatccaagaccttcatccctccataccagaggcgttcagattcgaggtgccccaagaccccagcaccctcagaccccagatttctttggattcaaacctctctagtctgatgaaccccaagttgcctctacacctgattcccccatccccacttgtcggacctcagagacctgctgccccttgaatcctgtcatccataggcccctaaaaccccaaggttccagcctctggaattctggtcccaaggatcccagcccaagcccccagcaatcctcagaattacccctttatcttagggtgggatccctaccatttggaactcattgtaggaccacccagggtggggcacagtggctcatgccttgtaatcccagcactttgggaggccaagggaggaggatcgcttaaggccaggagtttgagaccagcctgggcaatgtagtgagaccgtctctaaaaaaaaaaaaaaaggaccaagtaggagctccctcactgtcacgtctaggacccagcattgtcacagatgattatgcagggtcttcattaagtgaaggcacacagcccagggtttcgaggagctggaagtcacaccagtctgctggccacactgtgccctcagaagaagtgtgtgcaatggaaactttcaggctagttatggctctgctgtcccacagcccccagtcttgcagaccttccttcaagcacaaccttaattcctagtccaggttcaagtcccaccttttatgttctccccctccattaaccccttctcttcctatttatttatttatttatttatttattttgagacagagtctcgctgtatcacccaggctggagtgcagtggcacaatctcggctcaccacaacctccccctcccgggttcaagccattcgtctgcctcagcctcccgagtagctgggataacaggcatgtgccaccacacccagctaattttttgtattttgagtagagacagggtttcaccatgttggccaggatggtctcaaactcctgacctcatgatccacctgcctcagcctcccaaagtgctgggattacaggcatgagccactgcacctggctctcttccactttagagtgagaagttgcttcaggaagtttgaaagcctgtttcatggcccactgagtctcttctgtgcaaaggggggtgccacaggcttttttcccccaagtgaaatggggcttccagtggatcgaagatctggtgtcctgtatgggggcctcaaggtcttggagcaagacagtctcaatgttgtatgggcttgggacctgcatctggccccaagcatctggaactgtgcacttaacctttcttcattacccagacttggatggccttgttggggttcaagggataggtcctctgtctcttcctttaaattattaactatttattacatccggaacctgtgagattcagcactcccaaccagaccctgggatgggtgagagaaaagcgggggtgtctctcccctccccactctgcccagctctcatcactgtcagacccaccagagctgagggcggagggattgggggctggggcagcctgggtccccatgcccctctctgtgcctcggtctccccccttccatggtgggcgggggggaagctccattcttaacctacctcgttttggggaggggtgggacgggggaccagagtgctgtacggtgctgtgggatctgcagatgaagcggtgggggctaaggaaaggtcccctggccgccacttcccagcagcgcctctcccaggtcccccagtcctgctccctgctgagacccacctctgatccatgattccccttcattgcccccaaatcaggggtacatggagggccgccctgggagccaggcagacctcagaccctggagcccccaggcccaatttcccagccgcttgcccctcagatcggatgcttggcccccagatttgggggaggcaccccaacatatatcttcctgatcttgtttctaagccagtctgtgacctcaatattgttagtgtcagtgcaggctgaagtggtgggggaggatgggggccaaagacccagccttgtcatcgggggagggggcacgagatctgctccaagaaatgtctgtgacaaagtctca

SEQ ID NO: 186163 - DNA, 478 bp, Homo sapiens
  Payload ID: 16659
  Gene Symbol: SPRED3
  Gene Name: sprouty-related, EVH1 domain containing 3
  ENST ID: ENST00000586958
  CDS Start-End: 5-370
gtacatggtgcgggtccgagctgtggtgatggcccgagatgactccagtgggggctggctgcctgtggggggcgggggcctcagccagacaaccttggagtgtacactgaagccaggcttggtttacaacaaggtgaatcccatctttcaccactggagcctgggtgactgcaagtttggactgacgtttcagagccctgcagaggctgatgagttccagaagagcctgctggctgcgctggccgcactgggtcgaggctcactcaccccctcctcctcctcctcctcctcctctccttcccaggatactgcagagaccccctgccctctgacgctctcccagtacttcaggcatatgctgtgcccttgacagtggccctaaccgcatccttatgaataggtactcttaggatccccgttttacagaggaggaaactgaggctcaaagagtcccacgtggacagcgactcctcctcca

SEQ ID NO: 186164 - DNA, 1366 bp, Homo sapiens
  Payload ID: 16659
  Gene Symbol: SPRED3
  Gene Name: sprouty-related, EVH1 domain containing 3
  Uniprot ID: Q2MJR0
  ENST ID: ENST00000586301
  CDS Start-End: 131-1363
ctctggatgtgtcttcggtcgcccgtttctgacttcctctgcctccgtctccctctgagcctctctttctggccatttctggttctctccctgttccctgcccatctcccgttgctgggtgactcagtacatggtgcgggtccgagctgtggtgatggcccgagatgactccagtgggggctggctgcctgtggggggcgggggcctcagccaggtgagcgtgtgtcgggtccgaggggccaggcccgaggggggggcccgccaggggcactacgtcatccacggggaacgcctccgggaccagaaaacaaccttggagtgtacactgaagccaggcttggtttacaacaaggtgaatcccatctttcaccactggagcctgggtgactgcaagtttggactgacgtttcagagccctgcagaggctgatgagttccagaagagcctgctggctgcgctggccgcactgggtcgaggctcactcaccccctcctcctcctcctcctcctcctctccttcccaggatactgcagagaccccctgccctctgacgtcccacgtggacagcgactcctcctccagtcacagccgccaggagactcctcccagcgccgctgcggcccccatcatcacgatggagtcagcttcaggcttcgggccgaccacgcccccccagcgccgccgctcctccgctcagagctaccctccgcttctaccgttcacggggattccggaaccctcagagcccctggcaggggcagggggcctggggtggggcggccgcggctacgaggattaccggcgctccgggccacccgcgcccctcgccctgtccacctgcgtcgtgcgcttcgccaagaccggcgcgttgaggggcgctgccctgggtcccccagcggcactacctgcccctttgaccgaggctgcgcccccagcgccccccgctcgcccaccccccggcccgggcccatcctctgcgcctgccaaggcctccccggaagcggaggaggcagcgcgctgcgtgcattgccgcgcgctcttccgtcgcagagcagacgggcgtggcggccgctgcgcagaggccccggacccgggtcgcctcctggtgcgccgtctaagctgcctgtggtgcgccgagagcttgctctaccactgcctgtcggacgccgagggcgacttctcggacccgtgcgcctgcgagccgggccacccgcgccccgccgcgcgctgggccgcgctggccgcgctctccctggcagtgccctgcctctgctgctacgcgcccctgcgcgcgtgccactgggtcgcagcgcgatgcggctgcgccggctgcgggggtcgccacgaggaggctgcgcggtgagga

SEQ ID NO: 186165 - DNA, 646 bp, Homo sapiens
  Payload ID: 16659
  Gene Symbol: SPRED3
  Gene Name: sprouty-related, EVH1 domain containing 3
  ENST ID: ENST00000587947
  CDS Start-End: 103-646
agaaagggcagacatggagaagaagatagaggtgagagagaagagatggcatgaggaagaaaggagctgtgtggaagacggtggccatggggttgaaggtacatggtgcgggtccgagctgtggtgatggcccgagatgactccagtgggggctggctgcctgtggggggcgggggcctcagccaggtgagcgtgtgtcgggtccgaggggccaggcccgaggggggggcccgccaggggcactacgtcatccacggggaacgcctccgggaccagaaaacaaccttggagtgtacactgaagccaggcttggtttacaacaaggtgaatcccatctttcaccactggagcctgggtgactgcaagtttggactgacgtttcagagccctgcagaggctgatgagttccagaagagcctgctggctgcgctggccgcactgggtcgaggctcactcaccccctcctcctcctcctcctcctcctctccttcccaggatactgcagagaccccctgccctctgacgtcccacgtggacagcgactcctcctccagtcacagccgccaggagactcctcccagcgccgctgcggcccccatcatcacgatggagtcagcttcaggcttcgggccgaccacgccccccc

SEQ ID NO: 186166 - DNA, 1539 bp, Homo sapiens
  Payload ID: 16659
  Gene Symbol: SPRED3
  Gene Name: sprouty-related, EVH1 domain containing 3
  ENST ID: ENST00000587013
  CDS Start-End: 79-1443
cgtagaccaccacctctttagaaccttgagaccagtccctgtccctgccccgtcccctcctcatagcattagagaccaatggcgcagatgggtggaaaagtgggggatcccctctggatcttaagaaaatgggggctggggggttgctctctggagctagtgccgggctctaggacccagcaggcaagtaagcccgcctcgctcttacccctcccccaagccgccccttccccccccacccgtcttccaggttccccctccctcccccctcgccccggctcccggtgcccgtctccagcgccgccggagccagccagggagccggaacgaaaaggaggaggaggaggccgcgtcgccgccgctcggagcccggccggagcctcgcagacaaccttggagtgtacactgaagccaggcttggtttacaacaaggtgaatcccatctttcaccactggagcctgggtgactgcaagtttggactgacgtttcagagccctgcagaggctgatgagttccagaagagcctgctggctgcgctggccgcactgggtcgaggctcactcaccccctcctcctcctcctcctcctcctctccttcccaggatactgcagagaccccctgccctctgacgtcccacgtggacagcgactcctcctccagtcacagccgccaggagactcctcccagcgccgctgcggcccccatcatcacgatggagtcagcttcaggcttcgggccgaccacgcccccccagcgccgccgctcctccgctcagagctaccctccgcttctaccgttcacggggattccggaaccctcagagcccctggcaggggcagggggcctggggtggggcggccgcggctacgaggattaccggcgctccgggccacccgcgcccctcgccctgtccacctgcgtcgtgcgcttcgccaagaccggcgcgttgaggggcgctgccctgggtcccccagcggcactacctgcccctttgaccgaggctgcgcccccagcgccccccgctcgcccaccccccggcccgggcccatcctctgcgcctgccaaggcctccccggaagcggaggaggcagcgcgctgcgtgcattgccgcgcgctcttccgtcgcagagcagacgggcgtggcggccgctgcgcagaggccccggacccgggtcgcctcctggtgcgccgtctaagctgcctgtggtgcgccgagagcttgctctaccactgcctgtcggacgccgagggcgacttctcggacccgtgcgcctgcgagccgggccacccgcgccccgccgcgcgctgggccgcgctggccgcgctctccctggcagtgccctgcctctgctgctacgcgcccctgcgcgcgtgccactgggtcgcagcgcgatgcggctgcgccggctgcgggggtcgccacgaggaggctgcgcggtgaggacggcctggtgggtcccctagccggcccgaggacccaaaattgagggtccaggaccccggactccgttcggacctaaaacccaaacctaggcac

SEQ ID NO: 186167 - DNA, 1667 bp, Homo sapiens
  Payload ID: 16660
  Gene Symbol: SPRTN
  Gene Name: SprT-like N-terminal domain
  Uniprot ID: Q9H040
  ENST ID: ENST00000008440
  CDS Start-End: 129-752
gacgggccgtctcgagagccggcatctcctaggagctagtcctggtcctcggctaggcggcttggggtcgcggcgtaactggggagccagcctgacgccggcggaccccgcctgtgatcctggcaacgatggatgatgacttgatgttggcactgcggcttcaggaggagtggaacttgcaggaggcggagcgcgatcatgcccaggagtccctgtcgctagtggacgcgtcgtgggagttggtggaccccacaccggacttgcaggcactgtttgttcagtttaacgaccaattcttctggggccagctggaggccgtcgaggtgaagtggagcgtgcgaatgaccctgtgtgctgggatatgcagctatgaagggaagggtggaatgtgttccatccgtctcagcgaaccccttttgaagttgaggccaagaaaggatcttgtagaggtataccatacttttcacgatgaggtggatgagtatcggcgacactggtggcgctgcaatgggccgtgccagcacaggccaccgtattacggctatgtcaaacgagctactaacagggaaccctctgctcatgactattggtgggctgagcaccagaaaacctgtggaggcacttacataaaaatcaaggaaccagagaattactcaaaaaaaggcaaaggaaaggcaaaactaggaaaggaaccagtattggccgcagagaataaaggtaccttcgtgtatattcttctgatttttatgtgaccatagctatgatgtaaagacaatactgtccttcagagaactggtattaagataaacttaaggatcgtttctggtgtagaagtcttcaagtgtagacttaaggaaaaaatcccactgtccatgaaatgatggtaggaaaacagactttgctctgtacagaagtaagtaaaagtaggaatagtttccatggatatttttatttttattaacttttttcagtttctttttattcaaagaaacaaaattcaatctctgataatatttgaggtaaagttcctttccctatcttgactcactgagttattaggaaacagaaggcaaaaagattgtcaaaataaaaacaataattcaagtaacaatgcccggaatatacgtcctaactacaccccttcctatcagctggattctatccaagtgactctattgatgtatgtatgttcattcaaagaatgggaaaaggatatgacatatatttgccagtacttcatcttcaagatttacccttttcctgtgaagttcagagttactgaagatgcttcttcccttgggaagttgttgacccaagaacataggttatatttcccaaatctttaattattgagtgaaagagctatagatgaattgatatggaaagaccgtatcttcattttcgtgagtagaaggaaagataagaatgaggcagcagattttccctcctggaattacacataaaggacactaagcaattttcaaggtaaatgttgccttgttgttggtctttggcatgataagattctttatttaaatatgagagaatttttttttatcctttatattctctcaatatcagaactcctgaattctgaagattgccctcctcccattaataggattgtatggatgtaagatggaataaaatactagttcttcattttg

SEQ ID NO: 186168 - DNA, 3468 bp, Homo sapiens
  Payload ID: 16660
  Gene Symbol: SPRTN
  Gene Name: SprT-like N-terminal domain
  Uniprot ID: Q9H040
  ENST ID: ENST00000295050
  CDS Start-End: 337-1806
tgaggtttgaaataaccggcaaagagtaaaggctgaaactagcttcctgaaagcttcgtagggcccgagccctgtgagcccaggttctgcgcccactaggaggtgtcatgctgactgctttttttaaagccctagaatcttggcttcggcgtttggggtaagctccgttctcgttctcaagcgcgtttccgcgaactctcgcgggattgacgggccgtctcgagagccggcatctcctaggagctagtcctggtcctcggctaggcggcttggggtcgcggcgtaactggggagccagcctgacgccggcggaccccgcctgtgatcctggcaacgatggatgatgacttgatgttggcactgcggcttcaggaggagtggaacttgcaggaggcggagcgcgatcatgcccaggagtccctgtcgctagtggacgcgtcgtgggagttggtggaccccacaccggacttgcaggcactgtttgttcagtttaacgaccaattcttctggggccagctggaggccgtcgaggtgaagtggagcgtgcgaatgaccctgtgtgctgggatatgcagctatgaagggaagggtggaatgtgttccatccgtctcagcgaaccccttttgaagttgaggccaagaaaggatcttgtagagaccctcctgcatgaaatgatacatgcctatttatttgtcactaataacgacaaagaccgagaagggcatggtccagaattttgtaaacatatgcatcgcatcaacagcctgactggagccaatataacggtataccatacttttcacgatgaggtggatgagtatcggcgacactggtggcgctgcaatgggccgtgccagcacaggccaccgtattacggctatgtcaaacgagctactaacagggaaccctctgctcatgactattggtgggctgagcaccagaaaacctgtggaggcacttacataaaaatcaaggaaccagagaattactcaaaaaaaggcaaaggaaaggcaaaactaggaaaggaaccagtattggccgcagagaataaagataaacccaacagaggtgaggcccagctagtaatcccttttagtgggaaaggatatgttctaggagaaacaagcaatttaccttcacctgggaaactgatcacttcacatgccattaataaaacccaagatcttttaaatcaaaaccattcagcaaatgctgtaagacctaattctaaaatcaaggtgaaatttgaacagaatggttcaagtaaaaattctcatctggtctcccctgctgttagtaacagtcaccaaaatgttctaagcaactactttcctagagtatcatttgccaaccaaaaggctttcagaggtgtgaatggatctccaaggataagtgtaacagttggcaacatccctaaaaactcagtctcttctagttctcagagaagggtttcatcttctaagatatccctaagaaattcttcaaaagtaacggaatcagcatctgtgatgccatcccaggatgtgagtgggtctgaagatacattcccaaataaacgacctaggctagaagataagactgtttttgacaatttttttatcaagaaagagcaaataaaaagcagtggtaatgatccaaagtatagtacaaccacagctcagaattccagcagttcatccagtcagagcaaaatggttaattgcccagtttgtcagaatgaagttctggagtctcagattaatgagcacttggactggtgccttgaaggtgacagcatcaaagtcaaaagcgaagaaagtctttgaaaaaggtttcaaagtctcaagtaccacctgtattatctcactaatgtgctatgtcagccagtcaggaagttctggttaatactaagatttgtaggttataatctagttcacataaccaatagaaagtgtcctattttatatatacgcatataagattgtaattttaagatgttttgtgtctcagggtgctacattcactcttgccttaggtatactgtaacccaggttctgcctgtcgtgtataagttttagatacttttgttctttcttgctcttaaggattttaaaaacctgttaatctttttatttgtatactttcctaaaaatattcatatggggaatcctgtcaggtgtttggttatattgactatttattaatagtattagaactcattccctgaactgatgtaaatcttcatagtgtcagacatactgaccaaaaccacaatctagactacaaagtatattgttttagagtactcaaattgtattatttattaatttttttgtttgcaaaatcttaacaggaactgtattttctatattttaaagaattttatttgtcccacttttactaaacagtggcagcagattttaagttaaagaatatggaatatagtaaaataagtaaatttcttttggaatatttttagtaacaaatagccactataattctgtaggccaaattttatattgagtttagctgttttctcaaaatttagcagagtggttaaaattctgtgctgataagtaactgatacatataacataaacataacaaagttgcctagttgatgtaacagtggaaagttatctggaaatagtattttgaactttaagccaagtttaaaacattataataaaaggaataccatttgtgcattttaagtaatcttttttaaaaaaaatattttccatgttatagggaaaggacaaagagacttttatcagtttgctttttgtcttgtggctgtacatgctgttggcatagccctaacacagttgttcacaagttttcttttttcttgttgcaattttccttcactttgttgtaatacaggtgcacaaatcttaagtgcacagctgggtaaacttttacagtgttcacctgtgtaactaccacccggatcaagttagagaacacttccattgccacagaaggcttcctataggtgtctgttcccagttgatacccatgaccctcaccacctccagaggtccccactgttttcaccccatcgtcgcagattattttttaattttataatgtagtatctttgttcctatgtatagcaggagttcattttcattgctcttgcatttgtatgaatatactagaatttattcatccattctaatgttaatggacatttgaattatttccagtttggggctgttaagcataatgctgctaagaacattcttatcttttctgttgggtatatatacaggaatggaattgctgagtcacggggtatatttctgtttagctttagtaaattctgccagtttacactcctaccagcaatgtatgagagttttagttgttcaccattcataacactgttagcagcccttttcgttttagactggttggctgttcacaaattttgatattccttaaagcattaaaacattttaataaatacttataaataggta

SEQ ID NO: 186169 - DNA, 795 bp, Homo sapiens
  Payload ID: 16660
  Gene Symbol: SPRTN
  Gene Name: SprT-like N-terminal domain
  ENST ID: ENST00000366644
  CDS Start-End: 235-795
ttgggccatgtggtccgcatcgtattccactaggtccccgttgtacaccaggtgtgctgggatatgcagctatgaagggaagggtggaatgtgttccatccgtctcagcgaaccccttttgaagttgaggccaagaaaggatcttgtagagcataattttataagactaaaattcattaatgacagtctagttcttctgatggaaattgttttttaaaaaaattatggaggatcatgaaaaagaccctcctgcatgaaatgatacatgcctatttatttgtcactaataacgacaaagaccgagaagggcatggtccagaattttgtaaacatatgcatcgcatcaacagcctgactggagccaatataacggtataccatacttttcacgatgaggtggatgagtatcggcgacactggtggcgctgcaatgggccgtgccagcacaggccaccgtattacggctatgtcaaacgagctactaacagggaaccctctgctcatgactattggtgggctgagcaccagaaaacctgtggaggcacttacataaaaatcaaggaaccagagaattactcaaaaaaaggcaaaggaaaggcaaaactaggaaaggaaccagtattggccgcagagaataaagataaacccaacagaggtgaggcccagctagtaatcccttttagtgggaaaggatatgttctaggagaaacaagcaatttaccttcacctgggaaactgatcacttcacatgccattaataaaacccaagatcttttaaatcaaaaccattcagca

SEQ ID NO: 186170 - DNA, 3559 bp, Homo sapiens
  Payload ID: 16660
  Gene Symbol: SPRTN
  Gene Name: SprT-like N-terminal domain
  Uniprot ID: Q9H040
  ENST ID: ENST00000391858
  CDS Start-End: 1281-2033
caccaacaagcaatcgttcatgagaaagccgtgcacccgctgcagttgggccatgtggtccgcatcgtattccactaggtccccattgtacaccaagtactgtcccggcgtctccagcagatgcctgcagccttccaccttctcaagcagggtggtgagagtgcgctgctttccttcctcgcctggaccggagccgtcgcgggaggcacccccgggggtggagaaaaagccggcctggcctcggaggtggtctcggccccccgccccaccgactccctcctcccctccagaggcggcggcggctccggcggcagcagcggcaggcagcaacgtaagcgggatgctctccaggctgcttttctgctcggtcagcaaatggctgagctggtacatctcgctctccaggtaggagatctcgcgggccgtctctatgaactgccggtagttctggtagacgttgcgcttcaggttctgcgccgtctcctccgccagcgcctggatgcgctgccggtgctcctggaggtcccggtccccatccgactgctgcgagagctgcttcacgtacagccgcgcctcaaaaccccctgactccagctgccgacgcaggcggctcgccccactgtccgacatcgccatcgccatttctctccgggtctcacgcactcactgtcactatcggcgccgcagccgccgcggctgtctagacccacccaaggccaaccgagctcctgggctgaggaagcaggaatgggaacgagacgagtacgcctgcgccgggtctgagcgtcagacactgcgcctgcgcaagtgggccgagcgcagacattgcgcctgcgcagcaatgccatcggttaaagcgcatgcgcaagatgagctattgcggaagtgaggggagggagaggccgagagaaatttcggtactgcgcatgaaccgagcgtgacgttgaggtttgaaataaccggcaaagagtaaaggctgaaactagcttcctgaaagcttcgtagggcccgagccctgtgagcccaggttctgcgcccactaggaggtgtcatgctgactgctttttttaaagccctagaatcttggcttcggcgtttggggtaagctccgttctcgttctcaagcgcgtttccgcgaactctcgcgggattgacgggccgtctcgagagccggcatctcctaggagctagtcctggtcctcggctaggcggcttggggtcgcggcgtaactggggagccagcctgacgccggcggaccccgcctgtgatcctggcaacgatggatgatgacttgatgttggcactgcggcttcaggaggagtggaacttgcaggaggcggagcgcgatcatgcccaggagtccctgtcgctagtggacgcgtcgtgggagttggtggaccccacaccggacttgcaggcactgtttgttcagtttaacgaccaattcttctggggccagctggaggccgtcgaggtgaagtggagcgtgcgaatgaccctgtgtgctgggatatgcagctatgaagggaagggtggaatgtgttccatccgtctcagcgaaccccttttgaagttgaggccaagaaaggatcttgtagagaccctcctgcatgaaatgatacatgcctatttatttgtcactaataacgacaaagaccgagaagggcatggtccagaattttgtaaacatatgcatcgcatcaacagcctgactggagccaatataacggtataccatacttttcacgatgaggtggatgagtatcggcgacactggtggcgctgcaatgggccgtgccagcacaggccaccgtattacggctatgtcaaacgagctactaacagggaaccctctgctcatgactattggtgggctgagcaccagaaaacctgtggaggcacttacataaaaatcaaggaaccagagaattactcaaaaaaaggcaaaggaaaggcaaaactaggaaaggaaccagtattggccgcagagaataaaggtaccttcgtgtatattcttctgatttttatgtgaccatagctatgatgtaaagacaatactgtccttcagagaactggtattaagataaacttaaggatcgtttctggtgtagaagtcttcaagtgtagacttaaggaaaaaatcccactgtccatgaaatgatggtaggaaaacagactttgctctgtacagaagtaagtaaaagtaggaatagtttccatggatatttttatttttattaacttttttcagtttctttttattcaaagaaacaaaattcaatctctgataatatttgaggtaaagttcctttccctatcttgactcactgagttattaggaaacagaaggcaaaaagattgtcaaaataaaaacaataattcaagtaacaatgcccggaatatacgtcctaactacaccccttcctatcagctggattctatccaagtgactctattgatgtatgtatgttcattcaaagaatgggaaaaggatatgacatatatttgccagtacttcatcttcaagatttacccttttcctgtgaagttcagagttactgaagatgcttcttcccttgggaagttgttgacccaagaacataggttatatttcccaaatctttaattattgagtgaaagagctatagatgaattgatatggaaagaccgtatcttcattttcgtgagtagaaggaaagataagaatgaggcagcagattttccctcctggaattacacataaaggacactaagcaattttcaaggtaaatgttgccttgttgttggtctttggcatgataagattctttatttaaatatgagagaatttttttttatcctttatattctctcaatatcagaactcctgaattctgaagattgccctcctcccattaataggattgtatggatgtaagatggaataaaatactagttcttcattttgagaaaactgtacattagtttaatgtttgttactgtatttcttttgagttgaggcacttacataacaatcttctttgcttttttggcagataaacccaacagaggtgaggcccagctagtaatcccttttagtgggaaaggatatgttctaggagaaacaagcaatttaccttcacctgggaaactgatcacttcacatgccattaataaaacccaagatcttttaaatcaaaaccattcagcaaatgctgtaagacctaattctaaaatcaaggtgaaatttgaacagaatggttcaagtaaaaattctcatctggtctcccctgctgttagtaacagtcaccaaaatgttctaagcaactactttcctagagtatcatttgccaaccaaaaggctttcagaggtgtgaatggatctccaaggataagtgtaacagttggcaacatccctaaaaactcagtctcttctagttctcagagaagggtttcatcttctaagatatccctaagaaattcttcaaaagtaacggaatcagcatctgtgatgccatcccaggatgtgagtgggtctgaagatacattcccaaataaacgacctaggctagaagataa

SEQ ID NO: 186171 - DNA, 2932 bp, Homo sapiens
  Payload ID: 16661
  Gene Symbol: SPRYD3
  Gene Name: SPRY domain containing 3
  Uniprot ID: Q8NCJ5
  ENST ID: ENST00000301463
  CDS Start-End: 88-1416
cctctaggagtgaaggaaaggcggggacccggatgtgtgtggtggcggcggccgaagagcttgtgtgcggagctgagaggcctatggatgaggaggacgcggcggccccggtttgttctcatgaacaagatggatgacctcaacctgcactaccggtttctgaattggcgccggcggatccgggagattcgagaggtccgagctttccgatatcaggagaggttcaaacatatccttgtagatggagatactttaagttatcatggaaactctggtgaagttggctgctacgtggcttctcgacccctgaccaaggacagcaattattttgaggtgtctattgtggacagtggagtccggggcaccattgctgtggggctggtccctcagtactacagcttggatcaccagcctggctggttgcctgactctgtagcctaccatgctgatgatggcaagctgtacaatggccgagccaagggccgccagtttgggtcaaagtgcaactccggggaccggattggctgtggcattgagcctgtgtcctttgatgtgcagaccgcccagatcttcttcaccaaaaatgggaagcgggtgggctctaccatcatgcccatgtccccagatggactgttcccagcagtgggcatgcactccctgggtgaggaggtgcggctgcacctcaacgctgagctgggccgtgaggacgacagcgtcatgatggtggacagttacgaggatgaatggggccggctacatgatgtcagagtctgtgggactctgctggagtacttagggaagggcaaaagcatcgtggatgtggggctggcccaggcccggcacccactcagcacccgcagccactacttcgaggtggagatcgtggaccctggagagaaatgctacatcgccctggggctggcacggaaggactatcccaagaacaggcaccctggctggagcagagggtctgtggcttatcatgcagacgatgggaagatcttccatggcagtggtgtgggggacccctttgggccacgctgttacaaaggggacatcatgggctgtggaatcatgttcccccgggactacattttggacagtgagggggacagtgatgacagttgtgacacagtgatcctgtctccgactgcccgggccgtccggaacgtgcggaatgtcatgtacctgcaccaggaaggggaagaggaagaggaggaagaggaagaggaagaggatggggaagagatagagccggagcatgagggcaggaaggtggtggttttcttcactcggaatggcaagatcattgggaagaaggatgctgttgttccttctggaggcttcttccccaccattggaatgctgagctgcggggagaaagtcaaagtagatctgcaccccttgagtggctagggcctcccctccagacctgctccttctccctgctcaccctctgctgggccaggcacccagttcctgacttcccagaggcttcgtttacccagcaggcccctggaggtgtgtagtcactctgcccccactggctcaggcccctgtcacgcttctctgtgcccacgtttctgacctggtgctgccactgttgtcagtccctgggcctgagtccctggttggacaggaatggacccaaagaatggtgttggtatgtgggtggtcccactcgctttggtcagtgggcttctgggtccccctttccctcaccggccctgtgtgggtggagaggcgtgagcaccctatctcagctgctattcgggcatgatgctttgtagagggtagagtagacagccccctcccctactcaccatggtatttctccttgaattcctctttcttgttttctttcctggttgtgtgaaccagttgctgctgtcatacccctggcagggccaggggacctctctttggtcatctctgtcctttcactggctgctgccccaggaagactcctctaggctctccatctttcccttgagagctggctccccaccccaacctgctcaggcaccacagaggatctaggtctctggctccccatacctggacccacatgggtgggtgcctgttgcatgtttaagagagaggggctgtgaggtgacagggcactagggccttcactcctttctccccttccatcctttctttaccagtgccacccatgtccctagctcccgggtattggggctgaggctctggggcctgtctccctgccagcgtgagggcaagaccccagagccttagctgagcaagcccagaggggcagcgtggcccctccctccccttttcctgccccgtcccatgcctcagcttgctgcttgtgccagttgcctgtttcgcttcagtgtttgattctagcacttacatgtgtcctccccaccaagccctctatctccttctaatccttcaacccctggccccctccccgtaacagtgacttttccagggaggaagaggcagcaggagctgttggccttggtttgcacagagcgggtagggctgtagggaaagcgggtgagctgttgtgctgctgggcctccctttggccctcgcttcccaccctacgatgtatgaaatgtatgtacagaccagagatgtttatacagccgataaagatggagtttccgtatttatcagtatggccggaaccaggagcctttctagtccactgggctaggaacaggactgctggatgggggcagccgaaggcagcttgctcatggggagatgtggaccaatgttgggccagggatgggaatcatatgttccatgggcctggctacaggcctgagcacagatacgtcccctgggagatgaggctttgaccttcctgtgaataagtgttgactccaatttcggctaaagtttatagaaattctttattattagacaaaaatagactctcttttttccccta

SEQ ID NO: 186172 - DNA, 927 bp, Homo sapiens
  Payload ID: 16661
  Gene Symbol: SPRYD3
  Gene Name: SPRY domain containing 3
  ENST ID: ENST00000537540
  CDS Start-End: 72-569
aaaggcggggacccggatgtgtgtggtggcggcggccgaagagcttgtgtgcggagctgagaggcctatggatgaggaggacgcggcggccccggtttgttctcatgaacaagatggatgacctcaacctgcactaccggtttctgaattggcgccggcggatccgggagattcgagaggtccgagctttccgatatcaggagaggttcaaacatatccttgtagatggagatactttaagttatcatggaaactctggtgaagttggctgctacgtggcttctcgacccctgaccaaggacagcaattattttgaggtgtctattgtggacagtggagtccggggcaccattgctgtggggctggtccctcagtactacagcttggatcaccagcctggctggttgcctgactctgtagcctaccatgctgatgatggcaagtgggctctaccatcatgcccatgtccccagatggactgttcccagcagtgggcatgcactccctgggtgaggaggtgcggctgcacctcaacgctgagctgggccgtgaggacgacagcgtcatgatggtggacagttacgaggatgaatggggccggctacatgatgtcagagtctgtgggactctgctggagtacttagggaagggcaaaagcatcgtggatgtggggctggcccaggcccggcacccactcagcacccgcagccactacttcgaggtggagatcgtggaccctggagagaaatgctacatcgccctggggctggcacggaaggactatcccaagaacaggcaccctggctggagcagagggtctgtggcttatcatgcagacgatgggaagatcttccatggcagtggtgtgggggacccctttgggccacgctgttacaaaggggacatcatgggctgtggaatcatgtt

SEQ ID NO: 186173 - DNA, 635 bp, Homo sapiens
  Payload ID: 16661
  Gene Symbol: SPRYD3
  Gene Name: SPRY domain containing 3
  ENST ID: ENST00000547257
  CDS Start-End: 1-181
ggatggggaagagatagagccggagcatgagggcaggaaggtggtggttttcttcactcggaatggcaagatcattgggaagaaggatgctgttgttccttctggaggcttcttccccaccattggaatgctgagctgcggggagaaagtcaaagtagatctgcaccccttgagtggctagggcctcccctccagacctgctccttctccctgctcaccctctgctgggccaggcacccagttcctgacttcccagaggcttcgtttacccagcaggcccctggaggtgtgtagtcactctgcccccactggctctccatctttcccttgagagctggctccccaccccaacctgctcaggcaccacagaggatctaggtctctggctccccatacctggacccacatgggtgggtgcctgttgcatgtttaagagagaggggctgtgaggtgacagggcactagggccttcactcctttctccccttccatcctttctttaccagtgccacccatgtccctagctcccgggtattggggctgaggctctggggcctgtctccctgccagcgtgagggcaagaccccagagccttagctgagcaagcccagaggggcagcgtggcccctccctcc

SEQ ID NO: 186174 - DNA, 1655 bp, Homo sapiens
  Payload ID: 16661
  Gene Symbol: SPRYD3
  Gene Name: SPRY domain containing 3
  ENST ID: ENST00000547837
  CDS Start-End: 45-1484
ggcggcggccgaagagcttgtgtgcggagctgagaggcctatggatgaggaggacgcggcggccccgggtcttgctctgtcagccaggctggaatgtagtggcacaatcagaactgactgcagccttgacctgccagactcaagccatcttcagtctccttagtagctgggactacaggtttgttctcatgaacaagatggatgacctcaacctgcactaccggtttctgaattggcgccggcggatccgggagattcgagaggtccgagctttccgatatcaggagaggttcaaacatatccttgtagatggagatactttaagttatcatggaaactctggtgaagttggctgctacgtggcttctcgacccctgaccaaggacagcaattattttgaggtgtctattgtggacagtggagtccggggcaccattgctgtggggctggtccctcagtactacagcttggatcaccagcctggctggttgcctgactctgtagcctaccatgctgatgatggcaagctgtacaatggccgagccaagggccgccagtttgggtcaaagtgcaactccggggaccggattggctgtggcattgagcctgtgtcctttgatgtgcagaccgcccagatcttcttcaccaaaaatgggaagcgggtgggctctaccatcatgcccatgtccccagatggactgttcccagcagtgggcatgcactccctgggtgaggaggtgcggctgcacctcaacgctgagctgggccgtgaggacgacagcgtcatgatggtggacagttacgaggatgaatggggccggctacatgatgtcagagtctgtgggactctgctggagtacttagggaagggcaaaagcatcgtggatgtggggctggcccaggcccggcacccactcagcacccgcagccactacttcgaggtggagatcgtggaccctggagagaaatgctacatcgccctggggctggcacggaaggactatcccaagaacaggcaccctggctggagcagagggtctgtggcttatcatgcagacgatgggaagatcttccatggcagtggtgtgggggacccctttgggccacgctgttacaaaggggacatcatgggctgtggaatcatgttcccccgggactacattttggacagtgagggggacagtgatgacagttgtgacacagtgatcctgtctccgactgcccgggccgtccggaacgtgcggaatgtcatgtacctgcaccaggaaggggaagaggaagaggaggaagaggaagaggaagaggatggggaagagatagagccggagcatgagggcaggaaggtggtggttttcttcactcggaatggcaagatcattgggaagaaggatgctgttgttccttctggaggcttcttccccaccattggaatgctgagctgcggggagaaagtcaaagtagatctgcaccccttgagtggctagggcctcccctccagacctgctccttctccctgctcaccctctgctgggccaggcacccagttcctgacttcccagaggcttcgtttacccagcaggcccctggaggtgtgtagtcactctgcccccactggctcaggcccctgtcacgcttctctgtgcccacgtttctga

SEQ ID NO: 186175 - DNA, 10779 bp, Homo sapiens
  Payload ID: 16662
  Gene Symbol: SPRYD4
  Gene Name: SPRY domain containing 4
  Uniprot ID: Q8WW59
  ENST ID: ENST00000338146
  CDS Start-End: 26-649
gtgcccggttcatccaaggcgcaagatggcgctgctttttgcacgttctttgcgcttgtgccgctggggagccaaacgattgggagttgcctccacagaggcccagagaggcgtcagtttcaaactggaagaaaaaaccgcccacagcagcctggcactcttcagagatgatacgggtgtcaaatatggcttggtgggattggagcccaccaaggtggccttgaatgtggagcgcttccgggagtgggcagtggtgctggcagacacagcggtcaccagtggcagacactactgggaagtgacagtgaagcgctcccagcagttccggataggagtggcagatgtggacatgtcccgggatagctgcattggtgttgatgatcgttcctgggtgttcacctatgcccagcgcaagtggtacaccatgttggccaacgagaaagccccagttgagggtattgggcagccagagaaggtggggctgttgctggagtatgaggcccagaagctgagcctggtggatgtgagccaggtctctgtggttcacacgctacagacagatttccggggtccagtggtgcctgcctttgctctctgggatggggagctgctgacccattcagggcttgaggtgcccgagggcctctagtatgtccattactggagtccctaatcacgcctttggccagcctccttttgaaagtgtccgaagcctttttactttgcctcaagcaacctctagctcccacaattcagtgttgggtcctctgtgcaatatcatgatcatcttcctcatcccctaccttgtgaaagctaggcatacagccaaaccctccttttccccacccaccaactactgccaatttcctaggctaccatgggtgtatcttccttgacctgcttccttcagtccctctgcctccctttgcccaggcctttctcagactgtattccatcctggggtcttatcattcagctttgtttgaatttattaatcaccatgatacctctccctccctttgtccacatgtaacttgttcttggggctctaccagatggctgaagagtaaatcctttctacctctggctgaaggagtggtgcagtcaatgacttggccctttttctacagcacatttagagtttgggctctggctccctcagtaagtgctttattaactcagtgtgtcaaaatgaaaacagagccctccttccccagtagctcagtgccacagaccttcagccccacacagctgtagctatccttaccctgagtccatctaccttaaatctgtacctctgacacccagccagtctgtcataatcattatcccagttataaccttgaccaaaggggaagagagacacttgggggatatctaggggatgagtgctagaaactatttatttatttttgagacagagtctcactctgtcacccaggctggagtgcagtggcatgatcttggctcactgcaaactctgccttttgggttcaagcgactctcgtgcctcagcctcctgagtagctaggattacaggtgtgtgccaccatgcccgtctcatttttatatttttagtagagatggggttttgccatattggccaggctggtctcgaactcctggcctcatgtgatcagcccaccttggcctcccaaagtgctgggatttcaggcgtgagccaccacacccggccaaaactgtttattcttgagaagttccatcttcatttctgccacagttggaacttcccgaggaaggaaggaggcctgaggttttgcacaatctgtttcagagcctgtttagactcaaacctatgcttcccttggcagcagaatacacttaacctaaagcagtatttggagttgagaaaaacctggtggggtaagtgaatatgtactgtttggtagggtaggtagagaagctgtgctttgaccctgtgattccatctttttctaccttctatgatggtgatgaagctagatacccctagggaagaaagaaggactgggtttagcaaaaatgatttggtaattaaagtttatttgaacacaaaatactttctctgtctataaaattggctgttagcagtagcagcagcatgtcctggccaaggggagtagatttctccagactactaaagccatgtatatagccattcccacttcccatattctgtggatatgtacatgtgcatggtagctagagtccctccaccagagtatctctctcatgatggtttcttcagggagaggaagaggagacctgggtgaagagctgggatggttttgagtggggcaagccattaggctgtaccttgaagcccagtctctctggatagctgtactgcaggtgtcctctgaggcccttctctgtactctgtctgctgagggaatggggtattttgactcccatagaaagcactagcctaagtcaccaaatgactgcttggtccccactgaagcagtgtagctctccatagtatttttggtggttatggattacatgtgtggccagctcatgctttttcttgagcaggggctgtccatgacctgtgctcataccatgctttctaagttctctttggacagggcctcagctgctgcctcagcctgagtttcagagagtgtgtaggagtcctggtaatcttgaagcagtttgaccacctccagatggttgaactgcacagcatcatccaggggaatgttgccccacctgagaggaataatgatatgatcaggcaaaggagacgtggagagtggtggttgtatatatttgcatggtggctggagggtaggtggagaagctgtgcccaccctcctccacttttagcctattcctcacctgtccttggcaaaaggattcactttgcaagcctcgatcaggaatttaacaacttcgatgtgtcctaggaatatgggcagaaggaaaatgagaaggcgcaggtcttgaaccctttggtgcagacacttagccactgaagtctttaccaagaggggaggggaaaaggcctcttcccattttgtaccctgcagcactcagtcatagtctagctgcaaaccgaagggtgtctagataaaactagttgctgcccctataaccttgagggcacatataatgaaggtacttttggtgaaaaagaaagggtcttatgattaccctcctcctcccctccttaacccttcagtaccttcagctgcagcaacatgcagagctgtgcgcgagtcatagtctttctgttccatatccatggctgacaaggcaaacctgagggtagtgggaaagcagctagagttgcctagatcagactggaatcacaggtgttctttgtgaactggtgtcagactggatgagtttcagagaaagtgaaacagcctatagccagatttgttggctctgaataatcttttttccatatccagatgagactgttatactcatattagagagatgggaatgtgatccttccagaaatatcactcactgcctacctgtggtaagtgcccatttgaggcagggtacctacttcctaggacactgctcttaacactcaataacaatggctaacattaattatcatagagcagacagtttactttttttaaaaaaaatctccttttttaaaaaaatttcatttaaatgcaatctatatccattctaattccaaagctgaagcacttaactattttgttacgctgcctcctagtaaaatctctgaccaggagtattttattgtgtatatttggtcacagtagcattaccttcgaagagctgagacatcgccactataggcagcaaataacaggttgaccacagtcttgttctggaacacaaatcatacccacatgacattaattgaactcacctatgccagctgtgccctgtgaccctcctccatggatgcttagtccaagggtattgctgaagtgttatggaatgtgctactctgaaatattcttttttttttttttttttttgagacggagtctcgctctgtcgttcaggctgaagtgtagtggcgcgcggtcttggctcactgcaacctctgcctcccggtttcaagcgattctcctgcctcagcctcccaagtagctgggaccacaggcgcgtgccaccacgtctggctaattttttgtattttcaatagagaccaggtttcaccgtgttagccaggatggtcttgatctcctgaccttgtgatccgcccgccttggcctctcaaagtgcagggattacaggcgtgagccaccgcacctggcctttgaaatattcttacaagccacctggagttttccttacccgaatttctgccccttcacgccgtgggtctaacttccgagcacagtgcctcaggttgtcatagttgtggaaattgaagagagacaccaacttctagaattgtaagccaaatatattgtttatttactccttacacttagtaggagctcaaaattgctttattatagtaaaagtggtaccattaaacaaatttattgcttcaaaaatagtaagtactatatgcaaagcatctcacctggcagaagctggtccccctatggctgttccccagcttgtccaatgggggtgacaggcacatcattcccatgacattgggtaccaccaggaggatggctcctgatacagctgacttggctggcaggcccacctggggaacagaactgaagctgaggataaagtgggtgtgccccaaatcagaaaataaacaagttaggctgtactcttaacaagtttacaaatgactgcatgaccacaatccacctcaaccttttggcttgttaattagcttcttttattactcctgtcctttccttcccttaaattcattgattcagctagaaaatattttttgaaatacttacagcattctgtgctagatgctgtgctagaactaggaacttccattctggtgttaggagataggtaataaacaggtaaataaatagacacgtaatgtttaaagtaattgtgataaatagtgagaagtagggtgctgtaaatagaggtagaggggggccacatgagatagggtggtcagaaaagtctttctttggaaatgacatctaagctgagaccccaaggagaagagccagcaatgtgaagcacaattcaggagctgcaacacctctggttgtttttctttttctttttttctttttttttgagatggagttttgctcttgttgcccaggctacagtgcaatggcacaatctcggctcagtgcaacctctgcctcccaggttcaagcacttctgcctcagcctcccaagtagctgggattacaggtgcacaccaccacccccggctaattttttgtatttagtagagatggggtttcaccatgtaggtcaggctggtctcgaactcctgacctcaggtgatccacctgcctcggcctcccaaagacatctctttatatattcgaggaacttggtgtttttgagaaactcgtctaaggagtctcaacctaattgccttcctggaagttagtgaatgagaggcaggaacaagcttccacctctatcttgagagagtcagtgttctctcttcttagcactgggctcatgacagatggatagcagagccagaaactcacgtggaaggcaaactggccagagaagtcatacatgccgcaggaatgcatgaggctgagggtgttgcgcactgcttcagcactcagcacactctcgcctgtgatggggcagatcccaccgttggcgagggtggctgccatgacactgcctgattcacaagtgacctccacagaacacagctatgaaaacaaagaataggtgaagatgtgacgtgaacctgcacatgggaccctcgggtgtagggaaagggcaagggcaaggacagtctgtcctgttccctcggccctgagcagtgttttcttacctggaagtagagatcaagggcagccatcatgtccacccccttaggaaagcactgcaaggaagagaggggagagcatttctcttcaggacatcagccctttcacactgtcagggtctcagctgaagcccccaacccctactgcccttccactagcagcagaattcccagggactttctcttccggcctcttctggttaccttcttttccttgagataatagccgatggcataattccgatcccctgtttccttctctgactggaatctgaagcaaacacccaatttagtacttgaagttggaggagtgggtgttgggagaaggggaaaaattaccttccctggagagacagaactacatcacaccacaaactaaatgaacccctttataacttctcacagtaatattagaggaaatttctgaacctgagcaaacactcagcatagttttgttataaagtaaacccaaaccaaacaccccaaactgtctagtcatctaggaaaactggtgaagtttttggctttgaaagtcttggcaagaaagggcttaggcacaaaccatcacactgcctctctcattatgtactaattagaaatggaacaaattattttacaagataaacaaatgtttatgaagggactcagaggaagctggagggccaaagttcccctgggatttcttcctcctaagattctctctcccccattcctcttgtccccatcctaagtacacacacatacaccacaatgctttcagtcagtcctctgagtagggacttacgtggcattgctgaaacccatgtattcattcccagccattttgttgagatactgcaacacctggaagagaaaaagggacattgaggctccacttggttaagaagctctattaatacctcacaggttgactagcccttctgaactcaggtcttgtcaagaggctttcctctctgaggccagcagatttccacatttctggaaataaggcttctagtatgggctggtgcacctggtagtggggttagagagccactggggcagctggagaggacagcatgccatggcgaaatgcagccaggggctaagtagcaagggaacttacaaaatcaaacttctctgctttgttacagtccatctgcagagaaagagagagatgtcagcattctaagtgtaggaggatgacagagggaagggtcagaaggatctagtggagttctagtgttagtctggtcctgctgctgcaaatgtgttcaattttataatggccctttttttatccttctgaaaacaccgcacttccattggctcctctctttctctttcttttttttgagacagtcttgctttgtcacccttgtcacccaggctggagtgcagtggcacgatcatggctcactgcagctttgacctcccaggctcaagcgatcctcccacttcagcctccaagtagctcggattacaggcatgagccagcttgctgggccatcccacttccattctcaatccaaaccctcatccctgactcccacgttcattttcctgactcgaatcctgtctcctagccccaccctatccctgatctccatccccattccttacaccccatgctggagctttactccatcccattggccagcatgatggttcatgcctgtaatctcagcaatttggggggctgaggcaggaggatcgcttgagaccaggggtttgagaccagcctaggcaacataggagagaccctgcctcaatttttttttttttttttttttgagatggagtcttgctctgtcgcccaggctggagtgcagtggcaggatctcggctcaactgcaagctccgcctcccgggttcataccattctcctgccttagcctcccgagcagctgggaccacaggtgcccaccaccaagcctggctaattttttgtatttttagtagagacggggtttcaccgtgctagccaggatggtctcgatctcctgacctcgtgatttgcccacctcggcctcccaaagtgttgggattacaggcgtgagccaccgcgcctggcctctatattttttaaaaaaggtcctacttagatgggaatgggatgaggcaggtcccagatacaggtttgtagatggagccatcacagaacaaggggagagactcagcctcttttcctcacccagactcattgcttactcatgtgtcaactacagagtcaataccacagggactctgatacctgagtccctgaggggaggattcctaacaccaccttccccaggaggggctgtgattggctccagggtgttgctgcccagctgctcccaggttcttgctcaagccctgggagacctacagctgatgggctagtctgacaccctgttcaaggccaactcacagttccaggtgacgtgaataactgccctggcctggccattcacccttgcctgcaggtgtcccacacccagaagtggccaatcagtgcccaatagtgctgtcctccccttgtctctggcatttggcccttggtcctaggcaggggtcaggacctgctcacttctctaagggtcagaaagctctaggctctagactcatgggtgggggcagggaacagtactgagtggggatgacggaggtggtgcagtctcttatactgacattgtcagcataacatgtgggtccctgctgtgcctcatgtgccttctggggaccctcaaaggaatcagagccccaccagtctccctggagagctgaacaaatatgagggatacaggaacacaggagcttagaggataatacctatcagaaggttaaggtggcactgaccttgatcagggagctgacaacaatggcaccagcattgaccatggggttatgggggattcctggggaaatacaaaccaccaagagtcttagccactgaacaaagcctccctgacagcccgctcactttgtgggttagacaagaaagactgctagggagaaaggcatgacagggctaatcaggaagggcagagaaacaaaaaaggctgggagatggggtggggataaggagaaggggacagctgtaagtacggtctgagccttggtagtgctcaccttcctcattgagggagagcttgttgtagcgcaggccacttggctctttgcccacaaacttgtgcacgtagtcagtgcctagggtgcttatggagatggcataggtgaggggcttcacacaggactgcaggcagaaggggatctttgtgtggcccacagagtgcctggaggcagacagatgccatgaaaggggttggcctgtgttcggcacctgtgccctgcctccccttcctcttgcccagcatctcaccgttgaccatccacagtgcacagggagacaccccacaggtctgggtttgacttggccagctgagggatgtaggctgccacctggacatgagtgggtagagaaaagggagatggatgtggagaagaggaacagagttgaggttgagggtcaagagaatcttttagataaaagctaaaattctgtcttctatagggcagaggggttccctcctgcctgttgctcccagaaatgcccgagccttaagtcctagaaggccatatctttgtgtatccgcaatcctgtagagatagcagtaaagccaatggaagttaaaaaaggagaattctgaggcaaccttccccttttggttcttaggctcagttaccctataaatccctttgaaggctctattcgatcttgattccctcacctgctctaggaatcgtgtatagaaacacatgaagccatgtcaccatttacagaagttctgcttctcatctctcattcataggactcccagccccaggaaatctctgagaagcgaggtatatctaggtgtggtggctcatgcctgtaatcccagcactttgggaggccgaggtgggtggatcacttgagatcaggagttcgagaccagcctggccaatatggcaaaaccccatctctactaaaaatacaaaaattagtcgggcatggtggtgtatgccagctactcgggaggctgagacaggagaatcgcttgaacctgggaggtggaggttgcagtgagctgagattgcaccattgcactccagcccgggtgacagagcaaaactctgtctcaggaaaaaaaaaaaaaaaaaaaatctggcccaggtccctgacccctcccttagtcccctgactctcactttgcctccagtgagctctttgacatcctcaaagatgcgatccacatggcccgtgaactcctcaaaatcaggaatgacaaacttctttcggaatgcctgggtcaggagcacaatgttgctgctcacacacctggatcccagacacgattggattagggggctagagaaatgcagctgggactcactctggagccacggaaattgggaataaagaaggttgagtggtcttcaggtttgggatcaacagctctgttacctttggcaaatcagtttacctttctaggtcttagtttccgtacctctaaaatgaggggttttaatgatgtggaaagacactatgtcttgggatatgagaaaaaaaataaataccagaataatatgtatgtatgttaccttgatatttaaaaaatcctaaatcataaaagtatatttatatatattcatgtatgtatgtcagtacataggacattatctagaagatacccactaatctgctaatatttacttctgggaaaagaggacagggattgagtagggagggaaaggagaacatgtatttctatattgtttgaactcttatgatgagtattcatgtataacttatgtaataagtaataaaataaaatgaggaattgaactatacaattcccaaattc

SEQ ID NO: 186176 - DNA, 1994 bp, Homo sapiens
  Payload ID: 16662
  Gene Symbol: SPRYD4
  Gene Name: SPRY domain containing 4
  ENST ID: ENST00000629545
  CDS Start-End: 823-1200
ttgtgccgctggggagccaaacgattgggagttgcctccacagaggcccagagaggcgtcagtttcaaactggaagaaaaaaccgcccacagcagcctggcactcttcagagatgatacgggtgtcaaatatggcttggtgggattggagcccaccaaggtggccttgaatgtggagcgcttccgggagtgggcagtggtgctggcagacacagcggtcaccagtggcagacactactgggaagtgacagtgaagcgctcccagcagttccggataggagtggcagatgtggacatgtcccgggatagctgcattggtgttgatgatcgttcctgggtgttcacctatgcccagcgcaagtggtacaccatgttggccaacgagaaagccccagttgagggtattgggcagccagagaaggtggggctgttgctggagtatgaggcccagaagctgagcctggtggatgtgagccaggtctctgtggttcacacgctacagacagatttccggggtccagtggtgcctgcctttgctctctgggatggggagctgctgacccattcagggcttgaggtgcccgagggcctctagtatgtccattactggagtccctaatcacgcctttggccagcctccttttgaaagtgtccgaagcctttttactttgcctcaagcaacctctagctcccacaattcagtgttgggtcctctgtgcaatatcatgatcatcttcctcatcccctaccttgtgaaagctaggcatacagccaaaccctccttttccccacccaccaactactgccaatttcctaggctaccatgggtgtatcttccttgacctgcttccttcagtccctctgcctccctttgcccaggcctttctcagactgtattccatcctggggtcttatcattcagctttgtttgaatttattacaccatgatacctctccctccctttgtccacatgtaacttgttcttggggctctaccagatggctgaagagtaaatcctttctacctctggctgaaggagtggtgcagtcaatgacttggccctttttctacagcacatttagagtttgggctctggctccctcagtaagtgctttattaactcagtgtgtcaaaatgaaaacagagccctccttccccagtagctcagtgccacagaccttcagccccacacagctgtagctatccttaccctgagtccatctaccttaaatctgtacctctgacacccagccagtctgtcataatcattatcccagttataaccttgaccaaaggggaagagagacacttgggggatatctaggggatgagtgctagaaactatttatttatttttgagacagagtctcactctgtcacccaggctggagtgcagtggcatgatcttggctcactgcaaactctgccttttgggttcaagcgactctcgtgcctcagcctcctgagtagctaggattacaggtgtgtgccaccatgcccgtctcatttttatatttttagtagagatggggttttgccatattggccaggctggtctcgaactcctggcctcatgtgatcagcccaccttggcctcccaaagtgctgggatttcaggcgtgagccaccacacccggccaaaactgtttattcttgagaagttccatcttcatttctgccacagttggaacttcccgaggaaggaaggaggcctgaggttttgcacaatctgtttcagagcctgtttagactcaaacctatgcttcccttggcagcagaatacacttaacctaaagcagtatttggagttgagaaaaacctggtggggtaagtgaatatgtactgtttggtagggtaggtagagaagctgtgctttgaccctgtgattccatctttttctaccttctatgatggtgatgaagctagatacccctagggaagaaagaaggactgggtttagcaaaaatgatttggtaattaaagtttatttgaac

SEQ ID NO: 186177 - DNA, 3053 bp, Homo sapiens
  Payload ID: 16663
  Gene Symbol: SPRYD7
  Gene Name: SPRY domain containing 7
  Uniprot ID: Q5W111
  ENST ID: ENST00000361840
  CDS Start-End: 106-696
atagacaagtccggacctcgggcgggggcaggagacggagctgagcggcggggggcagtgtcgcctcggtctagggacggcggcggagtcggtggtccctgcgcgatggccacctcggtgttgtgctgcctgcggtgctgcagagacggggggactggccacatccctctgaaggagatgccggccgtgcagctggacacgcagcacatgggaacagatgttgttattgtaaagaatggaagaagaatatgtggaacaggaggttgtttagccagcgcacctttacatcaaaacaaaagctattttgaattcaaaatccagtccacaggaatctggggtattggtgttgcaactcagaaggttaacttgaatcagattcctcttggccgagatatgcacagtctggtgatgagaaatgatggagccctttaccacaacaatgaagagaaaaataggctgccagcaaacagtcttccgcaggaaggagatgtggtgggtattacttatgaccatgtcgaattaaatgtatacttgaatggaaaaaacatgcattgtccagcatcaggtatacgagggacagtgtatccagttgtttatgttgatgacagtgcaattttggattgccagttcagtgagttttatcatacgcctccacctggttttgaaaaaatattatttgaacagcaaatcttctgaatgtatttgtttttaaaacttgtatttctgcactgttaaaaaatgttcatcatttaataaaactttacctggcctatagatgaaaatatattcttaaaaatatgcttgttgatgctgtctaaggaaccaatgtattcagtataccaccctgaagttgtgatttaaaatactttatgttttgtgaaatgaaaataagcatttgggcagtttatttaattcttatttaaataaatagaattatgggtttaattaacagtataacatgactatatatacatatatatttaaagggaattctttcttacataatatatttgttttgatagagatgtagagttgggtgggtgtttttgtcactctgaagtttagacctcattaaatatttgacatctacagttggataattttgccgcttagtgtccttttttatatacaatataacaaagtgagagaaatttatattactggcaatttcatttttggcagtctatttctgtatcatgtaccgcttttcttaaaacttaaattgcttattttgttgtgtaatgtcattgcttttgatttgctttgtgaaaggagataaacgtttcagtaattgtcagagcattttgttgcctcaggctgtgttacctcaatttcagagtaagtagtggttgattagtaatgtagtatacactggcagacatctagaatagtatgatgctttacatttaaatgaggttattcttttaaggacttttatttgtatgttttctgtaaggaataataaaataattgtaattaaggaatataccatactatattaaacacattcttcctattttgttagttatacactaaattcacatcacccgtgattatttcagttcagagataagtgaatcctcttcatgaccctgagtctttgcctggttcttaagaatcactgtcctttagttaacgccctgtgacctgaaccaatcactctatacatctttagatacgttgtctgttttcaaatgagcatggcaaggatgcatacatttccctcctttatcaactagaaacagtacattgttcaggaaaacatgagtgttagaattagaaagagatccaaattgtagttttgctgctcatcctattttctcctctccaagtctcagattcccatttataaaaggagcaatcatactgacataagattctatgattaaataaggtaatacatatataacaccttaataatcataggcacttgcgccaggcgcggtggctcacacctgtaatcccagcactttgggaggctgaggcgggaggatcacaaggtcaggagatcgagaccatcgtggctaacatggtgaaaccctggctctactaaaaaaatacaaaaaaaattagccaggtgtggtggcgggcgcctgtagttctagctactctggaggctgaggcaggagaatggcttgaacccgggagacggcgcttgcagtgagccgagattgccccactgcactccagcctaggcaacagagtgagactctgtctcaaaaaaaattaaaataaaataaaataaaaatcataggcacttagtaagtgtagtttcctggatggtaaagtatcagggaaagtggttttctttctttttttttttttctcgttttttttttgagacagagtctcaccttgtcacccaggctagagtgcagtggcacgatcttggctcactgcaacctctgcttcccaggtttaagcgattctcttgcctcagcctcccgagtaggtgggactacaggtgcccgccaccacgcccgtgtaatttttgtatttttagtagagatggggtttcaccatgttgtccaggctggtctcaaactcctgacctcatgatccacctccctcagcctcccaaagtgctggaattataggcgtaagccaccacacccagccagaaagtggttctcatgatgcttctcagaccggcaacatcagcatcactggaacttgttaaaaatggacactctcagaacccacaccagacccaccaaatcagtttgagaactgccattcagtagagaattatttgcctactgtaaattttctaaggatttatgatgggctatttttgacccataggctcagagaatcctgcaaaatccttttttattgtttattctgcagacaaaaatgtgacaatatgctttgaaaacatagatatacttgagtaacatttatttacataaatcccaaattctacctctgaaggtatatgaaatttaactatgtatgtattatgcattttgtctggctttctatcataattttaatttgtaaagaatgtgcttacttgggaaagcaaattaaagtgactactgtttgctatc

SEQ ID NO: 186178 - DNA, 3086 bp, Homo sapiens
  Payload ID: 16663
  Gene Symbol: SPRYD7
  Gene Name: SPRY domain containing 7
  Uniprot ID: Q5W111
  ENST ID: ENST00000378195
  CDS Start-End: 256-729
ccgtctccccggcccagcccggccgctcgccctgtccggtctctccccggccccttgattctccgcgtcttcctcgcaggccagcctaagctcagcctgcattgcgccctcccggcctagggtgtcgctgtaccggcctccgagctccacatagacaagtccggacctcgggcgggggcaggagacggagctgagcggcggggggcagtgtcgcctcggtctagggacggcggcggagtcggtggtccctgcgcgatggccacctcggtgttgtgctgcctgcggtgctgcagagacggggggactggccacatccctctgaaggagatgccggccgtgcagctggacacgcagcacatgggaatctggggtattggtgttgcaactcagaaggttaacttgaatcagattcctcttggccgagatatgcacagtctggtgatgagaaatgatggagccctttaccacaacaatgaagagaaaaataggctgccagcaaacagtcttccgcaggaaggagatgtggtgggtattacttatgaccatgtcgaattaaatgtatacttgaatggaaaaaacatgcattgtccagcatcaggtatacgagggacagtgtatccagttgtttatgttgatgacagtgcaattttggattgccagttcagtgagttttatcatacgcctccacctggttttgaaaaaatattatttgaacagcaaatcttctgaatgtatttgtttttaaaacttgtatttctgcactgttaaaaaatgttcatcatttaataaaactttacctggcctatagatgaaaatatattcttaaaaatatgcttgttgatgctgtctaaggaaccaatgtattcagtataccaccctgaagttgtgatttaaaatactttatgttttgtgaaatgaaaataagcatttgggcagtttatttaattcttatttaaataaatagaattatgggtttaattaacagtataacatgactatatatacatatatatttaaagggaattctttcttacataatatatttgttttgatagagatgtagagttgggtgggtgtttttgtcactctgaagtttagacctcattaaatatttgacatctacagttggataattttgccgcttagtgtccttttttatatacaatataacaaagtgagagaaatttatattactggcaatttcatttttggcagtctatttctgtatcatgtaccgcttttcttaaaacttaaattgcttattttgttgtgtaatgtcattgcttttgatttgctttgtgaaaggagataaacgtttcagtaattgtcagagcattttgttgcctcaggctgtgttacctcaatttcagagtaagtagtggttgattagtaatgtagtatacactggcagacatctagaatagtatgatgctttacatttaaatgaggttattcttttaaggacttttatttgtatgttttctgtaaggaataataaaataattgtaattaaggaatataccatactatattaaacacattcttcctattttgttagttatacactaaattcacatcacccgtgattatttcagttcagagataagtgaatcctcttcatgaccctgagtctttgcctggttcttaagaatcactgtcctttagttaacgccctgtgacctgaaccaatcactctatacatctttagatacgttgtctgttttcaaatgagcatggcaaggatgcatacatttccctcctttatcaactagaaacagtacattgttcaggaaaacatgagtgttagaattagaaagagatccaaattgtagttttgctgctcatcctattttctcctctccaagtctcagattcccatttataaaaggagcaatcatactgacataagattctatgattaaataaggtaatacatatataacaccttaataatcataggcacttgcgccaggcgcggtggctcacacctgtaatcccagcactttgggaggctgaggcgggaggatcacaaggtcaggagatcgagaccatcgtggctaacatggtgaaaccctggctctactaaaaaaatacaaaaaaaattagccaggtgtggtggcgggcgcctgtagttctagctactctggaggctgaggcaggagaatggcttgaacccgggagacggcgcttgcagtgagccgagattgccccactgcactccagcctaggcaacagagtgagactctgtctcaaaaaaaattaaaataaaataaaataaaaatcataggcacttagtaagtgtagtttcctggatggtaaagtatcagggaaagtggttttctttctttttttttttttctcgttttttttttgagacagagtctcaccttgtcacccaggctagagtgcagtggcacgatcttggctcactgcaacctctgcttcccaggtttaagcgattctcttgcctcagcctcccgagtaggtgggactacaggtgcccgccaccacgcccgtgtaatttttgtatttttagtagagatggggtttcaccatgttgtccaggctggtctcaaactcctgacctcatgatccacctccctcagcctcccaaagtgctggaattataggcgtaagccaccacacccagccagaaagtggttctcatgatgcttctcagaccggcaacatcagcatcactggaacttgttaaaaatggacactctcagaacccacaccagacccaccaaatcagtttgagaactgccattcagtagagaattatttgcctactgtaaattttctaaggatttatgatgggctatttttgacccataggctcagagaatcctgcaaaatccttttttattgtttattctgcagacaaaaatgtgacaatatgctttgaaaacatagatatacttgagtaacatttatttacataaatcccaaattctacctctgaaggtatatgaaatttaactatgtatgtattatgcattttgtctggctttctatcataattttaatttgtaaagaatgtgcttacttgggaaagcaaattaaagtgactactgtttgctatc

SEQ ID NO: 186179 - DNA, 2285 bp, Homo sapiens
  Payload ID: 16663
  Gene Symbol: SPRYD7
  Gene Name: SPRY domain containing 7
  Uniprot ID: Q5W111
  ENST ID: ENST00000613924
  CDS Start-End: 73-546
gacggagctgagcggcggggggcagtgtcgcctcggtctagggacggcggcggagtcggtggtccctgcgcgatggccacctcggtgttgtgctgcctgcggtgctgcagagacggggggactggccacatccctctgaaggagatgccggccgtgcagctggacacgcagcacatgggaatctggggtattggtgttgcaactcagaaggttaacttgaatcagattcctcttggccgagatatgcacagtctggtgatgagaaatgatggagccctttaccacaacaatgaagagaaaaataggctgccagcaaacagtcttccgcaggaaggagatgtggtgggtattacttatgaccatgtcgaattaaatgtatacttgaatggaaaaaacatgcattgtccagcatcaggtatacgagggacagtgtatccagttgtttatgttgatgacagtgcaattttggattgccagttcagtgagttttatcatacgcctccacctggttttgaaaaaatattatttgaacagcaaatcttctgaatgtatttgtttttaaaacttgtatttctgcactgttaaaaaatgttcatcatttaataaaactttacctggcctatagatgaaaatatattcttaaaaatatgcttgttgatgctgtctaaggaaccaatgtattcagtataccaccctgaagttgtgatttaaaatactttatgttttgtgaaatgaaaataagcatttgggcagtttatttaattcttatttaaataaatagaattatgggtttaattaacagtataacatgactatatatacatatatatttaaagggaattctttcttacataatatatttgttttgatagagatgtagagttgggtgggtgtttttgtcactctgaagtttagacctcattaaatatttgacatctacagttggataattttgccgcttagtgtccttttttatatacaatataacaaagtgagagaaatttatattactggcaatttcatttttggcagtctatttctgtatcatgtaccgcttttcttaaaacttaaattgcttattttgttgtgtaatgtcattgcttttgatttgctttgtgaaaggagataaacgtttcagtaattgtcagagcattttgttgcctcaggctgtgttacctcaatttcagagtaagtagtggttgattagtaatgtagtatacactggcagacatctagaatagtatgatgctttacatttaaatgaggttattcttttaaggacttttatttgtatgttttctgtaaggaataataaaataattgtaattaaggaatataccatactatattaaacacattcttcctattttgttagttatacactaaattcacatcacccgtgattatttcagttcagagataagtgaatcctcttcatgaccctgagtctttgcctggttcttaagaatcactgtcctttagttaacgccctgtgacctgaaccaatcactctatacatctttagatacgttgtctgttttcaaatgagcatggcaaggatgcatacatttccctcctttatcaactagaaacagtacattgttcaggaaaacatgagtgttagaattagaaagagatccaaattgtagttttgctgctcatcctattttctcctctccaagtctcagattcccatttataaaaggagcaatcatactgacataagattctatgattaaataaggtaatacatatataacaccttaataatcataggcacttgcgccaggcgcggtggctcacacctgtaatcccaaagtgctggaattataggcgtaagccaccacacccagccagaaagtggttctcatgatgcttctcagaccggcaacatcagcatcactggaacttgttaaaaatggacactctcagaacccacaccagacccaccaaatcagtttgagaactgccattcagtagagaattatttgcctactgtaaattttctaaggatttatgatgggctatttttgacccataggctcagagaatcctgcaaaatccttttttattgtttattctgcagacaaaaatgtgacaatatgctttgaaaacatagatatacttgagtaacatttatttacataaatcccaaattctacctctgaaggtatatgaaatttaactatgtatgtattatgcattttgtctggctttctatcataattttaatttgtaaagaatgtgcttacttgggaaagcaaattaaagtgactactgtttgc

SEQ ID NO: 186180 - DNA, 4684 bp, Homo sapiens
  Payload ID: 16664
  Gene Symbol: SUPT16H
  Gene Name: SPT16 homolog, facilitates chromatin remodeling subunit
  Uniprot ID: Q9Y5B9
  ENST ID: ENST00000216297
  CDS Start-End: 340-3483
ggcagaccgtcacgtgacgacgtcgattcgcgtgcggcagtggcgaagttgacaaaccccgcgaaaatcgactctttgcatcgcacattttgttgattttccctcgtttttctttctctctttcccccgtccatccgaaagagggttggaaaaaaacaaaacaaacaaacaaacaaaaaaaaaacctaacgctgttgggacccggaagcggaaagggcatctttgaggtcgatacttccgggtcattgggagagtgcgggattcctgggccgagagcgggtggctgagccgggacctcgcgtgattctcggaacccgaggagaagcggcgtccggggctatggctgtgactctggacaaagacgcttattatcggcgagtgaagagactgtacagcaattggcggaaaggagaagatgagtatgccaacgttgatgccattgttgtatcagtgggtgttgatgaagaaattgtttatgccaaatcaactgccttacagacatggctctttggttatgaactaactgatactatcatggtcttttgtgatgacaaaatcatctttatggccagcaagaaaaaagtggagttcttgaaacagattgccaacactaagggcaatgagaatgctaatggagcccctgccatcacactgctaatacgagaaaagaatgaaagtaataagagtagctttgacaaaatgattgaagccattaaagaaagcaagaatggcaagaagattggagtgttcagcaaagacaaattccctggagagttcatgaagagctggaatgactgcctcaacaaagaaggctttgacaaaatagatatcagtgcagttgtggcatataccatcgctgtaaaggaggatggggagctcaacctaatgaagaaagcagccagcatcacttctgaagtcttcaacaaattcttcaaggaaagagtcatggaaatagttgatgcagatgagaaagttcgacacagcaaactggctgagtctgtggaaaaggccattgaagagaaaaaataccttgctggggcagacccttctactgtggaaatgtgttaccctcctatcattcagagtggtggcaactataatctcaagttcagtgtggtgagtgacaagaatcatatgcactttggggctatcacttgtgccatgggtattcgcttcaagtcttactgctccaaccttgttcgcactttgatggttgatccttctcaagaagttcaagaaaattataactttttgctccagcttcaagaggagctgctgaaggaattaagacatggtgtgaagatatgtgacgtgtataacgctgtcatggacgtggttaaaaagcagaagccagaactgctgaacaaaattaccaaaaacctagggtttgggatgggaattgaattccgtgaaggctccctagtaatcaatagcaaaaatcaatacaaactgaagaaaggaatggttttcagcatcaatttaggattctcagacctgactaacaaggaggggaaaaagccagaagagaaaacctatgccctgttcattggtgacacagtgcttgtggatgaggatggcccagctactgttctcacttctgtgaagaagaaagtgaagaatgtggggattttcctaaagaatgaagatgaggaagaagaggaggaggagaaagatgaggcagaggaccttttgggaagaggttctcgggcagcattacttacagaaagaacaagaaatgaaatgactgcagaagagaagcgaagagcacatcagaaagaactagcggctcaactcaatgaagaagcaaagaggcgattgactgaacaaaagggagaacagcagattcagaaagctcgcaagtctaatgtgtcctataaaaacccatctctgatgcctaaggaaccacatattcgggaaatgaagatctacatcgataagaaatatgagactgtaataatgcccgtgtttggcattgcaacaccgtttcacattgccacaatcaagaatataagtatgtccgtggaaggagattatacttacttgcgaatcaacttttattgcccaggcagtgctctgggcaggaatgaaggcaacatctttcctaaccctgaagcgacttttgtcaaggaaattacataccgagcatcaaatattaaggcacccggagaacagacagtaccagccttgaaccttcagaatgctttccgaattattaaagaagtacagaaacgttataaaactcgagaagctgaagagaaagagaaggaggggattgtaaaacaagactcactggtgatcaatctaaaccggagtaatccgaaactgaaagatctatacattcgcccaaatattgcccaaaagaggatgcaaggctcactggaggcccatgtcaatggcttccgcttcacatctgttcgaggagacaaagtggatattttgtacaataatattaagcatgctttgttccagccctgtgatggagaaatgattattgtcttgcactttcacctcaagaatgccatcatgtttgggaagaagcggcacacggatgtgcagttctacacagaagtgggagagataaccacggacttggggaaacatcagcatatgcatgaccgagatgacctctatgctgagcagatggaacgagaaatgaggcacaaactgaaaacagcctttaaaaatttcattgagaaagtagaggctctaactaaggaggaactggaatttgaagtgccttttagggacttgggatttaacggagctccctataggagtacctgcctccttcagcccactagtagtgcgctggtaaatgctacggaatggccaccttttgtggtgacattggatgaggtagagctgatccactttgagcgggtccagtttcacctgaagaactttgatatggtaatcgtctacaaggactacagcaagaaagtgaccatgatcaacgccattcctgtagcctctcttgaccccatcaaggaatggttgaattcctgcgacctgaaatacacagaaggagtacagtccctcaactggactaaaatcatgaagaccattgttgatgaccctgagggcttcttcgaacaaggtggctggtctttcctggagcctgagggtgaggggagtgatgctgaagaaggggattcagagtctgaaattgaagatgagacttttaatccttcagaagatgactatgaagaggaagaggaggacagtgatgaagattattcatcagaagcagaagagtcagactattctaaggagtcattgggtagtgaagaagagagtggaaaggattgggatgaactggaggaagaagcccgaaaagcggaccgagaaagtcgttacgaggaagaagaagaacaaagtcgaagtatgagccggaagaggaaggcatctgtgcacagttcgggccgtggctctaaccgtggttccagacacagctctgcaccccccaagaaaaagaggaagtaacttctgaactttggccctgagctccattcttcctccagccaacccctgaaaattttacatgacatagaaactgtatttttcctttcgttttcatttgaagttttgccatttgtgtttatgggtttagggggccatttgtgtggaccaatctactcggggaattccaggcccaccaggacacgtgccaatggccccattcagatggcaagggaggaggtgttcttgaagacaggaggaggctcccgctgttaataaatattgtttcattcttctctcttcctgtcaccttctgccaagacattgatggcttctgacatcttatttggtgtctcaaagctgtatttccaagacagtggtacaaggtgacccttaattacccgtatcatggttcttgaccagcacattcaatcctccaacctaccctactgccatgaccttccgcacatctctaagttttatctttgcaatactcaaggttctcggaaatttgctaatggttgtgataaaccatacagcttgagccagtgaggcagattgggctggtgccttcgtctgagttttcctgctttcctgcctcgtgcagattctgaggtatatctgctgccttggaagacataagaagcagtgatactccctggctcggttattttctccatacaatgcacacatggtacaatgatagaaggcaaaattgccactgtcttcttttttttctcatatatctaaggaagatatatcaggttgtgcctcatgtaccgcttctagtgaaatgtagaggaaggctcaaaggagtcaacatttatatctggaagggacaagtcatgccttgggcctagaataccctgatgagaaaagagaagaggaagggaggccatatctacaacacagcctctcggcactgctgctccttattttaactttgtcttgcattgtcctgtatttatcacagtttctgttgaacagcttttcaagtatttggggagtttatcttgccatcctccccttctggttctctgcacccacctgtcccactgcagttccttccgtgctctgtgactttaagagaagaaggggggaggggtcccggattttatgtttgtttgttttttctccttagcagtaggacttgatattttcaattttggaagaactaaaagatgaataaactgggttttttttgttgtttgtttttgtaaattca

SEQ ID NO: 186181 - DNA, 915 bp, Homo sapiens
  Payload ID: 16664
  Gene Symbol: SUPT16H
  Gene Name: SPT16 homolog, facilitates chromatin remodeling subunit
  ENST ID: ENST00000555943
  CDS Start-End: 55-306
gagccgggacctcgcgtgattctcggaacccgaggagaagcggcgtccggggctatggctgtgactctggacaaagacgcttattatcggcgagtgaagagactgtacagcaattggcgggaattcccgggttctgtgcctcacccttttcgttgctcccgaatcattcaccggaggcggccacgaacgctgccccttaacagggaatcccccgcattcaccctgtcctgcggccatcaccatcttccccgcgtgccagccttggtcatgcatagcagcacctctcgcagtctcttcccgccctagaagaggcaacatccttccctcctactccgtggtcacgtcttgctgccctcccctgccgtgttctcacgcactcgctctgtccctccagaaccacaatattccacccctggtcccgccaggattataaccgtcttcgtaaaggagagatggaagggcaaggaggatgtcaatcgggcttttagcgtttatcgtttgcggggcttttgctggagttaaaaaaagaaatactgctcacgcgcaaccgcctcatgttctaggccctgctgtgggttacagagagggacctaacgctgaaagcctgcaggcattagtaataacaaaacaaaacaaaacgatgcctaaaaccttattagttccttggtagcgtatccggggcacgtgttcattaaaagagctgtggcagttcccagttttttaaagattcggcagttttgctgctctaaaaacgtccacagttaaaacttatttttatgatgttaacttactaattgagcaaacatttggttgcattctgtgatgcagtctgagttggctagcttaagtcttgcccctgaaccctgtcatcaagggaagatacagctaataaagatttttttttaacctgaaaaa

SEQ ID NO: 186182 - DNA, 877 bp, Homo sapiens
  Payload ID: 16664
  Gene Symbol: SUPT16H
  Gene Name: SPT16 homolog, facilitates chromatin remodeling subunit
  ENST ID: ENST00000557652
  CDS Start-End: 69-314
gagagcgggtggctgagccgggacctcgcgtgattctcggaacccgaggagaagcggcgtccggggctatggctgtgactctggacaaagacgcttattatcggcgagtgaagagactgtacagcaattggcggaaaggagaagatgagtatgccaacgttgatgccattgttgtatcagtgggtgttgatgaagaaattgtttatgccaaatcaactgccttacagtcttcagggacccaggctttttccagttctctgttctgccacccaaagaacatagccctcttgcacgtggtacagaatggcttctagaactccaggtgtttcatctacattccaagcaaaaagagacagagaagaaaacaggaggccaccttttctttttaagaagacttgcttgaagctccacacactaccattttttacctattggccaaaatttgatcctaatgaccatacttacctgaaaggaagacatggctctttggttatgaactaactgatactatcatggtcttttgtgatgacaaaatcatctttatggccagcaagaaaaaagtggagttcttgaaacagattgccaacactaagggcaatgagaatgctaatggagcccctgccatcacactgctaatacgagaaaagaatgaaagtaataagagtagctttgacaaaatgattgaagccattaaagaaagcaagaatggcaagaagattggagtgttcagcaaagacaaattccctggagagttcatgaagagctggaatgactgcctcaacaaagaaggctttgacaaaatagatatcagtgcagttgtggcatataccatcgctgtaaaggaggatggggagctcaacctaatgaagaaagcagc

SEQ ID NO: 186183 - DNA, 582 bp, Homo sapiens
  Payload ID: 16664
  Gene Symbol: SUPT16H
  Gene Name: SPT16 homolog, facilitates chromatin remodeling subunit
  ENST ID: ENST00000556309
  CDS Start-End: 20-220
agaagcggcgtccggggctatggctgtgactctggacaaagacgcttattatcggcgagtgaagagactgtacagcaattggcggaaaggagaagatgagtatgccaacgttgatgccattgttgtatcagtgggtgttgatgaagaaattgtttatgccaaatcaactgccttacagcaagaaaaaagtggagttcttgaaacagattgccaacactaagggcaatgagaatgctaatggagcccctgccatcacactgctaatacgagaaaagaatgaaagtaataagagtagctttgacaaaatgattgaagccattaaagaaagcaagaatggcaagaagattggagtgttcagcaaagacaaattccctggagagttcatgaagagctggaatgactgcctcaacaaagaaggctttgacaaaatagatatcagtgcagttgtggcatataccatcgctgtaaaggaggatggggagctcaacctaatgaagaaagcagccagcatcacttctgaagtcttcaacaaattcttcaaggaaagagtcatggaaatagttgatgcagatgagaaagttc

SEQ ID NO: 186184 - DNA, 5754 bp, Homo sapiens
  Payload ID: 16665
  Gene Symbol: SPTY2D1
  Gene Name: SPT2 chromatin protein domain containing 1
  Uniprot ID: Q68D10
  ENST ID: ENST00000336349
  CDS Start-End: 237-2294
taaaagcggaagttacgcagggactcgcgagcgctgtggcggccctgaaaggatataggccgtggagggaagggggcgggcagacggcataggaaggcgccggaagtggtcccgcagaggcggggtgggagtggggctcccgaggcagtgcagttggctgtagctgggcgcctcggttaggtgcgctgtcagtcctttccgagtgcctggcccagtctctcccgcctcggcccaacatggacttcagagaaattctcatgatagcttccaagggacaaggtgtcaacaatgtgccgaaaaggtatagtttggcagtggggcctccaaaaaaagacccaaaagttaaaggtgtccaatcagcagctgtacaagcttttcttaaaaggaaagaagaggagctgagacgaaaagccttagaggagaaaaggagaaaagaggaactagtgaaaaagcgaattgagctcaaacatgacaagaaagcaagagctatggccaagaggacaaaggataatttccatggttacaatgggattcctattgaggaaaagtcaaagaagaggcaggcaacagaaagccataccagccaaggaaccgaccgagagtatgaaatggaagaagagaatgaattcctcgagtacaatcacgcagagtcagagcaggagtatgaggaagagcaagaacctcccaaagttgaaagcaaaccaaaggtcccccttaaaagtgccccaccacccatgaacttcactgatttactcaggctggctgagaaaaagcagtttgaaccagtggaaatcaaggtagtgaagaaatcagaagagcgacctatgaccgcagaagaacttagggagcgagaattccttgaacgaaagcataggagaaaaaaacttgagacagatggaaaactacctccaactgtgtccaaaaaggcaccctctcagaaagaaagtgtgggcacaaaacttagcaaaggttctggagacaggcatccttcttccaaaggaatgccccttcctcatgctgagaagaaatcaagacccagcatggccaatgagaaacacctcgctttgtcttcatccaaatccatgccaggagagaggatcaaggcaggatctggcaatagctcccaaccctcacttcgtgagggccacgacaaacctgtttttaatggagctggaaagcctcattccagcacctcttcaccaagtgtcccaaagacttctgctagcaggactcagaaatctgctgttgagcacaaagccaaaaaatctctgtcccatcctagccattccaggcctgggcccatggtcaccccacacaataaggctaagagtccaggtgtcaggcagccaggcagcagctctagctcagcccctgggcagcccagcacaggggttgctcgacccacagttagttctggccctgtgcctaggcgccagaatggcagctccagctcaggacctgagcgatcaatcagtgggtccaagaagccaaccaatgactcaaatccctctaggcggacagtcagtggtacatgtggccctggacaacctgcaagcagctcaggtggccctgggcgacccatcagtggttcagttagttctgcaagacccttgggcagctctcgtggccctggccggcctgtgagcagtccacatgaacttcgacgaccagtgagtggcttgggccccccggggcggtctgtcagtggccctgggagatccataagtggctcaattccagctggacggactgtcagtaattcagtcccaggaagaccagtgagcagcttgggacctgggcaaacagttagtagctcaggtcccactataaagcctaagtgcactgttgtctccgaaacaatttcttccaagaatatcattagccggtccagcaatggacagatgaatggaatgaagcctcccctatctggctacagagctgcccaaggtcctcaaaggcttcccttccctactggttacaaaaggcagcgagaatatgaagaggaagatgacgatgatgatgaatacgactctgaaatggaagattttattgaagatgaaggagagcctcaggaagaaatatccaagcacattagagaaatctttggttatgaccgaaaaaaatacaaagatgaaagtgattatgccttacgttacatggaaagtagttggaaagagcagcagaaggaagaagcaaagagcttaagactgggtatgcaagaggacttagaggaaatgagacgtgaagaagaagaaatgcaacgtcgaagggccaagaagctgaagaggcgttagctgctgcttttatttttgtgaaattctagagctgctctgctgcaaggatttcctgccttcagactgaagaagcccccttatcattttagatttatacttgggtactcaaggagaaggaatgcatactgtcatttgcaggctgtcatttgagcataaaatattttcagatattttccagggtgaaatctgtaatgcagatgatataatgcccacttgtgctcttatgaagttaactgttcacagatgccagccttgatcctgatgagctatgcactctaatgtggggccactcaccagtcagccaatcttttattgttcctttgctactttgaaaggaaaaaaaaggttgtctcttgatttctgtaattcttctgctgatctgtgagtagggcactgccctgctcccaatcaaacttagtctttttatgagaaacctggaccttccatgaatgttgccagcaataaagtgacttgtcctaatctatggattgagaacttgaaaatgtagagtagaatttataactatcatatggatgtcatcctgtgactttgaagtacaaagtagaataaattctgtattcatggattggatgctgagcattcttactcattaatttaggtggctaggaattaatgaaaaaattttcaagttaaaatacaggttataacagtataatattcttttctaagttttcctttcagatttactgttatgttggctttagtgtaagacaaggtcactgtgctgattgatttttatctaaaaaaattcatttttatatcgaagaaaaaatattttattcaaacattagatttgaaagagtaatagtttataaaataaggaagtaacatgtgaggctctcccctcctcccctcccccatcataaagatattttgaaatcccaaggtgccctcatacctcttgacattaatgacttcattttttagcttgaatttgttagcaaatattaatggcagaaaaccaaaaactaaatttatggtatcgagagcaccaccttctctttttgcccatattgcactttgatttcaaactatgcactgtgaagagatttttttccccaggtaggaagggatgttccctgttatcgttattttactgagctgtggaaactcatttttaccctttttaaagtcataaatatggacttaatagcccttaaccttcaagtccaagcagttccaatcaggctgacttaggatcatgctggaaggaagccaagtctcaagaactgtcagcaacagaaaatgagatatgatgctagagagcatttgtccttgactgtaagtacagaggcttaggggaagtgagacataagcttgtaggaataataaacgttctacaataaacgttttggctatcttaagccattgtatgggggggattaggaagtaggagggattgtcctacaacaggcccttatacttcaacagcccaaatattttggtttattcctttttatccataaagtctttattcttcaagtttgggtattatagattaccattgttagcctcccttaatgggaccatatgagccaggcttttaagacggactcattttgaattgagtttcaaactttgaaagtgcaaggatttaatttttaagttgaatcccatgaaaggtgtcatcatcactaggaataacaccctttgtaactacatatagaactgttacaatggtagcagaaaatcctattgatttcatctcacccatttcagataccttcagtgaaattaagggtagtgtgatgtcccatgtaataaaacaggcttagaacatcaattcctctgctgccatttatgtgcttttattcccccttcaaaaattttttattggatatatatatttttcagtattcagactctgaaatctgtcattacaatcaagtgcttgtcacagctgaaagatttctggtggcttaaagtttactagcagtaaatttatgatatggtacagttctttgtacagaaaggcaccattatgttagaataaatttccagaacttagtgggaagaatcaggttttaaccttgtgtgtctgttacttctgagtgcatttctataatataaatgttgatttgcgtcaacattataaaagagcacttctgtggctcatttaaaagaaaaaaaaggttaagtcttttaaattttggccttgtttccaaatcctgtcttccatgttgtttttctgcacttcctgaccactcttataaaaagctcacaaacctttgaagaaactggagtaggctgttatttcattaaggtttacaaattaaatgcttgatttttaatgtattctctactgttttgatttttggattttcttaattcaacatttgaagatgtgccttttgggtaatgttaatcacgaatgtagtaatatttcatgattgtaataatgttacatgatcatgggtgtggcattctctaacaaatgatgtgaaaggaaagtagttttcataaaactcatggctctgattgcacagtcccacttgcttttgatattgctatgtcaaagcaaagggcacttcttttaaggctactttcagaactttgtattttcgctaaactataaatgcagttgtgtccagttggaggccagggtaccacatgtcacaggcggccttacatgtgtgccgtgaaaaggttcaaagaccgttaacaaaaaagtaagtctggccgggcatggtggctcaagcctgtaatcccagcactttgggaggccgaggcgggcggatcacttgagaccaggagttcgagaccagcctggccaacatggtgtgagaccccgtctctactaaaaataaaaaaattagccgggtgcggtggcacacacctgtaatcccagctaccggggaggctgaggcaggagaatcgctagaacctgggaggcggaggttgcagtcagccaagatagcaccactgcactccaggctgggtgacagagcgagactccatgtcaaaaaaaaaagaatgtgggaactcaaattttcatttttaatgtaatccccaagattttctccaagaaataaattgttgttttgtattttgtaacttaaaagcagctattggtaaatttctgagatatagcaggagaccaaaacatgtttggaaagagaataaatatatgaagagagactggttgttttattttcaatgtattgaatatattagactactatttattttctgagtggatgtgattaaatattcagacgtttagtgtatgattaagagtgagatagagatttctttggagtaattaaatccatcctgtcttttacacaatggacaaatcaagttaaaaaaatttttagatagcttagcttgttttctggtgctgttgacctgcaagagaatatacttttgcatatacaggtgaaagttttgcaatttatgtatacaagaaattgtaggcattaaaaatattttattgata

SEQ ID NO: 186185 - DNA, 2739 bp, Homo sapiens
  Payload ID: 16666
  Gene Symbol: SUPT20H
  Gene Name: SPT20 homolog, SAGA complex component
  Uniprot ID: Q8NEM7
  ENST ID: ENST00000350612
  CDS Start-End: 222-2561
tcggaagtgcggccgccggaactggctgttggtgggggtgcagcactgagccgccgacggggcgggtgggctttgctgccgagcaggcggcgccgtcttggggcctagcggcgaggcgacccgcacagtactgtaagattgatgttaaaggcatggtgttcaccccacttcatcagcgtacataagttatctcttcttttggacccttattttatgccataatgcaacaagctttagaactagctttggatcgtgcagagtatgtcattgaaagtgcccgacagagacctcctaaaaggaaatacctatcaagtggaagaaaatctgtatttcaaaaactttatgacttgtatattgaagaatgtgaaaaagaacctgaagttaagaaattaagaagaaatgtgaacttgttagagaagcttgttatgcaagagactttgtcatgtttagtggtcaatctatacccaggaaatgagggatattctctgatgctcaggggaaaaaacggatcagattccgagaccattcgactgccctatgaagaaggagagttgcttgaatatttggatgcagaagaattacctcctattttggttgatctcctagaaaaatctcaggttaatatttttcattgcggatgtgtcatagcagaaatacgtgactacaggcagtccagtaacatgaaatctcctggttaccaaagtcggcacattctcttacgtccaacaatgcagactttaatttgtgatgtacattcaataacaagtgataaccacaaatggacccaggaagacaaacttttgcttgagagccagctcatcctagctacagctgaaccactctgtcttgatccttctatagcagtcacctgcactgcaaacagactgctctataacaagcaaaagatgaacactcgcccaatgaaacggtgtttcaagaggtattccagatcctctctgaatcggcagcaagatctatctcattgtccacctcctcctcagctgaggttacttgatttcttacaaaaaagaaaggaaagaaaagcaggtcagcattatgacctcaaaatttctaaggcaggaaattgtgtagatatgtggaaacggagtccctgtaatttggccataccttctgaagtagatgtggagaaatatgctaaagtggaaaagtctatcaaatctgatgactcacagccaacagtctggccagcccatgatgtaaaagatgattatgtatttgaatgtgaagctggtactcagtatcagaaaacaaagctgaccatcttgcagtcgcttggagatccactttactatggtaaaatacagccatgtaaagcagatgaagaaagtgacagccagatgtctccatcacactcgtccacagatgatcattcaaattggttcattattggatcaaagaccgatgctgagagggtagtcaatcagtaccaagaattagtccagaatgaagccaaatgtccggtcaagatgtcacacagctccagtggctcagccagtctgagtcaggtttctccagggaaagaaacagatcaaactgaaaccgtgtcagttcagtcttcggtattggggaagggtgtaaaacatcgacccccaccaatcaaacttccctcaagctcaggaaatagttcctcaggtaactattttacaccacaacagacaagcagctttctcaaatctccaactcctcctccttcttctaagccatcaagtattcctcggaaatcatctgtggatctcaatcaagttagcatgctttctccagctgccctatcacctgccagctcatcacaaagaaccacggccacccaggtcatggcaaactctgctggacttaacttcatcaatgtagtgggctctgtttgtggggcccaggctttgatgagtggttcaaaccccatgctgggctgtaacactggtgccataactcctgcaggaataaacctgagcggccttctaccctcaggaggtctgctaccaaatgcactgcccagtgcaatgcaggcagcttctcaagcaggtgttccatttggtttaaaaaatacttcaagtctcaggcccttaaatctactccagcttccaggtggttcacttatttttaacactctgcagcagcagcaacagcagctctcccagtttacaccacaacaacctcagcagcccacaacttgtagtcctcaacagccaggggagcagggttctgagcaaggttcaaccagtcaagaacaggccttatctgctcagcaagctgctgttattaaccttactggagtaggaagttttatgcagtcacaggcagctgtgttgtctcagcttggctctgccgagaacagacctgagcaaagccttcctcagcagagattccagctctcctctgcctttcaacagcagcagcaacagatacaacagttgcgattcttgcagcatcaaatggctatggcagcagcagcagcacaaacagctcagctacatcatcatcggcatacaggcagccagtcaaaaagtaaaatgaagagaggcacgccaaccactccaaaattttgagtcttgcattactttttgttccttttttaaaaacacaagagcactgaatcaaaagaattgagtttctactttttgttttttttaatgtgtcagtattttacattgctagatgtacaaactttatacagaagcacaaccttatcatttttaaataaaaacagggaaatggtttaacaaa

SEQ ID NO: 186186 - DNA, 2681 bp, Homo sapiens
  Payload ID: 16666
  Gene Symbol: SUPT20H
  Gene Name: SPT20 homolog, SAGA complex component
  Uniprot ID: Q8NEM7
  ENST ID: ENST00000356185
  CDS Start-End: 265-2466
ggtgcagcactgagccgccgacggggcgggtgggctttgctgccgagcaggcggcgccgtcttggggcctagcggcgaggcgacccgcacaggtgggcggtggcggtaggtgggtggccagcgactggcaacgcggtggcttagacgcgcgagatccggccagggtcagagtactgtaagattgatgttaaaggcatggtgttcaccccacttcatcagcgtacataagttatctcttcttttggacccttattttatgccataatgcaacaagctttagaactagctttggatcgtgcagagtatgtcattgaaagtgcccgacagagacctcctaaaaggaaatacctatcaagtggaagaaaatctgtatttcaaaaactttatgacttgtatattgaagaatgtgaaaaagaacctgaagttaagcagaaattaagaagaaatgtgaacttgttagagaagcttgttatgcaagagactttgtcatgtttagtggtcaatctatacccaggaaatgagggatattctctgatgctcaggggaaaaaacggatcagattccgagaccattcgactgccctatgaagaaggagagttgcttgaatatttggatgcagaagaattacctcctattttggttgatctcctagaaaaatctcaggttaatatttttcattgcggatgtgtcatagcagaaatacgtgactacaggcagtccagtaacatgaaatctcctggttaccaaagtcggcacattctcttacgtccaacaatgcagactttaatttgtgatgtacattcaataacaagtgataaccacaaatggacccaggaagacaaacttttgcttgagagccagctcatcctagctacagctgaaccactctgtcttgatccttctatagcagtcacctgcactgcaaacagactgctctataacaagcaaaagatgaacactcgcccaatgaaacggtgtttcaagaggtattccagatcctctctgaatcggcagcaagatctatctcattgtccacctcctcctcagctgaggttacttgatttcttacaaaaaagaaaggaaagaaaagcaggtcagcattatgacctcaaaatttctaaggcaggaaattgtgtagatatgtggaaacggagtccctgtaatttggccataccttctgaagtagatgtggagaaatatgctaaagtggaaaagtctatcaaatctgatgactcacagccaacagtctggccagcccatgatgtaaaagatgattatgtatttgaatgtgaagctggtactcagtatcagaaaacaaagctgaccatcttgcagtcgcttggagatccactttactatggtaaaatacagccatgtaaagcagatgaagaaagtgacagccagatgtctccatcacactcgtccacagatgatcattcaaattggttcattattggatcaaagaccgatgctgagagggtagtcaatcagtaccaagaattagtccagaatgaagccaaatgtccggtcaagatgtcacacagctccagtggctcagccagtctgagtcaggtttctccagggaaagaaacagatcaaactgaaaccgtgtcagttcagtcttcggtattggggaagggtgtaaaacatcgacccccaccaatcaaacttccctcaagctcaggaaatagttcctcaggtaactattttacaccacaacagacaagcagctttctcaaatctccaactcctcctccttcttctaagccatcaagtattcctcggaaatcatctgtggatctcaatcaagttagcatgctttctccagctgccctatcacctgccagctcatcacaaagaaccacggccacccaggtcatggcaaactctgctggacttaacttcatcaatgtagtgggctctgtttgtggggcccaggctttgatgagtggttcaaaccccatgctgggctgtaacactggtgccataactcctgcaggaataaacctgagcggccttctaccctcaggaggtctgctaccaaatgcactgcccagtgcaatgcaggcagcttctcaagcaggtgttccatttggtttaaaaaatacttcaagtctcaggcccttaaatctactccagcttccaggtggttcacttatttttaacactctgcagcagcagcaacagcagctctcccagtttacaccacaacaacctcagcagcccacaacttgtagtcctcaacagccaggggagcagggttctgagcaaggttcaaccagtcaagaacaggccttatctgctcagcaagctgctgttattaaccttactggagtaggaagttttatgcagtcacaggcagctgcagttgcgattcttgcagcatcaaatggctatggcagcagcagcagcacaaacagctcagctacatcatcatcggcatacaggcagccagtcaaaaagtaaaatgaagagaggcacgccaaccactccaaaattttgagtcttgcattactttttgttccttttttaaaaacacaagagcactgaatcaaaagaattgagtttctactttttgttttttttaatgtgtcagtattttacattgctagatgtacaaactttatacagaagcacaaccttatcatttttaaataaaaacagggaaatggtttaacaaa

SEQ ID NO: 186187 - DNA, 2843 bp, Homo sapiens
  Payload ID: 16666
  Gene Symbol: SUPT20H
  Gene Name: SPT20 homolog, SAGA complex component
  Uniprot ID: Q8NEM7
  ENST ID: ENST00000360252
  CDS Start-End: 249-2450
tccccgcccctcggcccagcctgccaatcggaagtgcggccgccggaactggctgttggtgggggtgcagcactgagccgccgacggggcgggtgggctttgctgccgagcaggcggcgccgtcttggggcctagcggcgaggcgacccgcacagtactgtaagattgatgttaaaggcatggtgttcaccccacttcatcagcgtacataagttatctcttcttttggacccttattttatgccataatgcaacaagctttagaactagctttggatcgtgcagagtatgtcattgaaagtgcccgacagagacctcctaaaaggaaatacctatcaagtggaagaaaatctgtatttcaaaaactttatgacttgtatattgaagaatgtgaaaaagaacctgaagttaagcagaaattaagaagaaatgtgaacttgttagagaagcttgttatgcaagagactttgtcatgtttagtggtcaatctatacccaggaaatgagggatattctctgatgctcaggggaaaaaacggatcagattccgagaccattcgactgccctatgaagaaggagagttgcttgaatatttggatgcagaagaattacctcctattttggttgatctcctagaaaaatctcaggttaatatttttcattgcggatgtgtcatagcagaaatacgtgactacaggcagtccagtaacatgaaatctcctggttaccaaagtcggcacattctcttacgtccaacaatgcagactttaatttgtgatgtacattcaataacaagtgataaccacaaatggacccaggaagacaaacttttgcttgagagccagctcatcctagctacagctgaaccactctgtcttgatccttctatagcagtcacctgcactgcaaacagactgctctataacaagcaaaagatgaacactcgcccaatgaaacggtgtttcaagaggtattccagatcctctctgaatcggcagcaagatctatctcattgtccacctcctcctcagctgaggttacttgatttcttacaaaaaagaaaggaaagaaaagcaggtcagcattatgacctcaaaatttctaaggcaggaaattgtgtagatatgtggaaacggagtccctgtaatttggccataccttctgaagtagatgtggagaaatatgctaaagtggaaaagtctatcaaatctgatgactcacagccaacagtctggccagcccatgatgtaaaagatgattatgtatttgaatgtgaagctggtactcagtatcagaaaacaaagctgaccatcttgcagtcgcttggagatccactttactatggtaaaatacagccatgtaaagcagatgaagaaagtgacagccagatgtctccatcacactcgtccacagatgatcattcaaattggttcattattggatcaaagaccgatgctgagagggtagtcaatcagtaccaagaattagtccagaatgaagccaaatgtccggtcaagatgtcacacagctccagtggctcagccagtctgagtcaggtttctccagggaaagaaacagatcaaactgaaaccgtgtcagttcagtcttcggtattggggaagggtgtaaaacatcgacccccaccaatcaaacttccctcaagctcaggaaatagttcctcaggtaactattttacaccacaacagacaagcagctttctcaaatctccaactcctcctccttcttctaagccatcaagtattcctcggaaatcatctgtggatctcaatcaagttagcatgctttctccagctgccctatcacctgccagctcatcacaaagaaccacggccacccaggtcatggcaaactctgctggacttaacttcatcaatgtagtgggctctgtttgtggggcccaggctttgatgagtggttcaaaccccatgctgggctgtaacactggtgccataactcctgcaggaataaacctgagcggccttctaccctcaggaggtctgctaccaaatgcactgcccagtgcaatgcaggcagcttctcaagcaggtgttccatttggtttaaaaaatacttcaagtctcaggcccttaaatctactccagcttccaggtggttcacttatttttaacactctgcagcagcagcaacagcagctctcccagtttacaccacaacaacctcagcagcccacaacttgtagtcctcaacagccaggggagcagggttctgagcaaggttcaaccagtcaagaacaggccttatctgctcagcaagctgctgttattaaccttactggagtaggaagttttatgcagtcacaggcagctgcagttgcgattcttgcagcatcaaatggctatggcagcagcagcagcacaaacagctcagctacatcatcatcggcatacaggcagccagtcaaaaagtaaaatgaagagaggcacgccaaccactccaaaattttgagtcttgcattactttttgttccttttttaaaaacacaagagcactgaatcaaaagaattgagtttctactttttgttttttttaatgtgtcagtattttacattgctagatgtacaaactttatacagaagcacaaccttatcatttttaaataaaaacagggaaatggtttaacaaactagggttggtttgcctaagtcattgctttttaaaaatggtttcactatacataatatatatggaagtgacctaagaaataatagaaacatctttcagaagaatgtagtttgatatttatttagtataaaacgtttgtgcacagtgttaacaaatacaatttttacaaatctgttttg

SEQ ID NO: 186188 - DNA, 2836 bp, Homo sapiens
  Payload ID: 16666
  Gene Symbol: SUPT20H
  Gene Name: SPT20 homolog, SAGA complex component
  Uniprot ID: Q8NEM7
  ENST ID: ENST00000475892
  CDS Start-End: 185-2620
gtgcagcactgagccgccgacggggcgggtgggctttgctgccgagcaggcggcgccgtcttggggcctagcggcgaggcgacccgcacagtactgtaagattgatgttaaaggcatggtgttcaccccacttcatcagcgtacataagttatctcttcttttggacccttattttatgccataatgcaacaagctttagaactagctttggatcgtgcagagtatgtcattgaaagtgcccgacagagacctcctaaaaggaaatacctatcaagtggaagaaaatctgtatttcaaaaactttatgacttgtatattgaagaatgtgaaaaagaacctgaagttaagaaattaagaagaaatgtgaacttgttagagaagcttgttatgcaagagactttgtcatgtttagtggtcaatctatacccaggaaatgagggatattctctgatgctcaggggaaaaaacggatcagattccgagaccattcgactgccctatgaagaaggagagttgcttgaatatttggatgcagaagaattacctcctattttggttgatctcctagaaaaatctcaggttaatatttttcattgcggatgtgtcatagcagaaatacgtgactacaggcagtccagtaacatgaaatctcctggttaccaaagtcggcacattctcttacgtccaacaatgcagactttaatttgtgatgtacattcaataacaagtgataaccacaaatggacccaggaagacaaacttttgcttgagagccagctcatcctagctacagctgaaccactctgtcttgatccttctatagcagtcacctgcactgcaaacagactgctctataacaagcaaaagatgaacactcgcccaatgaaacggtgtttcaagaggtattccagatcctctctgaatcggcagcaagatctatctcattgtccacctcctcctcagctgaggttacttgatttcttacaaaaaagaaaggaaagaaaagcaggtcagcattatgacctcaaaatttctaaggcaggaaattgtgtagatatgtggaaacggagtccctgtaatttggccataccttctgaagtagatgtggagaaatatgctaaagtggaaaagtctatcaaatctgatgactcacagccaacagtctggccagcccatgatgtaaaagatgattatgtatttgaatgtgaagctggtactcagtatcagaaaacaaagctgaccatcttgcagtcgcttggagatccactttactatggtaaaatacagccatgtaaagcagatgaagaaagtgacagccagatgtctccatcacactcgtccacagatgatcattcaaattggttcattattggatcaaagaccgatgctgagagggtagtcaatcagtaccaagaattagtccagaatgaagccaaatgtccggtcaagatgtcacacagctccagtggctcagccagtctgagtcaggtttctccagggaaagaaacagatcaaactgaaaccgtgtcagttcagtcttcggtattggggaagggtgtaaaacatcgacccccaccaatcaaacttccctcaagctcaggaaatagttcctcaggtaactattttacaccacaacagacaagcagctttctcaaatctccaactcctcctccttcttctaagccatcaagtattcctcggaaatcatctgtggatctcaatcaagttagcatgctttctccagctgccctatcacctgccagctcatcacaaagatctggaactcctaagccatctactcctacaccaaccccttcatcgaccccacaccctcctgatgctcagagctcaactcctagtaccccttcagccacccctactccccaagattcaggcttcacccctcagcccactttgttaactcagtttgctcagcagcaaaggtctctgagccaggcaatgcctgtaacaaccattcctctttccaccatggtaacatctataactccaggaaccacggccacccaggtcatggcaaactctgctggacttaacttcatcaatgtagtgggctctgtttgtggggcccaggctttgatgagtggttcaaaccccatgctgggctgtaacactggtgccataactcctgcaggaataaacctgagcggccttctaccctcaggaggtctgctaccaaatgcactgcccagtgcaatgcaggcagcttctcaagcaggtgttccatttggtttaaaaaatacttcaagtctcaggcccttaaatctactccagcttccaggtggttcacttatttttaacactctgcagcagcagcaacagcagctctcccagtttacaccacaacaacctcagcagcccacaacttgtagtcctcaacagccaggggagcagggttctgagcaaggttcaaccagtcaagaacaggccttatctgctcagcaagctgctgttattaaccttactggagtaggaagttttatgcagtcacaggcagctgcagttgcgattcttgcagcatcaaatggctatggcagcagcagcagcacaaacagctcagctacatcatcatcggcatacaggcagccagtcaaaaagtaaaatgaagagaggcacgccaaccactccaaaattttgagtcttgcattactttttgttccttttttaaaaacacaagagcactgaatcaaaagaattgagtttctactttttgttttttttaatgtgtcagtattttacattgctagatgtacaaactttatacagaagcacaaccttatcatttttaaataaaaacagggaaatggtttaacaaac

SEQ ID NO: 186189 - DNA, 2625 bp, Homo sapiens
  Payload ID: 16666
  Gene Symbol: SUPT20H
  Gene Name: SPT20 homolog, SAGA complex component
  Uniprot ID: Q8NEM7
  ENST ID: ENST00000464744
  CDS Start-End: 332-2533
agagacccggcaggccggggcggaggttgaggcagctaaactccaggtggacgcctacatcgcctttcgcggtgttgctaagccgaacttttaattttagtttgacttttgggttccagagacgggtatttccggacactggcaagaattttgccttgcgtgtcttcgaaggcggttttcttggtgtccatattgcataaaggcttgtcgctcctctgtggagatgacggttgtacagtactgtaagattgatgttaaaggcatggtgttcaccccacttcatcagcgtacataagttatctcttcttttggacccttattttatgccataatgcaacaagctttagaactagctttggatcgtgcagagtatgtcattgaaagtgcccgacagagacctcctaaaaggaaatacctatcaagtggaagaaaatctgtatttcaaaaactttatgacttgtatattgaagaatgtgaaaaagaacctgaagttaagcagaaattaagaagaaatgtgaacttgttagagaagcttgttatgcaagagactttgtcatgtttagtggtcaatctatacccaggaaatgagggatattctctgatgctcaggggaaaaaacggatcagattccgagaccattcgactgccctatgaagaaggagagttgcttgaatatttggatgcagaagaattacctcctattttggttgatctcctagaaaaatctcaggttaatatttttcattgcggatgtgtcatagcagaaatacgtgactacaggcagtccagtaacatgaaatctcctggttaccaaagtcggcacattctcttacgtccaacaatgcagactttaatttgtgatgtacattcaataacaagtgataaccacaaatggacccaggaagacaaacttttgcttgagagccagctcatcctagctacagctgaaccactctgtcttgatccttctatagcagtcacctgcactgcaaacagactgctctataacaagcaaaagatgaacactcgcccaatgaaacggtgtttcaagaggtattccagatcctctctgaatcggcagcaagatctatctcattgtccacctcctcctcagctgaggttacttgatttcttacaaaaaagaaaggaaagaaaagcaggtcagcattatgacctcaaaatttctaaggcaggaaattgtgtagatatgtggaaacggagtccctgtaatttggccataccttctgaagtagatgtggagaaatatgctaaagtggaaaagtctatcaaatctgatgactcacagccaacagtctggccagcccatgatgtaaaagatgattatgtatttgaatgtgaagctggtactcagtatcagaaaacaaagctgaccatcttgcagtcgcttggagatccactttactatggtaaaatacagccatgtaaagcagatgaagaaagtgacagccagatgtctccatcacactcgtccacagatgatcattcaaattggttcattattggatcaaagaccgatgctgagagggtagtcaatcagtaccaagaattagtccagaatgaagccaaatgtccggtcaagatgtcacacagctccagtggctcagccagtctgagtcaggtttctccagggaaagaaacagatcaaactgaaaccgtgtcagttcagtcttcggtattggggaagggtgtaaaacatcgacccccaccaatcaaacttccctcaagctcaggaaatagttcctcaggtaactattttacaccacaacagacaagcagctttctcaaatctccaactcctcctccttcttctaagccatcaagtattcctcggaaatcatctgtggatctcaatcaagttagcatgctttctccagctgccctatcacctgccagctcatcacaaagaaccacggccacccaggtcatggcaaactctgctggacttaacttcatcaatgtagtgggctctgtttgtggggcccaggctttgatgagtggttcaaaccccatgctgggctgtaacactggtgccataactcctgcaggaataaacctgagcggccttctaccctcaggaggtctgctaccaaatgcactgcccagtgcaatgcaggcagcttctcaagcaggtgttccatttggtttaaaaaatacttcaagtctcaggcccttaaatctactccagcttccaggtggttcacttatttttaacactctgcagcagcagcaacagcagctctcccagtttacaccacaacaacctcagcagcccacaacttgtagtcctcaacagccaggggagcagggttctgagcaaggttcaaccagtcaagaacaggccttatctgctcagcaagctgctgttattaaccttactggagtaggaagttttatgcagtcacaggcagctgcagttgcgattcttgcagcatcaaatggctatggcagcagcagcagcacaaacagctcagctacatcatcatcggcatacaggcagccagtcaaaaagtaaaatgaagagaggcacgccaaccactccaaaattttgagtcttgcattactttttgttccttttttaaaaacacaagagcactgaatcaaaag

SEQ ID NO: 186190 - DNA, 1313 bp, Homo sapiens
  Payload ID: 16666
  Gene Symbol: SUPT20H
  Gene Name: SPT20 homolog, SAGA complex component
  ENST ID: ENST00000469488
  CDS Start-End: 1-1135
ttcaaattggttcattattggatcaaagaccgatgctgagagggtagtcaatcagtaccaagaattagtccagaatgaagccaaatgtccggtcaagatgtcacacagctccagtggctcagccagtctgagtcaggtttctccagggaaagaaacagatcaaactgaaaccgtgtcagttcagtcttcggtattggggaagggtgtaaaacatcgacccccaccaatcaaacttccctcaagctcaggaaatagttcctcaggtaactattttacaccacaacagacaagcagctttctcaaatctccaactcctcctccttcttctaagccatcaagtattcctcggaaatcatctgtggatctcaatcaagttagcatgctttctccagctgccctatcacctgccagctcatcacaaagaaccacggccacccaggtcatggcaaactctgctggacttaacttcatcaatgtagtgggctctgtttgtggggcccaggctttgatgagtggttcaaaccccatgctgggctgtaacactggtgccataactcctgcaggaataaacctgagcggccttctaccctcaggaggtctgctaccaaatgcactgcccagtgcaatgcaggcagcttctcaagcaggtgttccatttggtttaaaaaatacttcaagtctcaggcccttaaatctactccagcagcagcaacagcagctctcccagtttacaccacaacaacctcagcagcccacaacttgtagtcctcaacagccaggggagcagggttctgagcaaggttcaaccagtcaagaacaggccttatctgctcagcaagctgctgttattaaccttactggagtaggaagttttatgcagtcacaggcagctgtgttgtctcagcttggctctgccgagaacagacctgagcaaagccttcctcagcagagattccagctctcctctgcctttcaacagcagcagcaacagatacaacagttgcgattcttgcagcatcaaatggctatggcagcagcagcagcacaaacagctcagctacatcatcatcggcatacaggcagccagtcaaaaagtaaaatgaagagaggcacgccaaccactccaaaattttgagtcttgcattactttttgttccttttttaaaaacacaagagcactgaatcaaaagaattgagtttctactttttgttttttttaatgtgtcagtattttacattgctagatgtacaaactttatacagaagcacaaccttatcatttttaaataaaaacagggaaatggtttaacaaa

SEQ ID NO: 186191 - DNA, 734 bp, Homo sapiens
  Payload ID: 16666
  Gene Symbol: SUPT20H
  Gene Name: SPT20 homolog, SAGA complex component
  ENST ID: ENST00000497318
  CDS Start-End: 165-734
cggggcgggtgggctttgctgccgagcaggcggcgccgtcttggggcctagcggcgaggcgacccgcacagtactgtaagattgatgttaaaggcatggtgttcaccccacttcatcagcgtacataagttatctcttcttttggacccttattttatgccataatgcaacaagctttagaactagctttggatcgtgcagagtatgtcattgaaagtgcccgacagagacctcctaaaaggaaatacctatcaagtggaagaaaatctgtatttcaaaaactttatgacttgtatattgaagaatgtgaaaaagaacctgaagttaagcagaaattaagaagaaatgtgaacttgttagagaagcttgttatgcaagagactttgtcatgtttagtggtcaatctatacccaggaaatgagggatattctctgatgctcaggggaaaaaacggatcagattccgagaccattcgactgccctatgaagaaggagagttgcttgaatatttggatgcagaagaattacctcctattttggttgatctcctagaaaaatctcaggttaatatttttcattgcggatgtgtcatagcagaaatacgtgactacaggcagtccagtaacatgaaatctcctggttaccaaagtcggcacattctcttacgtccaacaatgcagactttaatttgtgatgtacattcaataacaagtgataaccacaaatggacccag

SEQ ID NO: 186192 - DNA, 2478 bp, Homo sapiens
  Payload ID: 16666
  Gene Symbol: SUPT20H
  Gene Name: SPT20 homolog, SAGA complex component
  ENST ID: ENST00000542180
  CDS Start-End: 157-2367
ctctttttttttctcttaatagccttatgttaatattggggttttattgtttttgcttttcagtactgtaagattgatgttaaaggcatggtgttcaccccacttcatcagcgtacataagttatctcttcttttggacccttattttatgccataatgcaacaagctttagaactagctttggatcgtgcagagtatgtcattgaaagtgcccgacagagacctcctaaaaggaaatacctatcaagtggaagaaaatctgtatttcaaaaactttatgacttgtatattgaagaatgtgaaaaagaacctgaagttaagaaattaagaagaaatgtgaacttgttagagaagcttgttatgcaagagactttgtcatgtttagtggtcaatctatacccaggaaatgagggatattctctgatgctcaggggaaaaaacggatcagattccgagaccattcgactgccctatgaagaaggagagttgcttgaatatttggatgcagaagaattacctcctattttggttgatctcctagaaaaatctcaggttaatatttttcattgcggatgtgtcatagcagaaatacgtgactacaggcagtccagtaacatgaaatctcctggttaccaaagtcggcacattctcttacgtccaacaatgcagactttaatttgtgatgtacattcaataacaagtgataaccacaaatggacccaggaagacaaacttttgcttgagagccagctcatcctagctacagctgaaccactctgtcttgatccttctatagcagtcacctgcactgcaaacagactgctctataacaagcaaaagatgaacactcgcccaatgaaacggtgtttcaagaggtattccagatcctctctgaatcggcagcaagatctatctcattgtccacctcctcctcagctgaggttacttgatttcttacaaaaaagaaaggaaagaaaagcaggtcagcattatgacctcaaaatttctaaggcaggaaattgtgtagatatgtggaaacggagtccctgtaatttggccataccttctgaagtagatgtggagaaatatgctaaagtggaaaagtctatcaaatctgatgactcacagccaacagtctggccagcccatgatgtaaaagatgattatgtatttgaatgtgaagctggtactcagtatcagaaaacaaagctgaccatcttgcagtcgcttggagatccactttactatggtaaaatacagccatgtaaagcagatgaagaaagtgacagccagatgtctccatcacactcgtccacagatgatcattcaaattggttcattattggatcaaagaccgatgctgagagggtagtcaatcagtaccaagaattagtccagaatgaagccaaatgtccggtcaagatgtcacacagctccagtggctcagccagtctgagtcaggtttctccagggaaagaaacagatcaaactgaaaccgtgtcagttcagtcttcggtattggggaagggtgtaaaacatcgacccccaccaatcaaacttccctcaagctcaggaaatagttcctcaggtaactattttacaccacaacagacaagcagctttctcaaatctccaactcctcctccttcttctaagccatcaagtattcctcggaaatcatctgtggatctcaatcaagttagcatgctttctccagctgccctatcacctgccagctcatcacaaagaaccacggccacccaggtcatggcaaactctgctggacttaacttcatcaatgtagtgggctctgtttgtggggcccaggctttgatgagtggttcaaaccccatgctgggctgtaacactggtgccataactcctgcaggaataaacctgagcggccttctaccctcaggaggtctgctaccaaatgcactgcccagtgcaatgcaggcagcttctcaagcaggtgttccatttggtttaaaaaatacttcaagtctcaggcccttaaatctactccagcttccaggtggttcacttatttttaacactctgcagcagcagcaacagcagctctcccagtttacaccacaacaacctcagcagcccacaacttgtagtcctcaacagccaggggagcagggttctgagcaaggttcaaccagtcaagaacaggccttatctgctcagcaagctgctgttattaaccttactggagtaggaagttttatgcagtcacaggcagctgcagttgcgattcttgcagcatcaaatggctatggcagcagcagcagcacaaacagctcagctacatcatcatcggcatacaggcagccaggagcactgaatcaaaagaattgagtttctactttttgttttttttaatgtgtcagtattttacattgctagatgtacaaactttatacagaagcacaaccttatcatttttaaataaaaacagggaaatggttt

SEQ ID NO: 186193 - DNA, 3669 bp, Homo sapiens
  Payload ID: 16666
  Gene Symbol: SUPT20H
  Gene Name: SPT20 homolog, SAGA complex component
  ENST ID: ENST00000495071
  CDS Start-End: 222-1718
tcggaagtgcggccgccggaactggctgttggtgggggtgcagcactgagccgccgacggggcgggtgggctttgctgccgagcaggcggcgccgtcttggggcctagcggcgaggcgacccgcacagtactgtaagattgatgttaaaggcatggtgttcaccccacttcatcagcgtacataagttatctcttcttttggacccttattttatgccataatgtatgtcattgaaagtgcccgacagagacctcctaaaaggaaatacctatcaagtggaagaaaatctgtatttcaaaaactttatgacttgtatattgaagaatgtgaaaaagaacctgaagttaagaaattaagaagaaatgtgaacttgttagagaagcttgttatgcaagagactttgtcatgtttagtggtcaatctatacccaggaaatgagggatattctctgatgctcaggggaaaaaacggatcagattccgagaccattcgactgccctatgaagaaggagagttgcttgaatatttggatgcagaagaattacctcctattttggttgatctcctagaaaaatctcaggttaatatttttcattgcggatgtgtcatagcagaaatacgtgactacaggcagtccagtaacatgaaatctcctggttaccaaagtcggcacattctcttacgtccaacaatgcagactttaatttgtgatgtacattcaataacaagtgataaccacaaatggacccaggaagacaaacttttgcttgagagccagctcatcctagctacagctgaaccactctgtcttgatccttctatagcagtcacctgcactgcaaacagactgctctataacaagcaaaagatgaacactcgcccaatgaaacggtgtttcaagaggtattccagatcctctctgaatcggcagcaagatctatctcattgtccacctcctcctcagctgaggttacttgatttcttacaaaaaagaaaggaaagaaaagcaggtcagcattatgacctcaaaatttctaaggcaggaaattgtgtagatatgtggaaacggagtccctgtaatttggccataccttctgaagtagatgatgtaaaagatgattatgtatttgaatgtgaagctggtactcagtatcagaaaacaaagctgaccatcttgcagtcgcttggagatccactttactatggtaaaatacagccatgtaaagcagatgaagaaagtgacagccagatgtctccatcacactcgtccacagatgatcattcaaattggttcattattggatcaaagaccgatgctgagagggtagtcaatcagtaccaagaattagtccagaatgaagccaaatgtccggtcaagatgtcacacagctccagtggctcagccagtctgagtcaggtttctccagggaaagaaacagatcaaactgaaaccgtgtcagttcagtcttcggtattggggaagggtgtaaaacatcgacccccaccaatcaaacttccctcaagctcaggaaatagttcctcaggtaactattttacaccacaacagacaagcagctttctcaaatctccaactcctcctccttcttctaagccatcaagtattcctcggaaatcatctgtggatctcaatcaagttagcatgctttctccagctgccctatcacctgccagctcatcacaaagacatgaaagctaaaaaagaaaacacctcaagagcttttggttttacttttttggtttttgttttttgtttttgttttttaaaaaattgataaactgtgcatacttcattcacaacagattttctatacattctacatttaaacagaagtacacagttactgttaaagatgcagtattatctctcagatatttgctttattactgttttttgtaaatttgtttgtcaggataaacttgatgtgttaggaattaaacatgtatatttaggtgccaaatatgattgttaaccatatgtaacttattaaatatgtttacagtttatctcagacttttacactaaataagcaatatttttaaatgaagtcttgaattagtgaaatcgtaaataacaaattaatttgaattcgttttgaactttttaggccaaaggcagcatgtaggaaactaacttttaaatgggtattgtggtagaatataactgtatatttttactgttactgcaatagcatctttaatgggatttttaggtgatatactgcatccttaattgtaattgagtgtagcaacactcatgtatcatgtgtagaaattaacacttgcagttaactgctaaaaaaaaaaaaactagaacaaattgtcagtgctaagtaagattccattaaccttattttaaaaggactggccatttataacaaactagcaatttttatttttctcaatgagcaggatctggaactcctaagccatctactcctacaccaaccccttcatcgaccccacaccctcctgatgctcagagctcaactcctagtaccccttcagccacccctactccccaagattcaggcttcacccctcagcccactttgttaactcagtttgctcagcagcaaaggtctctgagccaggcaatgcctgtaacaaccattcctctttccaccatggtaacatctataactccaggaaccacggccacccaggtcatggcaaactctgctggacttaacttcatcaatgtagtgggctctgtttgtggggcccaggctttgatgagtggttcaaaccccatgctgggctgtaacactggtgccataactcctgcaggaataaacctgagcggccttctaccctcaggaggtctgctaccaaatgcactgcccagtgcaatgcaggcagcttctcaagcaggtgttccatttggtttaaaaaatacttcaagtctcaggcccttaaatctactccagcttccaggtggttcacttatttttaacactctgcagcagcagcaacagcagctctcccagtttacaccacaacaacctcagcagcccacaacttgtagtcctcaacagccaggggagcagggttctgagcaaggttcaaccagtcaagaacaggccttatctgctcagcaagctgctgttattaaccttactggagtaggaagttttatgcagtcacaggcagctgcagttgcgattcttgcagcatcaaatggctatggcagcagcagcagcacaaacagctcagctacatcatcatcggcatacaggcagccagtcaaaaagtaaaatgaagagaggcacgccaaccactccaaaattttgagtcttgcattactttttgttccttttttaaaaacacaagagcactgaatcaaaagaattgagtttctactttttgttttttttaatgtgtcagtattttacattgctagatgtacaaactttatacagaagcacaaccttatcatttttaaataaaaacagggaaatggtttaacaaactagggttggtttgcctaagtcattgctttttaaaaatggtttcactatacataatatatatggaagtgacctaagaaataatagaaacatctttcagaagaatgtagtttgatatttatttagtataaaacgtttgtgcacagtgttaacaaatacaatttttacaaatctgttttg

SEQ ID NO: 186194 - DNA, 3811 bp, Homo sapiens
  Payload ID: 16666
  Gene Symbol: SUPT20H
  Gene Name: SPT20 homolog, SAGA complex component
  ENST ID: ENST00000490716
  CDS Start-End: 184-1752
ggaggaagacggggtccccagagacccggcaggccggggcggaggttgaggcagctaaactccaggtggacgcctacatcgcctttcgcgtactgtaagattgatgttaaaggcatggtgttcaccccacttcatcagcgtacataagttatctcttcttttggacccttattttatgccataatgtatgtcattgaaagtgcccgacagagacctcctaaaaggaaatacctatcaagtggaagaaaatctgtatttcaaaaactttatgacttgtatattgaagaatgtgaaaaagaacctgaagttaagaaattaagaagaaatgtgaacttgttagagaagcttgttatgcaagagactttgtcatgtttagtggtcaatctatacccaggaaatgagggatattctctgatgctcaggggaaaaaacggatcagattccgagaccattcgactgccctatgaagaaggagagttgcttgaatatttggatgcagaagaattacctcctattttggttgatctcctagaaaaatctcaggttaatatttttcattgcggatgtgtcatagcagaaatacgtgactacaggcagtccagtaacatgaaatctcctggttaccaaagtcggcacattctcttacgtccaacaatgcagactttaatttgtgatgtacattcaataacaagtgataaccacaaatggacccaggaagacaaacttttgcttgagagccagctcatcctagctacagctgaaccactctgtcttgatccttctatagcagtcacctgcactgcaaacagactgctctataacaagcaaaagatgaacactcgcccaatgaaacggtgtttcaagaggtattccagatcctctctgaatcggcagcaagatctatctcattgtccacctcctcctcagctgaggttacttgatttcttacaaaaaagaaaggaaagaaaagcaggtcagcattatgacctcaaaatttctaaggcaggaaattgtgtagatatgtggaaacggagtccctgtaatttggccataccttctgaagtagatgtggagaaatatgctaaagtggaaaagtctatcaaatctgatgactcacagccaacagtctggccagcccatgatgtaaaagatgattatgtatttgaatgtgaagctggtactcagtatcagaaaacaaagctgaccatcttgcagtcgcttggagatccactttactatggtaaaatacagccatgtaaagcagatgaagaaagtgacagccagatgtctccatcacactcgtccacagatgatcattcaaattggttcattattggatcaaagaccgatgctgagagggtagtcaatcagtaccaagaattagtccagaatgaagccaaatgtccggtcaagatgtcacacagctccagtggctcagccagtctgagtcaggtttctccagggaaagaaacagatcaaactgaaaccgtgtcagttcagtcttcggtattggggaagggtgtaaaacatcgacccccaccaatcaaacttccctcaagctcaggaaatagttcctcaggtaactattttacaccacaacagacaagcagctttctcaaatctccaactcctcctccttcttctaagccatcaagtattcctcggaaatcatctgtggatctcaatcaagttagcatgctttctccagctgccctatcacctgccagctcatcacaaagacatgaaagctaaaaaagaaaacacctcaagagcttttggttttacttttttggtttttgttttttgtttttgttttttaaaaaattgataaactgtgcatacttcattcacaacagattttctatacattctacatttaaacagaagtacacagttactgttaaagatgcagtattatctctcagatatttgctttattactgttttttgtaaatttgtttgtcaggataaacttgatgtgttaggaattaaacatgtatatttaggtgccaaatatgattgttaaccatatgtaacttattaaatatgtttacagtttatctcagacttttacactaaataagcaatatttttaaatgaagtcttgaattagtgaaatcgtaaataacaaattaatttgaattcgttttgaactttttaggccaaaggcagcatgtaggaaactaacttttaaatgggtattgtggtagaatataactgtatatttttactgttactgcaatagcatctttaatgggatttttaggtgatatactgcatccttaattgtaattgagtgtagcaacactcatgtatcatgtgtagaaattaacacttgcagttaactgctaaaaaaaaaaaaactagaacaaattgtcagtgctaagtaagattccattaaccttattttaaaaggactggccatttataacaaactagcaatttttatttttctcaatgagcaggatctggaactcctaagccatctactcctacaccaaccccttcatcgaccccacaccctcctgatgctcagagctcaactcctagtaccccttcagccacccctactccccaagattcaggcttcacccctcagcccactttgttaactcagtttgctcagcagcaaaggtctctgagccaggcaatgcctgtaacaaccattcctctttccaccatggtaacatctataactccaggaaccacggccacccaggtcatggcaaactctgctggacttaacttcatcaatgtagtgggctctgtttgtggggcccaggctttgatgagtggttcaaaccccatgctgggctgtaacactggtgccataactcctgcaggaataaacctgagcggccttctaccctcaggaggtctgctaccaaatgcactgcccagtgcaatgcaggcagcttctcaagcaggtgttccatttggtttaaaaaatacttcaagtctcaggcccttaaatctactccagcttccaggtggttcacttatttttaacactctgcagcagcagcaacagcagctctcccagtttacaccacaacaacctcagcagcccacaacttgtagtcctcaacagccaggggagcagggttctgagcaaggttcaaccagtcaagaacaggccttatctgctcagcaagctgctgttattaaccttactggagtaggaagttttatgcagtcacaggcagctgtgttgtctcagcttggctctgccgagaacagacctgagcaaagccttcctcagcagagattccagctctcctctgcctttcaacagcagcagcaacagatacaacagttgcgattcttgcagcatcaaatggctatggcagcagcagcagcacaaacagctcagctacatcatcatcggcatacaggcagccagtcaaaaagtaaaatgaagagaggcacgccaaccactccaaaattttgagtcttgcattactttttgttccttttttaaaaacacaagagcactgaatcaaaagaattgagtttctactttttgttttttttaatgtgtcagtattttacattgctagatgtacaaactttatacagaagcacaaccttatcatttttaaataaaaacagggaaatggtttaacaaactagggttggtttgcctaagtcattgctttttaaaaatggtttcactatacataatatatatggaagtgacctaagaaataatagaaacatctttcagaagaatgtagtttgatatttatttagtataaaacgtttgtgcacagtgttaacaaatacaatttttacaaatctgttttgaaaa

SEQ ID NO: 186195 - DNA, 3857 bp, Homo sapiens
  Payload ID: 16667
  Gene Symbol: SUPT3H
  Gene Name: SPT3 homolog, SAGA and STAGA complex component
  ENST ID: ENST00000306867
  CDS Start-End: 274-771
attttgcaggtattctttaggtgatgctagaaggcctcttcatgaaacagcagttttggtagaagatgtggtacacactcagttaattaatctgttacagcaagctgctgaagtttctcagctgcggggagcaagggtaatcactcctgaagatcttctgtttttgatgcgcaaagataagacaaattgagtggcagcaataatgcgaacaaaagacaaaagattgctcaggacttcctcaactctattgaccagacaggagaacttttagcaatgtttgaagatgacgaaattgatgaagttaaacaagaaagaatggagagagcagaaagacaaactcgaattatggattcagctcaatatgcagaattctgtgaaagtcgacaattaagtttctccaaaaaagcttccaaatttcgagactggttggactgcagcagtatggagataaaacccaatgttgtcgcaatggaaatcttagcatatttagcgtatgaaactgtggcacagttagtggatctggctcttcttgtgaggcaagacatggtaaccaaggcaggggaccccttcagccatgccatttctgcaaccttcattcagtatcacaactctgctgagagcactgcagcctgtggtgttgaggctcacagcgatgccatccagccctgccacatcagagaggccattcgacgctacagccacaggattggcccactttccccattcacaaatgcctaccgcaggaatgggatggcttttctagcctgctgatgtgacaactgtgatgtgcctgcaacaacaggaaaggcaatgttatattaaggtgatttcttgtgaacaaaataaaatacaaatttacctttcttttatctgagggagtgggctggtctgttgtgactttcaacttgctgactcctcctcttttccagcccctcaaccatcggtcttgtttactagatgggctgttcagctaattaatggcaggatgtttaggatagtctgtaggtggacaagaatgcagatcacacagttttgaaattttaatttgagtagatttactgccctcagctcacataccttaaaagcagtggttgcccccgtccagcgttttgtctgcattttatttgatatattttataatccaggtttggaacaaggaaacaaaattaaaaggacagtgagttttcgccttcccttacaccaccaactttactttccaacatttgttgacatgtgttttagtgacagctatccattttataaacttacagtaatcaaagatctaacagacctgataaatcacctgttcccacctcctttccccttcactccacttatagtatgtgtcattttcaatgcctgcttcccaacttcctgccatctgcctttcatgtgtgtttttcctcacacagaacctcttcctccatcttcatttccctccttttcctgttcctccaatccccagatccaccactcctgcacatgccatacacatttagaagccaagtattcagaatcagtagaaggggagcagagtgatttcttgcttcctcccttcaaagcactaccacacctagactggaaatgtgggctgggtaatttcttgctgttagcagccgagctacccttctggcatctatactttctccagtaaatgaggaaccgtaactctttggaacaaaccaaaatatagcagatgtaattgtacagttcctgattaaacttcagttgcaaaaaagaaagttatttctttaattctgtgggagttttgtataattttacttttatggtttttacacatacttgaaacactctttctaaagaattaataaaaacagaaatgagaaacatgaaagatctttttcttgatactgctcctttttcttgatactgctcaagagagcaagcctctcttgatactgcttcctagatttaagggtaaagaaagtagaaatagttctcccttcacccaaatttggaagtataaaactttctgaacatgccatttagaggttatgtcattagctttcctgccttcttatattgtaatagttgcgattcaaaaacactgtttcaattttaaattcaagactttttatttgaaaaccatcagactcaaagaattatgaggctcagttaatattattatgccacattatttacatttgttaactgtcatttacctgctctatgttaatctttttagaaaaaatttgcatttcagaaacaaaaagcacggatagatatataatatcaaaatattcccaaaggattttgatgttccatctatgcttgttaaaatgtatgattatgattaaactttttatcattcttattttccttggcatccataatcatggaaaattacaagcttgcagtaaacatcctaacttaacttaacttttaaacgatagcatttattgtatttggttttgatctgccaggcttatagatggtataaaattttcaggggataatttttcacatcaaaattccttctctcccacattatacattttaaagtatgcacaaggcagaaaatatagggtttgggtttttttccttcgttttattccacctgatctccttatagtcccagagaaggaagactcaatgtacatttctctcagaaatatgacaggtctgtgtttttgttggtctggcatatgtttgtctatcttgaacagtctgacaggtaattatttataaaatctggttttgcccagtaagttcatataaaacctttcatttttcatcataagccagtaagctgaatttagaataaagcaaggtcatttatgtctgtcctgaaccagcctacatgtccccataattgctcaatatttttaattcccttttctattttttatacttaggttctttctctgactctttgcacaatactaaatttgaagtgaaataaaacttccttcagcagtgactatagaaacaaaagaaaatttacagaaggaatgtttaagaaaacttcagtaaattattttctcaataatcataatgttagagcagaagatagtcttagagatcattaagaacagctgctcatcttgcaaatgaaaaaaccatggcctagagagggaaagtgagtttcctaagatcactcaataatgtagtgacagaccagagatgagaatcgatggtccctaattttcagtcggtattatacagtattttctaccatactgggttagcataagaatattactaagacatgttggggttttatggcatatttatcctagacaacgatgtaaatttatttaaaaactgtactaattatggatacatcctaaagcatacgtgttatatagtaaaatcttcagtgtgactgtggtattaagtaaacagtctgttatcttacacatcaggcttaactctaagtcaaatggaaatatacaaagctagtttctattttttgtcccttgtattttagagactgaatttgaaaataaataagccaataaataaatagcgtctcttgatactgcttcctagatttaagggtaaagaaagtagaaatatttctcccttcacctaaatttggaagtataactttctgaacgtgccatttagagggttatgccattagctttcctgccttcttagattgtaatcgttgtgattcaaaaatactgtttcaattttaaaaccaagactttttatttgaaaaccatcagaagcacaaatattttttaaatggtgtatataattcctgtatctggggagaacccttcatttattgctgttctttgtttttataaaataataaacaagccatgtctgatgcttttaccatgtagaagacaaataaacataactggtgattcttggtctgaaag

SEQ ID NO: 186196 - DNA, 728 bp, Homo sapiens
  Payload ID: 16667
  Gene Symbol: SUPT3H
  Gene Name: SPT3 homolog, SAGA and STAGA complex component
  ENST ID: ENST00000371458
  CDS Start-End: 358-684
ggggcattatggctgcctctgttgccccacgcaggtcgccagggaagtgggggaaagccagcagccgcaggcctcacccagctcccatgcagcccacagcccgaaaggccggtctcactccaccatgccctctgcccgtaacagcaccaactttatttccaggcagctggtgagcagggctgagaactttccccaggctaccggcttcctagctgagaaagcaagcctactcacagttcctctgcgtcccacagagcctgcagtggtgatccacctccttcaagggccaaaaaagcttccaaatttcgagactggttggactgcagcagtatggagataaaacccaatgttgtcgcaatggaaatcttagcatatttagcgtatgaaactgtggcacagttagtggatctggctcttcttgtgaggcaagacatggtaaccaaggcaggggaccccttcagccatgccatttctgcaaccttcattcagtatcacaactctgctgagagcactgcagcctgtggtgttgaggctcacagcgatgccatccagccctgccacatcagagaggccattcgacgctacagccacaggattggcccactttccccattcacaatttctttttctttgacagaatgcctaccgcaggaatgggatggcttttctagcctgctgatgtgacaactgtgatgtgcctgcaacaacaggaaaggcaatgttatatt

SEQ ID NO: 186197 - DNA, 2091 bp, Homo sapiens
  Payload ID: 16667
  Gene Symbol: SUPT3H
  Gene Name: SPT3 homolog, SAGA and STAGA complex component
  Uniprot ID: O75486
  ENST ID: ENST00000371459
  CDS Start-End: 167-1120
cacagccgagtcaccttttccctttctacactccacactctcagtcccccaccccgcccctttccaagcgtgtcccgggccgcagcagcagaaaccgcaccatctccacccccacattctcctcgcgggaagcgcagcagtgcctccaagggttcttaaagcagagatgaataatacggcagctagtccaatgtctactgcaacttcaagtagtggaaggagtacagggaagtctataagctttgcaacagaattacagagtatgatgtattctttaggtgatgctagaaggcctcttcatgaaacagcagttttggtagaagatgtggtacacactcagttaattaatctgttacagcaagctgctgaagtttctcagctgcggggagcaagggtaatcactcctgaagatcttctgtttttgatgcgcaaagataagaaaaaacttagaagactgctaaaatacatgtttatccgagactacaaatcaaagattgtcaaaggcatcgatgaggatgatcttctcgaagacaaattgagtggcagcaataatgcgaacaaaagacaaaagattgctcaggacttcctcaactctattgaccagacaggagaacttttagcaatgtttgaagatgacgaaattgatgaagttaaacaagaaagaatggagagagcagaaagacaaactcgaattatggattcagctcaatatgcagaattctgtgaaagtcgacaattaagtttctccaaaaaagcttccaaatttcgagactggttggactgcagcagtatggagataaaacccaatgttgtcgcaatggaaatcttagcatatttagcgtatgaaactgtggcacagttagtggatctggctcttcttgtgaggcaagacatggtaaccaaggcaggggaccccttcagccatgccatttctgcaaccttcattcagtatcacaactctgctgagagcactgcagcctgtggtgttgaggctcacagcgatgccatccagccctgccacatcagagaggccattcgacgctacagccacaggattggcccactttccccattcacaaatgcctaccgcaggaatgggatggcttttctagcctgctgatgtgacaactgtgatgtgcctgcaacaacaggaaaggcaatgttatattaaggtgatttcttgtgaacaaaataaaatacaaatttacctttcttttatctgagggagtgggctggtctgttgtgactttcaacttgctgactcctcctcttttccagcccctcaaccatcggtcttgtttactagatgggctgttcagctaattaatggcaggatgtttaggatagtctgtaggtggacaagaatgcagatcacacagttttgaaattttaatttgagtagatttactgccctcagctcacataccttaaaagcagtggttgcccccgtccagcgttttgtctgcattttatttgatatattttataatccaggtttggaacaaggaaacaaaattaaaaggacagtgagttttcgccttcccttacaccaccaactttactttccaacatttgttgacatgtgttttagtgacagctatccattttataaacttacagtaatcaaagatctaacagacctgataaatcacctgttcccacctcctttccccttcactccacttatagtatgtgtcattttcaatgcctgcttcccaacttcctgccatctgcctttcatgtgtgtttttcctcacacagaacctcttcctccatcttcatttccctccttttcctgttcctccaatccccagatccaccactcctgcacatgccatacacatttagaagccaagtattcagaatcagtagaaggggagcagagtgatttcttgcttcctcccttcaaagcactaccacacctagactggaaatgtgggctgggtaatttcttgctgttagcagccgagctacccttctggcatctatactttctccagtaaatgaggaaccgtaactctttggaacaaaccaaaatatagcagatgtaattgtacagttcctgattaaacttcagttgcaaaaaagaaa

SEQ ID NO: 186198 - DNA, 2389 bp, Homo sapiens
  Payload ID: 16667
  Gene Symbol: SUPT3H
  Gene Name: SPT3 homolog, SAGA and STAGA complex component
  Uniprot ID: O75486
  ENST ID: ENST00000371460
  CDS Start-End: 319-1305
cacagccgagtcaccttttccctttctacactccacactctcagtcccccaccccgcccctttccaagcgtgtcccgggccgcagcagcagaaaccgcaccatctccacccccacattctcctcgcgggaagcgcagcagtgcctccaagggttcttaaagcagagatgaataatacggcagctagtccaatgtctactgcaacttcaagtagtggaaggagtacagggaagtctataagctttgcaacagaattacagagtatgataaactgcttatcaataacagctgtagcactgtggcttttctccatggactcatggtggtctttggaacaacgttcttcaactttgacagcttcatagggaaaacagattctatagaaataattggaaaatcagtttttccctattgttatcacaatatccttccactgctgaatgattctggcaggtattctttaggtgatgctagaaggcctcttcatgaaacagcagttttggtagaagatgtggtacacactcagttaattaatctgttacagcaagctgctgaagtttctcagctgcggggagcaagggtaatcactcctgaagatcttctgtttttgatgcgcaaagataagaaaaaacttagaagactgctaaaatacatgtttatccgagactacaaatcaaagattgtcaaaggcatcgatgaggatgatcttctcgaagacaaattgagtggcagcaataatgcgaacaaaagacaaaagattgctcaggacttcctcaactctattgaccagacaggagaacttttagcaatgtttgaagatgacgaaattgatgaagttaaacaagaaagaatggagagagcagaaagacaaactcgaattatggattcagctcaatatgcagaattctgtgaaagtcgacaattaagtttctccaaaaaagcttccaaatttcgagactggttggactgcagcagtatggagataaaacccaatgttgtcgcaatggaaatcttagcatatttagcgtatgaaactgtggcacagttagtggatctggctcttcttgtgaggcaagacatggtaaccaaggcaggggaccccttcagccatgccatttctgcaaccttcattcagtatcacaactctgctgagagcactgcagcctgtggtgttgaggctcacagcgatgccatccagccctgccacatcagagaggccattcgacgctacagccacaggattggcccactttccccattcacaaatgcctaccgcaggaatgggatggcttttctagcctgctgatgtgacaactgtgatgtgcctgcaacaacaggaaaggcaatgttatattaaggtgatttcttgtgaacaaaataaaatacaaatttacctttcttttatctgagggagtgggctggtctgttgtgactttcaacttgctgactcctcctcttttccagcccctcaaccatcggtcttgtttactagatgggctgttcagctaattaatggcaggatgtttaggatagtctgtaggtggacaagaatgcagatcacacagttttgaaattttaatttgagtagatttactgccctcagctcacataccttaaaagcagtggttgcccccgtccagcgttttgtctgcattttatttgatatattttataatccaggtttggaacaaggaaacaaaattaaaaggacagtgagttttcgccttcccttacaccaccaactttactttccaacatttgttgacatgtgttttagtgacagctatccattttataaacttacagtaatcaaagatctaacagacctgataaatcacctgttcccacctcctttccccttcactccacttatagtatgtgtcattttcaatgcctgcttcccaacttcctgccatctgcctttcatgtgtgtttttcctcacacagaacctcttcctccatcttcatttccctccttttcctgttcctccaatccccagatccaccactcctgcacatgccatacacatttagaagccaagtattcagaatcagtagaaggggagcagagtgatttcttgcttcctcccttcaaagcactaccacacctagactggaaatgtgggctgggtaatttcttgctgttagcagccgagctacccttctggcatctatactttctccagtaaatgaggaaccgtaactctttggaacaaaccaaaatatagcagatgtaattgtacagttcctgattaaacttcagttgcaaaaaagaaagttatttctttaattctgtgggagttttgtataattttacttttatggtttttacacatacttgaaacactctttctaaagaattaataaaaacagaaatgagaaacatgaaa

SEQ ID NO: 186199 - DNA, 1377 bp, Homo sapiens
  Payload ID: 16667
  Gene Symbol: SUPT3H
  Gene Name: SPT3 homolog, SAGA and STAGA complex component
  Uniprot ID: O75486
  ENST ID: ENST00000475057
  CDS Start-End: 187-1140
ccccccccatcgccccgtcacacagccgagtcaccttttccctttctacactccacactctcagtcccccaccccgcccctttccaagcgtgtcccgggccgcagcagcagaaaccgcaccatctccacccccacattctcctcgcgggaagcgcagcagtgcctccaagggttcttaaagcagagatgaataatacggcagctagtccaatgtctactgcaacttcaagtagtggaaggagtacagggaagtctataagctttgcaacagaattacagagtatgatgtattctttaggtgatgctagaaggcctcttcatgaaacagcagttttggtagaagatgtggtacacactcagttaattaatctgttacagcaagctgctgaagtttctcagctgcggggagcaagggtaatcactcctgaagatcttctgtttttgatgcgcaaagataagaaaaaacttagaagactgctaaaatacatgtttatccgagactacaaatcaaagattgtcaaaggcatcgatgaggatgatcttctcgaagacaaattgagtggcagcaataatgcgaacaaaagacaaaagattgctcaggacttcctcaactctattgaccagacaggagaacttttagcaatgtttgaagatgacgaaattgatgaagttaaacaagaaagaatggagagagcagaaagacaaactcgaattatggattcagctcaatatgcagaattctgtgaaagtcgacaattaagtttctccaaaaaagcttccaaatttcgagactggttggactgcagcagtatggagataaaacccaatgttgtcgcaatggaaatcttagcatatttagcgtatgaaactgtggcacagttagtggatctggctcttcttgtgaggcaagacatggtaaccaaggcaggggaccccttcagccatgccatttctgcaaccttcattcagtatcacaactctgctgagagcactgcagcctgtggtgttgaggctcacagcgatgccatccagccctgccacatcagagaggccattcgacgctacagccacaggattggcccactttccccattcacaaatgcctaccgcaggaatgggatggcttttctagcctgctgatgtgacaactgtgatgtgcctgcaacaacaggaaaggcaatgttatattaaggagtaaaccaagccaattcagcacttcctgtttacttccttgtcatatgtaccatagatggtgacagacctgctctcaaaacaagcttccttcgtttaattctgcattttctgcttaggcaaccaccctatcaatatacttgaacaatgaaacaatttggctacggaagcactgtctctgaattc

SEQ ID NO: 186200 - DNA, 1489 bp, Homo sapiens
  Payload ID: 16668
  Gene Symbol: SUPT4H1
  Gene Name: SPT4 homolog, DSIF elongation factor subunit
  Uniprot ID: P63272
  ENST ID: ENST00000225504
  CDS Start-End: 68-421
tatttacttcctgcgggtgcacaggctgtggtcgtctatctccctgttgttcttcccatcggcgaagatggccctggagacggtgccgaaggacctgcggcatctgcgggcctgtttgctgtgttcgctggtcaagactatagaccagtttgaatatgatggttgtgacaattgtgatgcatatctacaaatgaagggtaaccgagagatggtatatgactgcactagctcttcctttgatggaatcattgcgatgatgagtccagaggacagctgggtctccaagtggcagcgagtcagtaactttaagccaggtgtatatgcggtgtcagtcactggtcgcctgccccaaggaatcgtgcgggagctgaaaagtcgaggagtggcctacaaatccagagacacagctataaagacctagcaagatgcaaggctgccagcatctttgctctccacctcctgcctctgcttatttcttgttctggaactaaatgaacagaacttcaaatacttcctaccctccaattcagactcagctgactgttgagagagcagcacatcattttatcattttatcttctttggactacaggtggggtgggagggatttgggttggtggattaacagatggaattgaggagagagtaggatgctgattttcctacccgtggcccaggtctgtgccttccccatgccaaggactctaggtcaaatgtcaataaatatgaacctcgagaaagttctgaaggccatgacacctgccttgcctccctcttccattctcttaggcacagtaatagcttatttgccctataagaaccttcccagagcagcagaggcccttctactccctcttgactgtctcagcctctgggattgcagcctttgtagtgtgcttccttgcttcctatcggagggtgctgatccagaggctcagtaaccccatcaacttggtggccctggtgtctcacacttgtatccttctgccctcgagacctggcacagcagtatcccttgaagaaatcctgaggctttgtagagtgctccttgaccatgtttaataattcttccctcccctgcttgtctattttcttctcttcacggctcttcctataccttaggccagtctcaagcactcactggagacccttgggccttgggcgaccattgagtcctagtctcccttgtttgtgcccctgtaggaggtaggtccttttctcctccggcctagtaggggaccttgggtaacatcccatttttcggccaaggtgagttgttttaggataaaaaaatttaccacaaattctcatttaaatttccacagaaatcctgttcgtatccccattttgatttccctaagttccttgttctccctctaaaaagagaatgattgcaccctgcctgtttacctcaggattgttgtgattgtagaaacgaagctatgtgaaaattatataagtattataaaggtgaaatacttttgctctc

SEQ ID NO: 186201 - DNA, 1643 bp, Homo sapiens
  Payload ID: 16668
  Gene Symbol: SUPT4H1
  Gene Name: SPT4 homolog, DSIF elongation factor subunit
  ENST ID: ENST00000577396
  CDS Start-End: 414-644
cgggggcccgctgactaccccacacagcctccgccgcgccctcggcgggctcaggtggctgcgacgcgctccggcccaggtggcggccggccgcccagcctccccgcctgctggcgggagaaaccatctcctctggcgggggtaggggcggagctggcgtccgcccacaccggaagaggaagtctaagcgccggaagtggtgggcattctgggtaacgagctatttacttcctgcgggtgcacaggctgtggtcgtctatctccctgttgttcttcccatcggcgaagatggccctggagacggtgccgaaggacctgcggcatctgcgggcctgtttgctgtgttcgctggtcaaggtactatagaccagtttgaatatgatggttgtgacaattgtgatgcatatctacaaatgaagggtaaccgagagatggtatatgactgcactagctcttcctttgatggaatcattgcgatgatgagtccagaggacagctgggtctccaagtggcagcgagtcagtaactttaagccaggtgtatatgcggtgtcagtcactggtcgcctgccccaaggaatcgtgcgggagctgaaaagtcgaggagtggcctacaaatccagagacacagctataaagacctagcaagatgcaaggctgccagcatctttgctctccacctcctgcctctgcttatttcttgttctggaactaaatgaacagaacttcaaatacttcctaccctccaattcagactcagctgactgttgagagagcagcacatcattttatcattttatcttctttggactacaggtggggtgggagggatttgggttggtggattaacagatggaattgaggagagagtaggatgctgattttcctacccgtggcccaggtctgtgccttccccatgccaaggactctaggtcaaatgtcaataaatatgaacctcgagaaagttctgaaggccatgacacctgccttgcctccctcttccattctcttaggcacagtaatagcttatttgccctataagaaccttcccagagcagcagaggcccttctactccctcttgactgtctcagcctctgggattgcagcctttgtagtgtgcttccttgcttcctatcggagggtgctgatccagaggctcagtaaccccatcaacttggtggccctggtgtctcacacttgtatccttctgccctcgagacctggcacagcagtatcccttgaagaaatcctgaggctttgtagagtgctccttgaccatgtttaataattcttccctcccctgcttgtctattttcttctcttcacggctcttcctataccttaggccagtctcaagcactcactggagacccttgggccttgggcgaccattgagtcctagtctcccttgtttgtgcccctgtaggaggtaggtccttttctcctccggcctagtaggggaccttgggtaacatcccatttttcggccaaggtgagttgttttaggataaaaaaatttaccacaaattctcatttaaatttccacagaaatcctgttcgtatccccattttgatttccctaagttccttgttctccctctaaaaagagaatgattgcaccctgcctgtttacctcaggattg

SEQ ID NO: 186202 - DNA, 318 bp, Homo sapiens
  Payload ID: 16668
  Gene Symbol: SUPT4H1
  Gene Name: SPT4 homolog, DSIF elongation factor subunit
  ENST ID: ENST00000579289
  CDS Start-End: 2-130
gatggccctggagacggtgccgaaggacctgcggcatctgcgggcctgtttgctgtgttcgctggtcaaggtgtcagtcggggacctggttgtagggcccatgggggaccaagactatagaccagtttgaatatgatggttgtgacaattgtgatgcatatctacaaatgaagggtaaccgagagatggtatatgactgcactagctcttcctttgatggaatcattgcgatgatgagtccagaggacagctgggtctccaagtggcagcgagtcagtaactttaagccaggtgtatatgcggtgtcagtcactggtc

SEQ ID NO: 186203 - DNA, 574 bp, Homo sapiens
  Payload ID: 16668
  Gene Symbol: SUPT4H1
  Gene Name: SPT4 homolog, DSIF elongation factor subunit
  Uniprot ID: P63272
  ENST ID: ENST00000580947
  CDS Start-End: 187-540
acaaatgactgcgttctgcctgcactcgggctattgcgaggacagagagctggtgctccattggcgtgaagtctccagggccagaaggggcctttgtcgcttcctcacaaggcacaagttccccttctgcttccccgagaaaggctgtggtcgtctatctccctgttgttcttcccatcggcgaagatggccctggagacggtgccgaaggacctgcggcatctgcgggcctgtttgctgtgttcgctggtcaagactatagaccagtttgaatatgatggttgtgacaattgtgatgcatatctacaaatgaagggtaaccgagagatggtatatgactgcactagctcttcctttgatggaatcattgcgatgatgagtccagaggacagctgggtctccaagtggcagcgagtcagtaactttaagccaggtgtatatgcggtgtcagtcactggtcgcctgccccaaggaatcgtgcgggagctgaaaagtcgaggagtggcctacaaatccagagacacagctataaagacctagcaagatgcaaggctgccagcatctttgctctcca

SEQ ID NO: 186204 - DNA, 1401 bp, Homo sapiens
  Payload ID: 16668
  Gene Symbol: SUPT4H1
  Gene Name: SPT4 homolog, DSIF elongation factor subunit
  ENST ID: ENST00000581166
  CDS Start-End: 33-212
ctatctccctgttgttcttcccatcggcgaagatggccctggagacggtgccgaaggacctgcggcatctgcgggcctgtttgctgtgttcgctggtcaagactatagaccagtttgaatatgatggttgtgacaattgtgatgcatatctacaaatgaagggtaaccgagagatggtatatgactgcactagctcttcctttgatgggtaactttaagccaggtgtatatgcggtgtcagtcactggtcgcctgccccaaggaatcgtgcgggagctgaaaagtcgaggagtggcctacaaatccagagacacagctataaagacctagcaagatgcaaggctgccagcatctttgctctccacctcctgcctctgcttatttcttgttctggaactaaatgaacagaacttcaaatacttcctaccctccaattcagactcagctgactgttgagagagcagcacatcattttatcattttatcttctttggactacaggtggggtgggagggatttgggttggtggattaacagatggaattgaggagagagtaggatgctgattttcctacccgtggcccaggtctgtgccttccccatgccaaggactctaggtcaaatgtcaataaatatgaacctcgagaaagttctgaaggccatgacacctgccttgcctccctcttccattctcttaggcacagtaatagcttatttgccctataagaaccttcccagagcagcagaggcccttctactccctcttgactgtctcagcctctgggattgcagcctttgtagtgtgcttccttgcttcctatcggagggtgctgatccagaggctcagtaaccccatcaacttggtggccctggtgtctcacacttgtatccttctgccctcgagacctggcacagcagtatcccttgaagaaatcctgaggctttgtagagtgctccttgaccatgtttaataattcttccctcccctgcttgtctattttcttctcttcacggctcttcctataccttaggccagtctcaagcactcactggagacccttgggccttgggcgaccattgagtcctagtctcccttgtttgtgcccctgtaggaggtaggtccttttctcctccggcctagtaggggaccttgggtaacatcccatttttcggccaaggtgagttgttttaggataaaaaaatttaccacaaattctcatttaaatttccacagaaatcctgttcgtatccccattttgatttccctaagttccttgttctccctctaaaaagagaatgattgcaccctgcctgtttacctcaggattgttgtgattgtagaaacgaagctatgtgaaaattatataagtattataaaggtgaaatacttttgctctcctt

SEQ ID NO: 186205 - DNA, 668 bp, Homo sapiens
  Payload ID: 16668
  Gene Symbol: SUPT4H1
  Gene Name: SPT4 homolog, DSIF elongation factor subunit
  ENST ID: ENST00000581540
  CDS Start-End: 112-438
agctttgagagtagtaggtggggaaccttaggatacacagtcaacatagggaaacaagaaattgagcaggtcgaagtattgagaaagctactttttctcttggtcttgttcatgcttatctctccttttcctttatttttctttcactcccagactatagaccagtttgaatatgatggttgtgacaattgtgatgcatatctacaaatgaagggtaaccgagagatggtatatgactgcactagctcttcctttgatggaatcattgcgatgatgagtccagaggacagctgggtctccaagtggcagcgagtcagtaactttaagccaggtgtatatgcggtgtcagtcactggtcgcctgccccaaggaatcgtgcgggagctgaaaagtcgaggagtggcctacaaatccagagacacagctataaagacctagcaagatgcaaggctgccagcatctttgctctccacctcctgcctctgcttatttcttgttctggaactaaatgaacagaacttcaaatacttcctaccctccaattcagactcagctgactgttgagagagcagcacatcattttatcattttatcttctttggactacaggtggggtgggagggatttgggttggtggattaacagatggaattgaggagagagtagga

SEQ ID NO: 186206 - DNA, 3770 bp, Homo sapiens
  Payload ID: 16669
  Gene Symbol: SUPT5H
  Gene Name: SPT5 homolog, DSIF elongation factor subunit
  Uniprot ID: O00267
  ENST ID: ENST00000359191
  CDS Start-End: 248-3499
gcgtgtgcagaggtggcagttccgggcgccggggaggtgtagagaacagattcggaaactggggaggtctagcatgtggcgtaggagggggtcctcactccgcttcgcgattgccaaaacgagcctgccggaagcgccctaaggggttttcttctcccagggaaccagcggggaaactgaggctcggggtggagcgcaggattgtgggacgcgccaaggctgctgtctttcccagcagcagcggaagatgtcggacagcgaggacagcaacttttccgaggaggaggacagcgagcgcagcagtgacggcgaggaggccgaggtagacgaagagcggcggagtgcagcgggcagtgagaaagaagaagagcctgaggacgaagaggaggaggaagaggaggaggaatacgatgaggaagaggaggaagaagatgatgaccgaccccccaagaaaccccgccatggaggcttcattctggacgaggctgatgttgacgatgagtatgaggacgaggaccagtgggaggatggagcagaggacattctagagaaagcctccaatatcgataatgttgtcctggatgaagatcgttctggggctcgccgcctgcaaaacctctggagggaccagcgagaagaagaactgggcgagtattacatgaagaaatacgccaagtcatctgtgggagagacggtgtatggaggatctgatgagctctcagacgacatcacccagcagcagctgctcccaggagtcaaggatcccaatctgtggactgtcaaatgtaagattggggaggaacgggccacggccatttccttgatgcgcaagttcattgcctaccagttcacagacacgcccctgcagatcaagtcagtagtggcaccagagcatgtgaagggctacatctacgtggaggcctacaagcagacccacgtgaagcaggccattgagggggtgggcaacctgcggcttggctactggaaccagcagatggtgcccatcaaggagatgacagacgtgctcaaagtggtgaaggaggtggccaacctgaaaccaaagtcctgggtccgcctcaagcggggcatctacaaggatgacattgctcaggtggactacgtggagcccagccagaacaccatctccctgaagatgatcccacgcatcgactacgatcgcatcaaggcccgcatgagcttgaaagactggtttgccaaaaggaagaagtttaagcggcctccacagaggctgtttgatgctgagaagatcaggtccctggggggtgatgttgcctctgatggtgacttcctcatctttgaggggaaccgttacagccggaagggctttctgttcaagagcttcgccatgtctgctgtgatcacggagggtgtgaagccaacactctctgagctggaaaagtttgaggaccagccagagggcattgacctggaggtggtgactgagagcacagggaaggagcgggagcacaacttccaacctggggacaacgtggaggtctgtgagggtgagctcatcaacctgcagggcaagatcctcagcgtggatggcaacaagatcaccatcatgcccaagcatgaggacctcaaggacatgttggagttcccagcccaggaacttagaaaatacttcaagatgggggaccacgtgaaggtgattgctggccgattcgagggcgacacaggcctcattgtgcgggtggaggagaatttcgttatcctgttctctgacctcaccatgcatgagctgaaggtgctcccccgggacctgcagctctgctcagagacagcatcaggtgtggatgttgggggccagcatgaatggggcgagctggtgcagctggatccccagactgtgggtgtcatcgtgcgactagaacgggagaccttccaggtgctgaacatgtacgggaaggtggtgactgtcagacatcaggctgtgacccggaagaaggacaaccgctttgctgtggccttggactcagagcagaacaacatccatgtgaaagacatcgttaaggtcattgatggcccccactcaggccgagaaggggagattcgccatctcttccgaagcttcgccttcctacattgcaagaaactggtggagaacgggggcatgtttgtctgcaagacccgccacctggtgctggctgggggctcaaagccccgtgatgtgaccaacttcaccgtgggtggctttgcgcctatgagtccccggatcagcagccccatgcaccccagtgctggaggtcagcgtggcggctttggtagcccaggtggcggcagtggtggcatgagcaggggccggggccggagggacaacgaactcatcggccagaccgtgcgcatctcccaggggccctacaaaggctacatcggtgtggtgaaagatgccacagagtccacggcccgtgtggagctgcactccacctgccagaccatctctgtggaccgtcagcggctcaccacggtgggctcacggcgcccgggcggcatgacctcgacctatgggaggacgcccatgtatggctcccagacgcccatgtatggctctggctcccgaacacccatgtacggctcacagacacccctccaggatggtagccgcaccccacactacggctcacagacgcccctgcatgatggcagccgcactcctgcccagagtggggcctgggaccccaacaaccccaacacgccgtcacgggctgaggaagaatatgagtatgctttcgatgatgagcccaccccgtccccgcaggcctatgggggaacccccaatccccaaacacctggctacccagacccctcgtccccacaggtcaacccacaatacaacccgcagacgccagggacgccggccatgtacaacacagaccagttctctccctatgctgccccctccccacaaggttcctaccagcccagccccagcccccagagctaccaccaggtggcgccaagcccagcaggctaccagaatacccactccccagccagctaccaccctacaccgtcgcccatggcctatcaggctagccccagcccgagccccgttggctacagtcctatgacacctggagctccctcccctggtggctacaacccacacacgccaggctcaggcatcgagcagaactccagcgactgggtaaccactgacattcaggtgaaggtgcgggacacctacctggatacacaggtggtgggacagacaggtgtcatccgcagtgtcacggggggcatgtgctctgtgtacctgaaggacagtgagaaggttgtcagcatttccagtgagcacctggagcctatcacccccaccaagaacaacaaggtgaaagtgatcctgggcgaggatcgggaagccacgggcgtcctactgagcattgatggtgaggatggcattgtccgtatggaccttgatgagcagctcaagatcctcaacctccgcttcctggggaagctcctggaagcctgaagcaggcagggccggtggacttcgtcggatgaagagtgatcctccttccttccctggcccttggctgtgacacaagatcctcctgcagggctaggcggattgttctggatttccttttgtttttccttttagttttccatcttttccctccctggtgctcattggaatctgagtagagtctgggggagggtccccaccttcctgtacctcctccccacagcttgcttttgttgtaccgtctttcaataaaaagaagctgtttggtctaaaa

SEQ ID NO: 186207 - DNA, 3698 bp, Homo sapiens
  Payload ID: 16669
  Gene Symbol: SUPT5H
  Gene Name: SPT5 homolog, DSIF elongation factor subunit
  Uniprot ID: O00267
  ENST ID: ENST00000402194
  CDS Start-End: 180-3431
aacgggtaggttctcgcgagaggacccgtcagccccagtcaggcgtcgtgcgaacagcagctggtaccgaaggcggaggtggagcccgagagggaaccagcggggaaactgaggctcggggtggagcgcaggattgtgggacgcgccaaggctgctgtctttcccagcagcagcggaagatgtcggacagcgaggacagcaacttttccgaggaggaggacagcgagcgcagcagtgacggcgaggaggccgaggtagacgaagagcggcggagtgcagcgggcagtgagaaagaagaagagcctgaggacgaagaggaggaggaagaggaggaggaatacgatgaggaagaggaggaagaagatgatgaccgaccccccaagaaaccccgccatggaggcttcattctggacgaggctgatgttgacgatgagtatgaggacgaggaccagtgggaggatggagcagaggacattctagagaaagcctccaatatcgataatgttgtcctggatgaagatcgttctggggctcgccgcctgcaaaacctctggagggaccagcgagaagaagaactgggcgagtattacatgaagaaatacgccaagtcatctgtgggagagacggtgtatggaggatctgatgagctctcagacgacatcacccagcagcagctgctcccaggagtcaaggatcccaatctgtggactgtcaaatgtaagattggggaggaacgggccacggccatttccttgatgcgcaagttcattgcctaccagttcacagacacgcccctgcagatcaagtcagtagtggcaccagagcatgtgaagggctacatctacgtggaggcctacaagcagacccacgtgaagcaggccattgagggggtgggcaacctgcggcttggctactggaaccagcagatggtgcccatcaaggagatgacagacgtgctcaaagtggtgaaggaggtggccaacctgaaaccaaagtcctgggtccgcctcaagcggggcatctacaaggatgacattgctcaggtggactacgtggagcccagccagaacaccatctccctgaagatgatcccacgcatcgactacgatcgcatcaaggcccgcatgagcttgaaagactggtttgccaaaaggaagaagtttaagcggcctccacagaggctgtttgatgctgagaagatcaggtccctggggggtgatgttgcctctgatggtgacttcctcatctttgaggggaaccgttacagccggaagggctttctgttcaagagcttcgccatgtctgctgtgatcacggagggtgtgaagccaacactctctgagctggaaaagtttgaggaccagccagagggcattgacctggaggtggtgactgagagcacagggaaggagcgggagcacaacttccaacctggggacaacgtggaggtctgtgagggtgagctcatcaacctgcagggcaagatcctcagcgtggatggcaacaagatcaccatcatgcccaagcatgaggacctcaaggacatgttggagttcccagcccaggaacttagaaaatacttcaagatgggggaccacgtgaaggtgattgctggccgattcgagggcgacacaggcctcattgtgcgggtggaggagaatttcgttatcctgttctctgacctcaccatgcatgagctgaaggtgctcccccgggacctgcagctctgctcagagacagcatcaggtgtggatgttgggggccagcatgaatggggcgagctggtgcagctggatccccagactgtgggtgtcatcgtgcgactagaacgggagaccttccaggtgctgaacatgtacgggaaggtggtgactgtcagacatcaggctgtgacccggaagaaggacaaccgctttgctgtggccttggactcagagcagaacaacatccatgtgaaagacatcgttaaggtcattgatggcccccactcaggccgagaaggggagattcgccatctcttccgaagcttcgccttcctacattgcaagaaactggtggagaacgggggcatgtttgtctgcaagacccgccacctggtgctggctgggggctcaaagccccgtgatgtgaccaacttcaccgtgggtggctttgcgcctatgagtccccggatcagcagccccatgcaccccagtgctggaggtcagcgtggcggctttggtagcccaggtggcggcagtggtggcatgagcaggggccggggccggagggacaacgaactcatcggccagaccgtgcgcatctcccaggggccctacaaaggctacatcggtgtggtgaaagatgccacagagtccacggcccgtgtggagctgcactccacctgccagaccatctctgtggaccgtcagcggctcaccacggtgggctcacggcgcccgggcggcatgacctcgacctatgggaggacgcccatgtatggctcccagacgcccatgtatggctctggctcccgaacacccatgtacggctcacagacacccctccaggatggtagccgcaccccacactacggctcacagacgcccctgcatgatggcagccgcactcctgcccagagtggggcctgggaccccaacaaccccaacacgccgtcacgggctgaggaagaatatgagtatgctttcgatgatgagcccaccccgtccccgcaggcctatgggggaacccccaatccccaaacacctggctacccagacccctcgtccccacaggtcaacccacaatacaacccgcagacgccagggacgccggccatgtacaacacagaccagttctctccctatgctgccccctccccacaaggttcctaccagcccagccccagcccccagagctaccaccaggtggcgccaagcccagcaggctaccagaatacccactccccagccagctaccaccctacaccgtcgcccatggcctatcaggctagccccagcccgagccccgttggctacagtcctatgacacctggagctccctcccctggtggctacaacccacacacgccaggctcaggcatcgagcagaactccagcgactgggtaaccactgacattcaggtgaaggtgcgggacacctacctggatacacaggtggtgggacagacaggtgtcatccgcagtgtcacggggggcatgtgctctgtgtacctgaaggacagtgagaaggttgtcagcatttccagtgagcacctggagcctatcacccccaccaagaacaacaaggtgaaagtgatcctgggcgaggatcgggaagccacgggcgtcctactgagcattgatggtgaggatggcattgtccgtatggaccttgatgagcagctcaagatcctcaacctccgcttcctggggaagctcctggaagcctgaagcaggcagggccggtggacttcgtcggatgaagagtgatcctccttccttccctggcccttggctgtgacacaagatcctcctgcagggctaggcggattgttctggatttccttttgtttttccttttagttttccatcttttccctccctggtgctcattggaatctgagtagagtctgggggagggtccccaccttcctgtacctcctccccacagcttgcttttgttgtaccgtctttcaataaaaagaagctgtttggtct

SEQ ID NO: 186208 - DNA, 3710 bp, Homo sapiens
  Payload ID: 16669
  Gene Symbol: SUPT5H
  Gene Name: SPT5 homolog, DSIF elongation factor subunit
  Uniprot ID: O00267
  ENST ID: ENST00000432763
  CDS Start-End: 180-3443
aacgggtaggttctcgcgagaggacccgtcagccccagtcaggcgtcgtgcgaacagcagctggtaccgaaggcggaggtggagcccgagagggaaccagcggggaaactgaggctcggggtggagcgcaggattgtgggacgcgccaaggctgctgtctttcccagcagcagcggaagatgtcggacagcgaggacagcaacttttccgaggaggaggacagcgagcgcagcagtgacggcgaggaggccgaggtagacgaagagcggcggagtgcagcgggcagtgagaaagaagaagagcctgaggacgaagaggaggaggaagaggaggaggaatacgatgaggaagaggaggaagaagatgatgaccgaccccccaagaaaccccgccatggaggcttcattctggacgaggctgatgttgacgatgagtatgaggacgaggaccagtgggaggatggagcagaggacattctagagaaagaagagattgaagcctccaatatcgataatgttgtcctggatgaagatcgttctggggctcgccgcctgcaaaacctctggagggaccagcgagaagaagaactgggcgagtattacatgaagaaatacgccaagtcatctgtgggagagacggtgtatggaggatctgatgagctctcagacgacatcacccagcagcagctgctcccaggagtcaaggatcccaatctgtggactgtcaaatgtaagattggggaggaacgggccacggccatttccttgatgcgcaagttcattgcctaccagttcacagacacgcccctgcagatcaagtcagtagtggcaccagagcatgtgaagggctacatctacgtggaggcctacaagcagacccacgtgaagcaggccattgagggggtgggcaacctgcggcttggctactggaaccagcagatggtgcccatcaaggagatgacagacgtgctcaaagtggtgaaggaggtggccaacctgaaaccaaagtcctgggtccgcctcaagcggggcatctacaaggatgacattgctcaggtggactacgtggagcccagccagaacaccatctccctgaagatgatcccacgcatcgactacgatcgcatcaaggcccgcatgagcttgaaagactggtttgccaaaaggaagaagtttaagcggcctccacagaggctgtttgatgctgagaagatcaggtccctggggggtgatgttgcctctgatggtgacttcctcatctttgaggggaaccgttacagccggaagggctttctgttcaagagcttcgccatgtctgctgtgatcacggagggtgtgaagccaacactctctgagctggaaaagtttgaggaccagccagagggcattgacctggaggtggtgactgagagcacagggaaggagcgggagcacaacttccaacctggggacaacgtggaggtctgtgagggtgagctcatcaacctgcagggcaagatcctcagcgtggatggcaacaagatcaccatcatgcccaagcatgaggacctcaaggacatgttggagttcccagcccaggaacttagaaaatacttcaagatgggggaccacgtgaaggtgattgctggccgattcgagggcgacacaggcctcattgtgcgggtggaggagaatttcgttatcctgttctctgacctcaccatgcatgagctgaaggtgctcccccgggacctgcagctctgctcagagacagcatcaggtgtggatgttgggggccagcatgaatggggcgagctggtgcagctggatccccagactgtgggtgtcatcgtgcgactagaacgggagaccttccaggtgctgaacatgtacgggaaggtggtgactgtcagacatcaggctgtgacccggaagaaggacaaccgctttgctgtggccttggactcagagcagaacaacatccatgtgaaagacatcgttaaggtcattgatggcccccactcaggccgagaaggggagattcgccatctcttccgaagcttcgccttcctacattgcaagaaactggtggagaacgggggcatgtttgtctgcaagacccgccacctggtgctggctgggggctcaaagccccgtgatgtgaccaacttcaccgtgggtggctttgcgcctatgagtccccggatcagcagccccatgcaccccagtgctggaggtcagcgtggcggctttggtagcccaggtggcggcagtggtggcatgagcaggggccggggccggagggacaacgaactcatcggccagaccgtgcgcatctcccaggggccctacaaaggctacatcggtgtggtgaaagatgccacagagtccacggcccgtgtggagctgcactccacctgccagaccatctctgtggaccgtcagcggctcaccacggtgggctcacggcgcccgggcggcatgacctcgacctatgggaggacgcccatgtatggctcccagacgcccatgtatggctctggctcccgaacacccatgtacggctcacagacacccctccaggatggtagccgcaccccacactacggctcacagacgcccctgcatgatggcagccgcactcctgcccagagtggggcctgggaccccaacaaccccaacacgccgtcacgggctgaggaagaatatgagtatgctttcgatgatgagcccaccccgtccccgcaggcctatgggggaacccccaatccccaaacacctggctacccagacccctcgtccccacaggtcaacccacaatacaacccgcagacgccagggacgccggccatgtacaacacagaccagttctctccctatgctgccccctccccacaaggttcctaccagcccagccccagcccccagagctaccaccaggtggcgccaagcccagcaggctaccagaatacccactccccagccagctaccaccctacaccgtcgcccatggcctatcaggctagccccagcccgagccccgttggctacagtcctatgacacctggagctccctcccctggtggctacaacccacacacgccaggctcaggcatcgagcagaactccagcgactgggtaaccactgacattcaggtgaaggtgcgggacacctacctggatacacaggtggtgggacagacaggtgtcatccgcagtgtcacggggggcatgtgctctgtgtacctgaaggacagtgagaaggttgtcagcatttccagtgagcacctggagcctatcacccccaccaagaacaacaaggtgaaagtgatcctgggcgaggatcgggaagccacgggcgtcctactgagcattgatggtgaggatggcattgtccgtatggaccttgatgagcagctcaagatcctcaacctccgcttcctggggaagctcctggaagcctgaagcaggcagggccggtggacttcgtcggatgaagagtgatcctccttccttccctggcccttggctgtgacacaagatcctcctgcagggctaggcggattgttctggatttccttttgtttttccttttagttttccatcttttccctccctggtgctcattggaatctgagtagagtctgggggagggtccccaccttcctgtacctcctccccacagcttgcttttgttgtaccgtctttcaataaaaagaagctgtttggtct

SEQ ID NO: 186209 - DNA, 3742 bp, Homo sapiens
  Payload ID: 16669
  Gene Symbol: SUPT5H
  Gene Name: SPT5 homolog, DSIF elongation factor subunit
  Uniprot ID: O00267
  ENST ID: ENST00000598725
  CDS Start-End: 208-3471
agagaacagattcggaaactggggaggtctagcatgtggcgtaggagggggtcctcactccgcttcgcgattgccaaaacgagcctgccggaagcgccctaaggggttttcttctcccagggaaccagcggggaaactgaggctcggggtggagcgcaggattgtgggacgcgccaaggctgctgtctttcccagcagcagcggaagatgtcggacagcgaggacagcaacttttccgaggaggaggacagcgagcgcagcagtgacggcgaggaggccgaggtagacgaagagcggcggagtgcagcgggcagtgagaaagaagaagagcctgaggacgaagaggaggaggaagaggaggaggaatacgatgaggaagaggaggaagaagatgatgaccgaccccccaagaaaccccgccatggaggcttcattctggacgaggctgatgttgacgatgagtatgaggacgaggaccagtgggaggatggagcagaggacattctagagaaagaagagattgaagcctccaatatcgataatgttgtcctggatgaagatcgttctggggctcgccgcctgcaaaacctctggagggaccagcgagaagaagaactgggcgagtattacatgaagaaatacgccaagtcatctgtgggagagacggtgtatggaggatctgatgagctctcagacgacatcacccagcagcagctgctcccaggagtcaaggatcccaatctgtggactgtcaaatgtaagattggggaggaacgggccacggccatttccttgatgcgcaagttcattgcctaccagttcacagacacgcccctgcagatcaagtcagtagtggcaccagagcatgtgaagggctacatctacgtggaggcctacaagcagacccacgtgaagcaggccattgagggggtgggcaacctgcggcttggctactggaaccagcagatggtgcccatcaaggagatgacagacgtgctcaaagtggtgaaggaggtggccaacctgaaaccaaagtcctgggtccgcctcaagcggggcatctacaaggatgacattgctcaggtggactacgtggagcccagccagaacaccatctccctgaagatgatcccacgcatcgactacgatcgcatcaaggcccgcatgagcttgaaagactggtttgccaaaaggaagaagtttaagcggcctccacagaggctgtttgatgctgagaagatcaggtccctggggggtgatgttgcctctgatggtgacttcctcatctttgaggggaaccgttacagccggaagggctttctgttcaagagcttcgccatgtctgctgtgatcacggagggtgtgaagccaacactctctgagctggaaaagtttgaggaccagccagagggcattgacctggaggtggtgactgagagcacagggaaggagcgggagcacaacttccaacctggggacaacgtggaggtctgtgagggtgagctcatcaacctgcagggcaagatcctcagcgtggatggcaacaagatcaccatcatgcccaagcatgaggacctcaaggacatgttggagttcccagcccaggaacttagaaaatacttcaagatgggggaccacgtgaaggtgattgctggccgattcgagggcgacacaggcctcattgtgcgggtggaggagaatttcgttatcctgttctctgacctcaccatgcatgagctgaaggtgctcccccgggacctgcagctctgctcagagacagcatcaggtgtggatgttgggggccagcatgaatggggcgagctggtgcagctggatccccagactgtgggtgtcatcgtgcgactagaacgggagaccttccaggtgctgaacatgtacgggaaggtggtgactgtcagacatcaggctgtgacccggaagaaggacaaccgctttgctgtggccttggactcagagcagaacaacatccatgtgaaagacatcgttaaggtcattgatggcccccactcaggccgagaaggggagattcgccatctcttccgaagcttcgccttcctacattgcaagaaactggtggagaacgggggcatgtttgtctgcaagacccgccacctggtgctggctgggggctcaaagccccgtgatgtgaccaacttcaccgtgggtggctttgcgcctatgagtccccggatcagcagccccatgcaccccagtgctggaggtcagcgtggcggctttggtagcccaggtggcggcagtggtggcatgagcaggggccggggccggagggacaacgaactcatcggccagaccgtgcgcatctcccaggggccctacaaaggctacatcggtgtggtgaaagatgccacagagtccacggcccgtgtggagctgcactccacctgccagaccatctctgtggaccgtcagcggctcaccacggtgggctcacggcgcccgggcggcatgacctcgacctatgggaggacgcccatgtatggctcccagacgcccatgtatggctctggctcccgaacacccatgtacggctcacagacacccctccaggatggtagccgcaccccacactacggctcacagacgcccctgcatgatggcagccgcactcctgcccagagtggggcctgggaccccaacaaccccaacacgccgtcacgggctgaggaagaatatgagtatgctttcgatgatgagcccaccccgtccccgcaggcctatgggggaacccccaatccccaaacacctggctacccagacccctcgtccccacaggtcaacccacaatacaacccgcagacgccagggacgccggccatgtacaacacagaccagttctctccctatgctgccccctccccacaaggttcctaccagcccagccccagcccccagagctaccaccaggtggcgccaagcccagcaggctaccagaatacccactccccagccagctaccaccctacaccgtcgcccatggcctatcaggctagccccagcccgagccccgttggctacagtcctatgacacctggagctccctcccctggtggctacaacccacacacgccaggctcaggcatcgagcagaactccagcgactgggtaaccactgacattcaggtgaaggtgcgggacacctacctggatacacaggtggtgggacagacaggtgtcatccgcagtgtcacggggggcatgtgctctgtgtacctgaaggacagtgagaaggttgtcagcatttccagtgagcacctggagcctatcacccccaccaagaacaacaaggtgaaagtgatcctgggcgaggatcgggaagccacgggcgtcctactgagcattgatggtgaggatggcattgtccgtatggaccttgatgagcagctcaagatcctcaacctccgcttcctggggaagctcctggaagcctgaagcaggcagggccggtggacttcgtcggatgaagagtgatcctccttccttccctggcccttggctgtgacacaagatcctcctgcagggctaggcggattgttctggatttccttttgtttttccttttagttttccatcttttccctccctggtgctcattggaatctgagtagagtctgggggagggtccccaccttcctgtacctcctccccacagcttgcttttgttgtaccgtctttcaataaaaagaagctgtttggtctaaaa

SEQ ID NO: 186210 - DNA, 493 bp, Homo sapiens
  Payload ID: 16669
  Gene Symbol: SUPT5H
  Gene Name: SPT5 homolog, DSIF elongation factor subunit
  ENST ID: ENST00000593727
  CDS Start-End: 1-493
gaccagtgggaggatggagcagaggacattctagagaaagaagagattgaagcctccaatatcgataatgttgtcctggatgaagatcgttctggggctcgccgcctgcaaaacctctggagggaccagcgagaagaagaactgggcgagtattacatgaagaaatacgccaagtcatctgtgggagagacggtgtatggaggatctgatgagctctcagacgacatcacccagcagcagctgctcccaggagtcaaggatcccaatctgtggactgtcaaatgtaagattggggaggaacgggccacggccatttccttgatgcgcaagttcattgcctaccagttcacagacacggtggactacgtggagcccagccagaacaccatctccctgaagatgatcccacgcatcgactacgatcgcatcaaggcccgcatgagcttgaaagactggtttgccaaaaggaagaagtttaagcggcctccacaga

SEQ ID NO: 186211 - DNA, 3902 bp, Homo sapiens
  Payload ID: 16669
  Gene Symbol: SUPT5H
  Gene Name: SPT5 homolog, DSIF elongation factor subunit
  Uniprot ID: O00267
  ENST ID: ENST00000599117
  CDS Start-End: 368-3631
aagccttttcttccctctaggccagaggaccccacctggagccctagtagccaaggggaagagttaagaaggaggaaagtaagatgtcggccccgcactccgcccaggccagccctgcctctctcaagatggcgacctggaagtgcgtcgcccgtgccagccccggaaatctcgtgttaggcgaggtcaacgggtaggttctcgcgagaggacccgtcagccccagtcaggcgtcgtgcgaacagcagctggtaccgaaggcggaggtggagcccgagagggaaccagcggggaaactgaggctcggggtggagcgcaggattgtgggacgcgccaaggctgctgtctttcccagcagcagcggaagatgtcggacagcgaggacagcaacttttccgaggaggaggacagcgagcgcagcagtgacggcgaggaggccgaggtagacgaagagcggcggagtgcagcgggcagtgagaaagaagaagagcctgaggacgaagaggaggaggaagaggaggaggaatacgatgaggaagaggaggaagaagatgatgaccgaccccccaagaaaccccgccatggaggcttcattctggacgaggctgatgttgacgatgagtatgaggacgaggaccagtgggaggatggagcagaggacattctagagaaagaagagattgaagcctccaatatcgataatgttgtcctggatgaagatcgttctggggctcgccgcctgcaaaacctctggagggaccagcgagaagaagaactgggcgagtattacatgaagaaatacgccaagtcatctgtgggagagacggtgtatggaggatctgatgagctctcagacgacatcacccagcagcagctgctcccaggagtcaaggatcccaatctgtggactgtcaaatgtaagattggggaggaacgggccacggccatttccttgatgcgcaagttcattgcctaccagttcacagacacgcccctgcagatcaagtcagtagtggcaccagagcatgtgaagggctacatctacgtggaggcctacaagcagacccacgtgaagcaggccattgagggggtgggcaacctgcggcttggctactggaaccagcagatggtgcccatcaaggagatgacagacgtgctcaaagtggtgaaggaggtggccaacctgaaaccaaagtcctgggtccgcctcaagcggggcatctacaaggatgacattgctcaggtggactacgtggagcccagccagaacaccatctccctgaagatgatcccacgcatcgactacgatcgcatcaaggcccgcatgagcttgaaagactggtttgccaaaaggaagaagtttaagcggcctccacagaggctgtttgatgctgagaagatcaggtccctggggggtgatgttgcctctgatggtgacttcctcatctttgaggggaaccgttacagccggaagggctttctgttcaagagcttcgccatgtctgctgtgatcacggagggtgtgaagccaacactctctgagctggaaaagtttgaggaccagccagagggcattgacctggaggtggtgactgagagcacagggaaggagcgggagcacaacttccaacctggggacaacgtggaggtctgtgagggtgagctcatcaacctgcagggcaagatcctcagcgtggatggcaacaagatcaccatcatgcccaagcatgaggacctcaaggacatgttggagttcccagcccaggaacttagaaaatacttcaagatgggggaccacgtgaaggtgattgctggccgattcgagggcgacacaggcctcattgtgcgggtggaggagaatttcgttatcctgttctctgacctcaccatgcatgagctgaaggtgctcccccgggacctgcagctctgctcagagacagcatcaggtgtggatgttgggggccagcatgaatggggcgagctggtgcagctggatccccagactgtgggtgtcatcgtgcgactagaacgggagaccttccaggtgctgaacatgtacgggaaggtggtgactgtcagacatcaggctgtgacccggaagaaggacaaccgctttgctgtggccttggactcagagcagaacaacatccatgtgaaagacatcgttaaggtcattgatggcccccactcaggccgagaaggggagattcgccatctcttccgaagcttcgccttcctacattgcaagaaactggtggagaacgggggcatgtttgtctgcaagacccgccacctggtgctggctgggggctcaaagccccgtgatgtgaccaacttcaccgtgggtggctttgcgcctatgagtccccggatcagcagccccatgcaccccagtgctggaggtcagcgtggcggctttggtagcccaggtggcggcagtggtggcatgagcaggggccggggccggagggacaacgaactcatcggccagaccgtgcgcatctcccaggggccctacaaaggctacatcggtgtggtgaaagatgccacagagtccacggcccgtgtggagctgcactccacctgccagaccatctctgtggaccgtcagcggctcaccacggtgggctcacggcgcccgggcggcatgacctcgacctatgggaggacgcccatgtatggctcccagacgcccatgtatggctctggctcccgaacacccatgtacggctcacagacacccctccaggatggtagccgcaccccacactacggctcacagacgcccctgcatgatggcagccgcactcctgcccagagtggggcctgggaccccaacaaccccaacacgccgtcacgggctgaggaagaatatgagtatgctttcgatgatgagcccaccccgtccccgcaggcctatgggggaacccccaatccccaaacacctggctacccagacccctcgtccccacaggtcaacccacaatacaacccgcagacgccagggacgccggccatgtacaacacagaccagttctctccctatgctgccccctccccacaaggttcctaccagcccagccccagcccccagagctaccaccaggtggcgccaagcccagcaggctaccagaatacccactccccagccagctaccaccctacaccgtcgcccatggcctatcaggctagccccagcccgagccccgttggctacagtcctatgacacctggagctccctcccctggtggctacaacccacacacgccaggctcaggcatcgagcagaactccagcgactgggtaaccactgacattcaggtgaaggtgcgggacacctacctggatacacaggtggtgggacagacaggtgtcatccgcagtgtcacggggggcatgtgctctgtgtacctgaaggacagtgagaaggttgtcagcatttccagtgagcacctggagcctatcacccccaccaagaacaacaaggtgaaagtgatcctgggcgaggatcgggaagccacgggcgtcctactgagcattgatggtgaggatggcattgtccgtatggaccttgatgagcagctcaagatcctcaacctccgcttcctggggaagctcctggaagcctgaagcaggcagggccggtggacttcgtcggatgaagagtgatcctccttccttccctggcccttggctgtgacacaagatcctcctgcagggctaggcggattgttctggatttccttttgtttttccttttagttttccatcttttccctccctggtgctcattggaatctgagtagagtctgggggagggtccccaccttcctgtacctcctccccacagcttgcttttgttgtaccgtctttcaataaaaagaagctgtttggtctaaaa

SEQ ID NO: 186212 - DNA, 364 bp, Homo sapiens
  Payload ID: 16669
  Gene Symbol: SUPT5H
  Gene Name: SPT5 homolog, DSIF elongation factor subunit
  ENST ID: ENST00000594729
  CDS Start-End: 58-364
gtgcgaacagcagctggtaccgaaggcggaggtggagcccgagagcagcagcggaagatgtcggacagcgaggacagcaacttttccgaggaggaggacagcgagcgcagcagtgacggcgaggaggccgaggtagacgaagagcggcggagtgcagcgggcagtgagaaagaagaagagcctgaggacgaagaggaggaggaagaggaggaggaatacgatgaggaagaggaggaagaagatgatgaccgaccccccaagaaaccccgccatggaggcttcattctggacgaggctgatgttgacgatgagtatgaggacgaggaccagtgggaggatggagcagaggacattctagagaaag

SEQ ID NO: 186213 - DNA, 558 bp, Homo sapiens
  Payload ID: 16669
  Gene Symbol: SUPT5H
  Gene Name: SPT5 homolog, DSIF elongation factor subunit
  ENST ID: ENST00000594990
  CDS Start-End: 397-558
gagtgtcgtgtgcggactgaagccctctgaagataccagcgagtggggagcagagccagcagacggggaaaacaaaaatgatgacaccctctacaccccagatgatctctcaatgtcggccccgcactccgcccaggccagccctgcctctctcaagatggcgacctggaagtgcgtcgcccgtgccagccccggaaatctcgtgttaggcgaggtcaacgggtaggttctcgcgagaggacccgtcagccccagtcaggcgtcgtgcgaacagcagctggtaccgaaggcggaggtggagcccgagagggaaccagcggggaaactgaggctcggggtggagcgcaggattgtgggacgcgccaaggctgctgtctttcccagcagcagcggaagatgtcggacagcgaggacagcaacttttccgaggaggaggacagcgagcgcagcagtgacggcgaggaggccgaggtagacgaagagcggcggagtgcagcgggcagtgagaaagaagaagagcctgaggacgaagaggaggaggaagaggaggaggaatac

SEQ ID NO: 186214 - DNA, 396 bp, Homo sapiens
  Payload ID: 16669
  Gene Symbol: SUPT5H
  Gene Name: SPT5 homolog, DSIF elongation factor subunit
  ENST ID: ENST00000601515
  CDS Start-End: 90-396
ctcgcgagaggacccgtcagccccagtcaggcgtcgtgcgaacagcagctggtaccgaaggcggaggtggagcccgagagcagcggaagatgtcggacagcgaggacagcaacttttccgaggaggaggacagcgagcgcagcagtgacggcgaggaggccgaggtagacgaagagcggcggagtgcagcgggcagtgagaaagaagaagagcctgaggacgaagaggaggaggaagaggaggaggaatacgatgaggaagaggaggaagaagatgatgaccgaccccccaagaaaccccgccatggaggcttcattctggacgaggctgatgttgacgatgagtatgaggacgaggaccagtgggaggatggagcagaggacattctagagaaag

SEQ ID NO: 186215 - DNA, 6523 bp, Homo sapiens
  Payload ID: 16670
  Gene Symbol: SUPT6H
  Gene Name: SPT6 homolog, histone chaperone
  Uniprot ID: Q7KZ85
  ENST ID: ENST00000314616
  CDS Start-End: 284-5464
gagccgcttcggttacctttcgcacccacgagacgaaagcttccgagagcgggagagagaacaagaaatggcccgcccactcccggtgacagggagccggaaatgacgtagcacgttgacgcagcagcggcggcggtggcggcggaggggccgtgcggtgggtccgtactatcttttcccagtctcggttcgacgactccattttcctcggtgggggcttagcgcactggaggagcggcgggcttcagacagttatcttcaggcagagtgagaagctgcagcaatgtctgattttgtggaaagcgaggctgaggagtcagaggaagaatacaatgatgaaggcgaggtggtaccccgagtcaccaagaaatttgtggaagaggaggatgatgatgaggaggaggaggaggagaacctagatgatcaggatgagcaaggcaacttgaaaggctttatcaatgacgatgatgatgaagatgaaggggaggaggatgagggcagtgactctggtgattcagaagatgatgttggccacaagaagagaaaacgcacctcttttgatgaccgcctggaggatgatgattttgacctcattgaggagaatttgggtgtcaaagtcaaaagaggacaaaagtaccggcgtgtcaaaaaaatgtcagatgacgaggacgatgacgaggaggaatatggcaaggaggaacatgaaaaagaagctattgcggaagaaatcttccaggatggggaaggggaagaagggcaggaggccatggaggcccccatggctcctccagaggaggaggaagaagatgatgaggagtcagatattgacgacttcattgtggatgatgatggacagcctctgaaaaaacctaagtggcggaaaaagcttcctggatacacagacgcggccctgcaagaagcccaggaaatcttcggtgtggactttgactatgatgaatttgagaaatacaatgagtatgatgaagaactggaggaagagtatgagtatgaggatgatgaggctgagggtgaaatccgagtgcgccccaagaagaccaccaagaagcgtgtgagccgtaggagcatctttgaaatgtatgagcccagtgagctagaaagcagccacctcacagatcaggacaatgaaatccgagccactgacctgcctgagaggttccagctccgctccatcccagtcaagggggctgaagatgatgaactagaagaagaagctgactggatctacaggaatgcttttgccacaccaaccatttctctccaggaaagctgtgattacctagaccgagggcagccagccagcagcttcagtcggaaagggcccagcacaattcagaagatcaaagaggccctgggcttcatgcgaaatcagcattttgaggtgccttttattgccttctatcgaaaggagtatgtggagcctgagttgcacatcaatgacctatggagagtctggcagtgggatgaaaagtggacccagctgcggatccgtaaagagaacctaacacggctgtttgagaagatgcaggcttatcagtatgaacagatctctgctgaccctgacaaacctcttgctgatggcatccgggctctggacaccactgacatggagaggctcaaggatgtccaatcaatggatgagctgaaagatgtctacaaccattttcttctttattatggccgagacatccctaagatgcagaacgccgccaaagctagccgcaagaagctgaagcgtgtcagggaagagggagatgaagaaggtgaaggtgacgaggcagaagatgaggagcagagggggcctgagctcaagcaagcctctcgccgagacatgtacaccatctgccagagtgctgggctagatggcctggccaaaaagtttgggcttactcccgagcagtttggggagaacctgcgggatagctaccagcggcacgagacagagcagtttcccgcggagcccttggagctggccaaggattacgtttgcagccagttccctactccagaagctgtgctagaaggcgcccgctacatggtagccctgcagattgcccgtgagccccttgtccggcaggtgctgaggcaaaccttccaagagagagccaagttaaatataacccccaccaagaaaggtagaaaggatgtggatgaggcccactatgcctattccttcaagtatttaaagaacaagcctgttaaggaactgagagatgaccagtttctcaagatatgcctggctgaagacgaagggctcctcaccactgacatcagcatagatttgaagggagtggaaggctatggcaacgaccagacatattttgaggagataaaacagttttactaccgagatgagttcagccaccaggtgcaggagtggaaccggcagcgcaccatggccatcgaacgggctttacagcagttcctctatgtgcagatggccaaagaactcaagaacaagctgctggctgaagccaaggaatatgtcataaaggcctgtagtcgaaagctctacaattggttgagagtggcaccctaccgaccagatcagcaggtggaagaagatgacgactttatggacgagaaccaagggaagggcattcgagtcctcggcattgctttctcctctgccagagatcaccctgtgttctgcgccctggtcaatggtgaaggagaagtgacagacttccttcgactgccccattttaccaaacggcgaactgcatggagagaggaagagcgggaaaagaaggctcaagacattgaaacgctaaagaaatttctcctgaataagaagcctcatgtagtgacagttgcaggagagaacagggacgcccagatgttgattgaagatgtgaagcgcattgtacatgagctggaccagggccagcagctgtcatctattggggtagagctggttgacaacgagttggccattctctatatgaacagcaagaagtcagaggcagagttccgggattatcctccagtgctgagacaggccgtctccctggcccggcgcatccaggaccctctgattgaatttgcccaggtgtgcagttccgatgaagacatcctgtgtctcaagtttcaccccttgcaggagcatgtggtgaaagaggagctgctcaacgccttgtactgtgaatttatcaaccgagtcaatgaggtcggggtcgatgtcaaccgtgccattgcccacccttacagccaggccttgatccagtatgtttgtggcctgggacctcggaaagggacccacctcctgaagatcctgaagcagaacaacacccggctcgagagccggacccagctggtcaccatgtgccacatgggtcccaaagtcttcatgaattgtgctggcttcctcaagatcgacacggcctccctgggggacagcactgactcatatattgaagtccttgatggttcccgtgtccaccctgagacttatgagtgggctaggaagatggcagtggatgccctggaatacgatgaatcagccgaggatgccaatcctgcaggagcccttgaagaaatcttggaaaacccagagcgactgaaagacctggaccttgatgcctttgcagaagagctggagaggcagggctatggtgacaaacacatcacactctatgacatccgggcagagctgagctgtcgatataaggacctccggacagcctaccgctctcccaacacagaggagatcttcaatatgttaaccaaagaaacaccagagaccttctacattggaaagctcatcatctgcaatgtcactggcattgcccacaggcgtccccagggtgagagctatgaccaggcgatccgcaatgatgagacagggctgtggcagtgccccttctgtcagcaggacaatttccctgaactaagcgaggtgtggaaccactttgacagcggttcgtgcccaggccaggccatcggtgtcaaaacacggctagacaatggtgtcaccggcttcatccccaccaaattcctcagtgacaaagtggtaaagcggccagaagaacgagtgaaggtgggaatgactgttcactgccgcatcatgaagattgacattgagaagttcagtgcagacctgacctgccgcacctcagacctcatggacaggaacaatgagtggaagctgcccaaagacacctactatgactttgatgctgaagctgcagaccacaagcaggaggaggacatgaagcggaagcagcagcggaccacatacatcaagagagtgatcgcacacccatccttccataatatcaatttcaagcaagcagaaaagatgatggagaccatggaccagggtgatgtgattatccgaccaagcagcaagggcgagaaccacctgacagtgacctggaaagtcagtgatggcatctaccagcatgtggatgtgcgggaggagggcaaggaaaatgccttcagcctgggagccactctgtggatcaacagtgaggaattcgaagatttggatgagattgttgctcgctatgtccagcccatggcatcctttgcccgggaccttctgaatcacaagtattatcaggactgcagcggtggggaccgcaagaaattagaggagctgctcatcaaaactaagaaggagaagcccaccttcatcccttatttcatctgtgcctgcaaggaactgcccggcaagttcctactgggataccagccccggggtaaacccaggatagaatatgtaacggtgactccagagggattccggtaccggggccagatcttcccaaccgtgaatggactgtttagatggtttaaggatcactaccaggatcctgtaccaggcatcacccctagcagcagcagcaggacccggacacctgcctctatcaatgctaccccagccaacatcaaccttgcagatctgacacgggctgtgaatgccctgcctcagaacatgacttcacagatgttcagtgccattgctgcggtgacaggccaaggacagaaccctaatgccaccccagcccagtgggcctccagccagtacggctatggcggcagtggaggcggcagcagtgcttaccacgtattcccaacgccagcccagcagccagtggccacaccactaatgacccctagctactcctacacgaccccaagccagcccatcaccacccctcagtaccaccagctccaggccagcaccaccccacagtcggcccaggcccagccccagccctcttccagctcccggcaacggcagcagcagccaaagtccaacagccatgcagccatcgactggggaaaaatggcggagcagtggctgcaggaaaaggaggcagaacggcggaaacagaagcagcggctgacacctcggccctcccccagccccatgatcgaaagcacccccatgtccattgctggcgatgccaccccactcctggacgagatggatcggtagggggcctgctcctcggactctggttacctctgaggctgggaaaggcctggctgcccactgcctccctccctgcccctccttttatgtccataaagtggcgtgaagtgagacgttctctttggtggtcaacccggatgggtgacaggctggatggccttgtgaacttgagctcagtgtatgctaggcaacaattctcccgctccagaccctcaccgaccacctgtcctgggaccaggctgggaggggagtgtggcagggaggaggaagaggaaggtgagaatgagtagaacagttttgtattctactccctacaagccattttgaacttctgccctcaccggactctgggctgtgactggggcaccaaactcagcacatgagtctcccctagctctcgtggggagagggatgctatttattcagtttggggcaggagggagaggagggaaagtatttctgaccctgatgccaacagccgggtggctgtccaagcaggattgcaggggacacagggaagcactgcccagcccctgcctggctgccctttcccccctgctgctgccaccgcttcctgcctgtcatttgaataaacagtgtttctattgagctcttgccaaagcctctctctccaactctccagctctttgaggggtggctttcaaagcagtgtttggagctccaaggactcccctgactccctcttctgatccatcagaggcaaagattcatagactagaggcagcttctacatcagactgcctggggcacatccctgctctacttcccagccgggtgaccctgtgccagttcctgctgcctttcagctggctttcttacctgtaacatggagatagtgatacctgcctcatcagctgctgtgaggaccaaggcagcgtgtgcaagctccttggcccaacgcctggtacgtcgcaaatgttacccggtattattacacccactcactcacccacagcacagctgccccatccgcccatgcctgctggtcttctctggcaccctggagaaaggccacaagtaaatctggatttctcaacttga

SEQ ID NO: 186216 - DNA, 5569 bp, Homo sapiens
  Payload ID: 16670
  Gene Symbol: SUPT6H
  Gene Name: SPT6 homolog, histone chaperone
  Uniprot ID: Q7KZ85
  ENST ID: ENST00000347486
  CDS Start-End: 279-5459
gtagcacgttgacgcagcagcggcggcggtggcggcggaggggccgtgcggtgggtccgtactatcttttcccagtctcggttcgacgactccattttcctcggtgggggcttagcgcactggaggagcggcgggcttcagacaggctggaatgcagtggcgcaatctgcaacctccaccttccggattcaagagattctcctgcctcagcctcctgagtagcctggcttttgccttctttttgaaattatcttcaggcagagtgagaagctgcagcaatgtctgattttgtggaaagcgaggctgaggagtcagaggaagaatacaatgatgaaggcgaggtggtaccccgagtcaccaagaaatttgtggaagaggaggatgatgatgaggaggaggaggaggagaacctagatgatcaggatgagcaaggcaacttgaaaggctttatcaatgacgatgatgatgaagatgaaggggaggaggatgagggcagtgactctggtgattcagaagatgatgttggccacaagaagagaaaacgcacctcttttgatgaccgcctggaggatgatgattttgacctcattgaggagaatttgggtgtcaaagtcaaaagaggacaaaagtaccggcgtgtcaaaaaaatgtcagatgacgaggacgatgacgaggaggaatatggcaaggaggaacatgaaaaagaagctattgcggaagaaatcttccaggatggggaaggggaagaagggcaggaggccatggaggcccccatggctcctccagaggaggaggaagaagatgatgaggagtcagatattgacgacttcattgtggatgatgatggacagcctctgaaaaaacctaagtggcggaaaaagcttcctggatacacagacgcggccctgcaagaagcccaggaaatcttcggtgtggactttgactatgatgaatttgagaaatacaatgagtatgatgaagaactggaggaagagtatgagtatgaggatgatgaggctgagggtgaaatccgagtgcgccccaagaagaccaccaagaagcgtgtgagccgtaggagcatctttgaaatgtatgagcccagtgagctagaaagcagccacctcacagatcaggacaatgaaatccgagccactgacctgcctgagaggttccagctccgctccatcccagtcaagggggctgaagatgatgaactagaagaagaagctgactggatctacaggaatgcttttgccacaccaaccatttctctccaggaaagctgtgattacctagaccgagggcagccagccagcagcttcagtcggaaagggcccagcacaattcagaagatcaaagaggccctgggcttcatgcgaaatcagcattttgaggtgccttttattgccttctatcgaaaggagtatgtggagcctgagttgcacatcaatgacctatggagagtctggcagtgggatgaaaagtggacccagctgcggatccgtaaagagaacctaacacggctgtttgagaagatgcaggcttatcagtatgaacagatctctgctgaccctgacaaacctcttgctgatggcatccgggctctggacaccactgacatggagaggctcaaggatgtccaatcaatggatgagctgaaagatgtctacaaccattttcttctttattatggccgagacatccctaagatgcagaacgccgccaaagctagccgcaagaagctgaagcgtgtcagggaagagggagatgaagaaggtgaaggtgacgaggcagaagatgaggagcagagggggcctgagctcaagcaagcctctcgccgagacatgtacaccatctgccagagtgctgggctagatggcctggccaaaaagtttgggcttactcccgagcagtttggggagaacctgcgggatagctaccagcggcacgagacagagcagtttcccgcggagcccttggagctggccaaggattacgtttgcagccagttccctactccagaagctgtgctagaaggcgcccgctacatggtagccctgcagattgcccgtgagccccttgtccggcaggtgctgaggcaaaccttccaagagagagccaagttaaatataacccccaccaagaaaggtagaaaggatgtggatgaggcccactatgcctattccttcaagtatttaaagaacaagcctgttaaggaactgagagatgaccagtttctcaagatatgcctggctgaagacgaagggctcctcaccactgacatcagcatagatttgaagggagtggaaggctatggcaacgaccagacatattttgaggagataaaacagttttactaccgagatgagttcagccaccaggtgcaggagtggaaccggcagcgcaccatggccatcgaacgggctttacagcagttcctctatgtgcagatggccaaagaactcaagaacaagctgctggctgaagccaaggaatatgtcataaaggcctgtagtcgaaagctctacaattggttgagagtggcaccctaccgaccagatcagcaggtggaagaagatgacgactttatggacgagaaccaagggaagggcattcgagtcctcggcattgctttctcctctgccagagatcaccctgtgttctgcgccctggtcaatggtgaaggagaagtgacagacttccttcgactgccccattttaccaaacggcgaactgcatggagagaggaagagcgggaaaagaaggctcaagacattgaaacgctaaagaaatttctcctgaataagaagcctcatgtagtgacagttgcaggagagaacagggacgcccagatgttgattgaagatgtgaagcgcattgtacatgagctggaccagggccagcagctgtcatctattggggtagagctggttgacaacgagttggccattctctatatgaacagcaagaagtcagaggcagagttccgggattatcctccagtgctgagacaggccgtctccctggcccggcgcatccaggaccctctgattgaatttgcccaggtgtgcagttccgatgaagacatcctgtgtctcaagtttcaccccttgcaggagcatgtggtgaaagaggagctgctcaacgccttgtactgtgaatttatcaaccgagtcaatgaggtcggggtcgatgtcaaccgtgccattgcccacccttacagccaggccttgatccagtatgtttgtggcctgggacctcggaaagggacccacctcctgaagatcctgaagcagaacaacacccggctcgagagccggacccagctggtcaccatgtgccacatgggtcccaaagtcttcatgaattgtgctggcttcctcaagatcgacacggcctccctgggggacagcactgactcatatattgaagtccttgatggttcccgtgtccaccctgagacttatgagtgggctaggaagatggcagtggatgccctggaatacgatgaatcagccgaggatgccaatcctgcaggagcccttgaagaaatcttggaaaacccagagcgactgaaagacctggaccttgatgcctttgcagaagagctggagaggcagggctatggtgacaaacacatcacactctatgacatccgggcagagctgagctgtcgatataaggacctccggacagcctaccgctctcccaacacagaggagatcttcaatatgttaaccaaagaaacaccagagaccttctacattggaaagctcatcatctgcaatgtcactggcattgcccacaggcgtccccagggtgagagctatgaccaggcgatccgcaatgatgagacagggctgtggcagtgccccttctgtcagcaggacaatttccctgaactaagcgaggtgtggaaccactttgacagcggttcgtgcccaggccaggccatcggtgtcaaaacacggctagacaatggtgtcaccggcttcatccccaccaaattcctcagtgacaaagtggtaaagcggccagaagaacgagtgaaggtgggaatgactgttcactgccgcatcatgaagattgacattgagaagttcagtgcagacctgacctgccgcacctcagacctcatggacaggaacaatgagtggaagctgcccaaagacacctactatgactttgatgctgaagctgcagaccacaagcaggaggaggacatgaagcggaagcagcagcggaccacatacatcaagagagtgatcgcacacccatccttccataatatcaatttcaagcaagcagaaaagatgatggagaccatggaccagggtgatgtgattatccgaccaagcagcaagggcgagaaccacctgacagtgacctggaaagtcagtgatggcatctaccagcatgtggatgtgcgggaggagggcaaggaaaatgccttcagcctgggagccactctgtggatcaacagtgaggaattcgaagatttggatgagattgttgctcgctatgtccagcccatggcatcctttgcccgggaccttctgaatcacaagtattatcaggactgcagcggtggggaccgcaagaaattagaggagctgctcatcaaaactaagaaggagaagcccaccttcatcccttatttcatctgtgcctgcaaggaactgcccggcaagttcctactgggataccagccccggggtaaacccaggatagaatatgtaacggtgactccagagggattccggtaccggggccagatcttcccaaccgtgaatggactgtttagatggtttaaggatcactaccaggatcctgtaccaggcatcacccctagcagcagcagcaggacccggacacctgcctctatcaatgctaccccagccaacatcaaccttgcagatctgacacgggctgtgaatgccctgcctcagaacatgacttcacagatgttcagtgccattgctgcggtgacaggccaaggacagaaccctaatgccaccccagcccagtgggcctccagccagtacggctatggcggcagtggaggcggcagcagtgcttaccacgtattcccaacgccagcccagcagccagtggccacaccactaatgacccctagctactcctacacgaccccaagccagcccatcaccacccctcagtaccaccagctccaggccagcaccaccccacagtcggcccaggcccagccccagccctcttccagctcccggcaacggcagcagcagccaaagtccaacagccatgcagccatcgactggggaaaaatggcggagcagtggctgcaggaaaaggaggcagaacggcggaaacagaagcagcggctgacacctcggccctcccccagccccatgatcgaaagcacccccatgtccattgctggcgatgccaccccactcctggacgagatggatcggtagggggcctgctcctcggactctggttacctctgaggctgggaaaggcctggctgcccactgcctccctccctgcccctccttttatgtccataaagtggcgtgaagtgaga

SEQ ID NO: 186217 - DNA, 505 bp, Homo sapiens
  Payload ID: 16670
  Gene Symbol: SUPT6H
  Gene Name: SPT6 homolog, histone chaperone
  ENST ID: ENST00000577713
  CDS Start-End: 356-505
gaacaattctcttcaaatccccagctcttagcagagtatatgtacattgtaggcattcagttaggtttgtggaaagaatggcatctgaaacctcaaccgaaaattgaacattccccctccctcctataccttcagttttgttttcttgagtttagttaatctcaagttcattggttatagtattgattgagctccgtaagggcaattttgaggagaattagagccacagaacttaaggcaccttcaggtagccattagccacccttctcttctctcccctcccactgccatctttaactgggaagatggcagcaatatgaaaacttatcttcaggcagagtgagaagctgcagcaatgtctgattttgtggaaagcgaggctgaggagtcagaggaagaatacaatgatgaaggcgaggtggtaccccgagtcaccaagaaatttgtggaagaggaggatgatgatgaggaggaggaggaggagaacctagatgatcaggatgag

SEQ ID NO: 186218 - DNA, 483 bp, Homo sapiens
  Payload ID: 16670
  Gene Symbol: SUPT6H
  Gene Name: SPT6 homolog, histone chaperone
  ENST ID: ENST00000584312
  CDS Start-End: 1-162
atgtctgattttgtggaaagcgaggctgaggagtcagaggaagaatacaatgatgaaggcgaggtggtaccccgagtcaccaagaaatttgtggaagaggaggatgatggtgaggaggccccagcctcaagcttctccccactattgctaagctttggatagttggattcttgctgatgaaaagctcaggctcagcacagaagttatcacacatgagatgaggaggaggaggaggagaacctagatgatcaggatgagcaaggcaacttgaaaggctttatcaatgacgatgatgatgaagatgaaggggaggaggatgagggcagtgactctggtgattcagaagatgatgttggccacaagaagagaaaacgcacctcttttgatgaccgcctggaggatgatgattttgacctcattgaggagaatttgggtgtcaaagtcaaaagaggacaaaagtaccggcgtgtcaaaaaaatgtca

SEQ ID NO: 186219 - DNA, 4488 bp, Homo sapiens
  Payload ID: 16671
  Gene Symbol: SUPT7L
  Gene Name: SPT7-like STAGA complex gamma subunit
  Uniprot ID: O94864
  ENST ID: ENST00000337768
  CDS Start-End: 571-1815
cggcgatggtgaagttgctccttcacgacctggagcgttgcgaagtggtgctaacatgagaaggtcataatatgagaaaaacaaaacggttatcgggatgctgtgcagaacggggacatatttagaggttacaacgggatcgtaatgacttcctgttgcatagcttgattgagaagaagcgcttccggcggtcttagatcactaatcaacaaaccagctttcggggtctgacgcgatccttgcctcaggcctctcgaggtccagacagccgcccagcccgctctgcgacgcagcagtgaatagtgtggtacctccttgtctcggttcaggtccagacctccccgtcttccggctgccctgaacgtcaggcgacctcaggaccctgtgattggcgcctgcgccggcggaccgtgaccgaggaaacccctggagggacttgggcattccttgggctccgtgcctgttcttcgtgctcctttcgggcaaggatctcacattatcagtctttgaccgacacagaatgcctggcatttgataaatgtttgttgaacttgaagagacatatggacaatgaatctgcaaagatactggggagagataccaatatcatcaagccagaccaacagaagttccttcgatttgctcccacgggagttccgtctggtggaagtccatgacccacccctgcaccaaccctcagccaacaagccgaagccccccactatgctggacatcccctcagagccatgtagtctcaccatccatacgattcagttgattcagcacaaccgacgtcttcgcaaccttattgccacagctcaggcccagaatcagcagcagacagaaggtgtaaaaactgaagagagtgaacctcttccctcgtgccctgggtcacctcctctccctgatgacctcctgcctttagattgtaagaatcccaatgcaccattccagatccggcacagtgacccagagagtgacttttatcgtgggaaaggggaacctgtgactgaactcagctggcactcctgtcggcagctcctctaccaggcagtggccacaatcctggcccacgcgggctttgactgtgctaatgagagtgtcctggagaccctaactgatgtggcacatgagtattgccttaagtttaccaagttgctgcgttttgctgtggaccgggaggcccggctgggacagactccttttcctgatgtgatggagcaggtattccatgaagtgggtattggcagtgtgctctccctccagaagttctggcagcaccgcatcaaggactatcacagttacatgctacagattagtaagcaactctctgaagaatatgaaaggattgtcaatcctgagaaggccacagaggacgctaaacctgtgaagatcaaggaggaacctgtgagcgacatcacttttcctgtcagtgaggagctggaggctgaccttgcttctggagaccagtcactgcctatgggagtgcttggggctcagagcgaacgcttcccatctaacctggaggttgaagcttcaccacaggcttcaagtgcagaggtaaatgcttctcctctttggaatctggcccatgtgaaaatggagcctcaagaaagtgaagaaggcaatgtctctgggcatggtgtgctgggcagtgatgtcttcgaggagcctatgtcaggcatgagtgaagctgggattcctcagagccctgatgactcagatagcagctatggttcccactccactgacagcctcatggggtcctcccctgttttcaaccagcgctgcaagaagaggatgaggaaaatataaaaggaaaagagggagatgttttgtccagacctactagacccaacagaaaaggtttttgtattagaatctgtttccttaaaaattgatttgactcctgttcttaaacacaagtggtttttcctaattccagaggaactggacgtcaccaaacaaggttgcattttacttttgcatccagtttttatagttttccacaaccaagccacccttcacagataaaatatgatgctggcatggcaatcagaccaaagcactgtccccaattgttgtcttaactatgactagacatgttatacagccatttatcttgtacaactgagaagaatcatactttgacctaccttgtagagatgtgaggatttagatgtttgctaacttcaaaactgtgcttgaatagactaataatatatgctcatatcagatgtcagttttcatttaacttgattcatttttggctcaggtcattgggaacccattactaatacctaacaggaaatagctaaacacaacacaccttatctattagtcaccttcttaaaactgtttttgctacttttgaagtgtcttatttataagatcagaggtctgacaccttttttgcttagacagctctctatctcatccatttattttcttctctagacttactccatctctcctcatccttttgcctttgttatttctgctcggactcacatactttcaccatatacatattttcaattgtttctttccttttctcctttgtgagcaaagcaaacaagtactgtccaaggacagccttgtgcatatttcatttgttgcatttgcttggtcatcagaggacagcagtccattaagcacactttgctgcttctactgtaaaggcagcctttaaaacatagcaatatgcacctttcaactttacatcatgtcctgaacaacatcactgtggttactcatccatcagactatctgtatatataagtactgaatcagtatttattaagtaaatgatgtagcactgtagtgattaggaatcattagcaaatgtgttgcttcatgccttggtgatggatgccagcatgttaaactgctgaagtttgattttctgatgcaaaatatatcttgtaaaatttagaccactcctttaatgcagaccaaaataaggcacagctttaattcattattgaatgccttaaatgtcccaggtattgagaataaatgaatatgatacaaatgaggttatagtttaacatataattttaaatttgccaattgtaactctttagcacatttctctaaaccctttctgtcacagtcttttttttaatttatttatttatttatttatttttgagatggagtcttgctctgtcacccaggctggagtgcaatggtgcaatttcgactcactgcaacctctgcctcccaggttcaagcgattctcctgcctcagccacctgagtagctgggattacacgcacatgccaccacacccagctaatttttgcatttttagtagagatgaggtttcaccgtgttggccaggctggtctcaaaactcctgacctcaagtgatctgcccgcctcgggctcccaaagtgctgggattacaggcgtgagccactgcacctggcctctgttgcagtcttatcttcattttcctttgtttataatgaaagtggcgattaggcagttagtttccataaagtggccgtatgggaatttagttcattcatccagcaaacattgagtaccaattatttgctaggtcctgtgcaaggaatacaaaaatgattaagacttcttccttacccttttggagcttgaagcataaggaagacaagttattctgtaaggaagataaagcattcaaaagtactacagagaaaaaccaagtatgcttgagttttgcgaatgttctcctcttaaagaatagcttcaaattttgagaccagtggttcccactaagtatagaacattaaaattaatactttataataaaacacttttattgctgcagaatgttaaactgcataacaggcaccagatggtcaagacgagggaaatatgagaaggcaaatgatgtgaggattagtatcttgagattcacctggtctggaattatgtcataggctactatgcatcagaatcacatggagggctttctaaaacagactgctcagcccacccccagggtttctgagttcataggttataagaggtaagttgaacaattccccagatgatgctgatgctcctggtccacaatgtgagaaccactaagttggagtactgactcatagagataaaattctttgaaagaaatgtactgttttaagatactgtaaaatgtggaggcagggcaaacgtttataagggctgttatgtatgaaatgtgcctctgacccaaatccacggactttgcgaaaatcaccaaggagactttgcattaagttcagagtacaatacaaactgggcctagctctgtatttagtcagtatgtgcacgtgggaaactttagtaaaatatcacctccttattgagacaagtttggacatctggccttaagcctctgttgaacaggagaagtgaagctgtttgcaattatataattttctaatttgaaatcatgacaagcagtcttagaacaaagttaaaattaaaaagtctttatccaagtcaccaatg

SEQ ID NO: 186220 - DNA, 2280 bp, Homo sapiens
  Payload ID: 16671
  Gene Symbol: SUPT7L
  Gene Name: SPT7-like STAGA complex gamma subunit
  Uniprot ID: O94864
  ENST ID: ENST00000405491
  CDS Start-End: 620-1858
gagaagaagcgcttccggcggtcttagatcactaatcaacaaaccagctttcggggtctgacgcgatccttgcctcaggcctctcgaggtccagacagccgcccagcccgctctgcgacgcagcagtgaatagtgtggtacctccttgtctcggttcaggtccagacctccccgtcttccggctgccctgaacgtcaggcgacctcaggaccctgtgattggcgcctgcgccggcggaccgtgaccgaggaaacccctggagggacttgggcattccttgggctccgtgcctgttcttcgtgctcctttcgggcaaggatctcacattatcagtctttgaccgacacagaatgcctggcatttgataaatgtttgttgaacttgaagagacatatggacaatgaatctgcaaagggagaacacctttggtcctacagttttgctgacactgacatttttctaagtggtcacaaatagcctactttttacataaataactggctagacctcgtatttttcactacagaagcctataatctaaagttgccaggatttaaacacattacttttaggttattgtctacatttatcctgagacctcttctcttcttattccaaaatgttgagatactggggagagataccaatatcatcaagccagaccaacagaagttccttcgatttgctcccacgggagttccgtctggtggaagtccatgacccacccctgcaccaaccctcagccaacaagccgaagccccccactatgctggacatcccctcagagccatgtagtctcaccatccatacgattcagttgattcagcacaaccgacgtcttcgcaaccttattgccacagctcaggcccagaatcagcagcagacagaaggtgtaaaaactgaagagagtgaacctcttccctcgtgccctgggtcacctcctctccctgatgacctcctgcctttagattgtaagaatcccaatgcaccattccagatccggcacagtgacccagagagtgacttttatcgtgggaaaggggaacctgtgactgaactcagctggcactcctgtcggcagctcctctaccaggcagtggccacaatcctggcccacgcgggctttgactgtgctaatgagagtgtcctggagaccctaactgatgtggcacatgagtattgccttaagtttaccaagttgctgcgttttgctgtggaccgggaggcccggctgggacagactccttttcctgatgtgatggagcaggtattccatgaagtgggtattggcagtgtgctctccctccagaagttctggcagcaccgcatcaaggactatcacagttacatgctacagattagtaagcaactctctgaagaatatgaaaggattgtcaatcctgagaaggccacagaggacgctaaacctgtgaagatcaaggaggaacctgtgagcgacatcacttttcctgtcagtgaggagctggaggctgaccttgcttctggagaccagtcactgcctatgggagtgcttggggctcagagcgaacgcttcccatctaacctggaggttgaagcttcaccacaggcttcaagtgcagaggtaaatgcttctcctctttggaatctggcccatgtgaaaatggagcctcaagaaagtgaagaaggcaatgtctctgggcatggtgtgctgggcagtgatgtcttcgaggagcctatgtcaggcatgagtgaagctgggattcctcagagccctgatgactcagatagcagctatggttcccactccactgacagcctcatggggtcctcccctgttttcaaccagcgctgcaagaagaggatgaggaaaatataaaaggaaaagagggagatgttttgtccagacctactagacccaacagaaaaggtttttgtattagaatctgtttccttaaaaattgatttgactcctgttcttaaacacaagtggtttttcctaattccagaggaactggacgtcaccaaacaaggttgcattttacttttgcatccagtttttatagttttccacaaccaagccacccttcacagataaaatatgatgctggcatggcaatcagaccaaagcactgtccccaattgttgtcttaactatgactagacatgttatacagccatttatcttgtacaactgagaagaatcatactttgacctaccttgtagagatgtgaggatttagatgtttgctaacttcaaaactgtgcttgaatagactaataatatatgctcatatcaga

SEQ ID NO: 186221 - DNA, 4114 bp, Homo sapiens
  Payload ID: 16671
  Gene Symbol: SUPT7L
  Gene Name: SPT7-like STAGA complex gamma subunit
  Uniprot ID: O94864
  ENST ID: ENST00000404798
  CDS Start-End: 602-1441
actctcccaagctcccagtggcgtctgtaggcggcgatggtgaagttgctccttcacgacctggagcgttgcgaagtggtgctaacatgagaaggtcataatatgagaaaaacaaaacggttatcgggatgctgtgcagaacggggacatatttagaggttacaacgggatcgtaatgacttcctgttgcatagcttgattgagaagaagcgcttccggcggtcttagatcactaatcaacaaaccagctttcggggtctgacgcgatccttgcctcaggcctctcgaggtccagacagccgcccagcccgctctgcgacgcagcagtgaatagtgtggtacctccttgtctcggttcaggtccagacctccccgtcttccggctgccctgaacgtcaggcgacctcaggaccctgtgattggcgcctgcgccggcggaccgtgaccgaggaaacccctggagggacttgggcattccttgggctccgtgcctgttcttcgtgctcctttcgggcaaggatctcacattatcagtctttgaccgacacagaatgcctggcatttgataaatgtttgttgaacttgaagagacatatggacaatgaatctgcaaagtgggaaaggggaacctgtgactgaactcagctggcactcctgtcggcagctcctctaccaggcagtggccacaatcctggcccacgcgggctttgactgtgctaatgagagtgtcctggagaccctaactgatgtggcacatgagtattgccttaagtttaccaagttgctgcgttttgctgtggaccgggaggcccggctgggacagactccttttcctgatgtgatggagcaggtattccatgaagtgggtattggcagtgtgctctccctccagaagttctggcagcaccgcatcaaggactatcacagttacatgctacagattagtaagcaactctctgaagaatatgaaaggattgtcaatcctgagaaggccacagaggacgctaaacctgtgaagatcaaggaggaacctgtgagcgacatcacttttcctgtcagtgaggagctggaggctgaccttgcttctggagaccagtcactgcctatgggagtgcttggggctcagagcgaacgcttcccatctaacctggaggttgaagcttcaccacaggcttcaagtgcagaggtaaatgcttctcctctttggaatctggcccatgtgaaaatggagcctcaagaaagtgaagaaggcaatgtctctgggcatggtgtgctgggcagtgatgtcttcgaggagcctatgtcaggcatgagtgaagctgggattcctcagagccctgatgactcagatagcagctatggttcccactccactgacagcctcatggggtcctcccctgttttcaaccagcgctgcaagaagaggatgaggaaaatataaaaggaaaagagggagatgttttgtccagacctactagacccaacagaaaaggtttttgtattagaatctgtttccttaaaaattgatttgactcctgttcttaaacacaagtggtttttcctaattccagaggaactggacgtcaccaaacaaggttgcattttacttttgcatccagtttttatagttttccacaaccaagccacccttcacagataaaatatgatgctggcatggcaatcagaccaaagcactgtccccaattgttgtcttaactatgactagacatgttatacagccatttatcttgtacaactgagaagaatcatactttgacctaccttgtagagatgtgaggatttagatgtttgctaacttcaaaactgtgcttgaatagactaataatatatgctcatatcagatgtcagttttcatttaacttgattcatttttggctcaggtcattgggaacccattactaatacctaacaggaaatagctaaacacaacacaccttatctattagtcaccttcttaaaactgtttttgctacttttgaagtgtcttatttataagatcagaggtctgacaccttttttgcttagacagctctctatctcatccatttattttcttctctagacttactccatctctcctcatccttttgcctttgttatttctgctcggactcacatactttcaccatatacatattttcaattgtttctttccttttctcctttgtgagcaaagcaaacaagtactgtccaaggacagccttgtgcatatttcatttgttgcatttgcttggtcatcagaggacagcagtccattaagcacactttgctgcttctactgtaaaggcagcctttaaaacatagcaatatgcacctttcaactttacatcatgtcctgaacaacatcactgtggttactcatccatcagactatctgtatatataagtactgaatcagtatttattaagtaaatgatgtagcactgtagtgattaggaatcattagcaaatgtgttgcttcatgccttggtgatggatgccagcatgttaaactgctgaagtttgattttctgatgcaaaatatatcttgtaaaatttagaccactcctttaatgcagaccaaaataaggcacagctttaattcattattgaatgccttaaatgtcccaggtattgagaataaatgaatatgatacaaatgaggttatagtttaacatataattttaaatttgccaattgtaactctttagcacatttctctaaaccctttctgtcacagtcttttttttaatttatttatttatttatttatttttgagatggagtcttgctctgtcacccaggctggagtgcaatggtgcaatttcgactcactgcaacctctgcctcccaggttcaagcgattctcctgcctcagccacctgagtagctgggattacacgcacatgccaccacacccagctaatttttgcatttttagtagagatgaggtttcaccgtgttggccaggctggtctcaaaactcctgacctcaagtgatctgcccgcctcgggctcccaaagtgctgggattacaggcgtgagccactgcacctggcctctgttgcagtcttatcttcattttcctttgtttataatgaaagtggcgattaggcagttagtttccataaagtggccgtatgggaatttagttcattcatccagcaaacattgagtaccaattatttgctaggtcctgtgcaaggaatacaaaaatgattaagacttcttccttacccttttggagcttgaagcataaggaagacaagttattctgtaaggaagataaagcattcaaaagtactacagagaaaaaccaagtatgcttgagttttgcgaatgttctcctcttaaagaatagcttcaaattttgagaccagtggttcccactaagtatagaacattaaaattaatactttataataaaacacttttattgctgcagaatgttaaactgcataacaggcaccagatggtcaagacgagggaaatatgagaaggcaaatgatgtgaggattagtatcttgagattcacctggtctggaattatgtcataggctactatgcatcagaatcacatggagggctttctaaaacagactgctcagcccacccccagggtttctgagttcataggttataagaggtaagttgaacaattccccagatgatgctgatgctcctggtccacaatgtgagaaccactaagttggagtactgactcatagagataaaattctttgaaagaaatgtactgttttaagatactgtaaaatgtggaggcagggcaaacgtttataagggctgttatgtatgaaatgtgcctctgacccaaatccacggactttgcgaaaatcaccaaggagactttgcattaagttcagagtacaatacaaactgggcctagctctgtatttagtcagtatgtgcacgtgggaaactttagtaaaatatcacctccttattgagacaagtttggacatctggccttaagcctctgttgaacaggagaagtgaagctgtttgcaattatataattttctaatttgaaatcatgacaagcagtcttagaacaaagttaaaattaaaaagtctttatccaagtcaccaatg

SEQ ID NO: 186222 - DNA, 2869 bp, Homo sapiens
  Payload ID: 16671
  Gene Symbol: SUPT7L
  Gene Name: SPT7-like STAGA complex gamma subunit
  Uniprot ID: O94864
  ENST ID: ENST00000406540
  CDS Start-End: 1198-2436
tgagaagaagcgcttccggcggtcttagatcactaatcaacaaaccagctttcggggtctgacgcgatccttgcctcaggcctctcgaggtccagacagccgcccagcccgctctgcgacgcagcagtgaatagtgtggtacctccttgtctcggttcaggtccagacctccccgtcttccggctgccctgaacgtcaggcgacctcaggaccctgtgattggcgcctgcgccggcggaccgtgaccgaggaaacccctggagggacttgggcattccttgggctccgtgcctgttcttcgtgctcctttcgggcaaggatctcacattatcagtctttgaccgacacagaatgcctggcatttgataaatgtttgttgaacttgaagagacatatggacaatgaatctgcaaaggtgagttgaaaccagattgtgaattttgttgaatggtaagccaaggaattctgactttttccaataggcaatgggaagccatttgatttaagttttaaaaagagtaagtctagcagcagtgtagagaatagatgacatacaaagagagattggaggaagggataccagttagaaggcagcagaaatctctcacgttctatatgtcaaaagttgaaagcataatgccatttagattaatggttcataaatttttccaccaggatcatgcctaagacacacagagtaagaaccacttcttattatctttaaccctactagtttttctcctattgatccagcacagatgtatcaagataccttatcatgccttgcttattgttcaggattgagcgtgatggtagttctggtaatgagttagtgagtgagatgggaaatagggatactagagctccagatgctgttgtagctattggtccactaatgacccaaattctaccctgtggttcagtgtagtaggaattgtcatagtatgacaataaccagcatctaacagttacatttctcttaatttatttagggagaacacctttggtcctacagttttgctgacactgacatttttctaagtggtcacaaatagcctactttttacataaataactggctagacctcgtatttttcactacagaagcctataatctaaagttgccaggatttaaacacattacttttaggttattgtctacatttatcctgagacctcttctcttcttattccaaaatgttgagatactggggagagataccaatatcatcaagccagaccaacagaagttccttcgatttgctcccacgggagttccgtctggtggaagtccatgacccacccctgcaccaaccctcagccaacaagccgaagccccccactatgctggacatcccctcagagccatgtagtctcaccatccatacgattcagttgattcagcacaaccgacgtcttcgcaaccttattgccacagctcaggcccagaatcagcagcagacagaaggtgtaaaaactgaagagagtgaacctcttccctcgtgccctgggtcacctcctctccctgatgacctcctgcctttagattgtaagaatcccaatgcaccattccagatccggcacagtgacccagagagtgacttttatcgtgggaaaggggaacctgtgactgaactcagctggcactcctgtcggcagctcctctaccaggcagtggccacaatcctggcccacgcgggctttgactgtgctaatgagagtgtcctggagaccctaactgatgtggcacatgagtattgccttaagtttaccaagttgctgcgttttgctgtggaccgggaggcccggctgggacagactccttttcctgatgtgatggagcaggtattccatgaagtgggtattggcagtgtgctctccctccagaagttctggcagcaccgcatcaaggactatcacagttacatgctacagattagtaagcaactctctgaagaatatgaaaggattgtcaatcctgagaaggccacagaggacgctaaacctgtgaagatcaaggaggaacctgtgagcgacatcacttttcctgtcagtgaggagctggaggctgaccttgcttctggagaccagtcactgcctatgggagtgcttggggctcagagcgaacgcttcccatctaacctggaggttgaagcttcaccacaggcttcaagtgcagaggtaaatgcttctcctctttggaatctggcccatgtgaaaatggagcctcaagaaagtgaagaaggcaatgtctctgggcatggtgtgctgggcagtgatgtcttcgaggagcctatgtcaggcatgagtgaagctgggattcctcagagccctgatgactcagatagcagctatggttcccactccactgacagcctcatggggtcctcccctgttttcaaccagcgctgcaagaagaggatgaggaaaatataaaaggaaaagagggagatgttttgtccagacctactagacccaacagaaaaggtttttgtattagaatctgtttccttaaaaattgatttgactcctgttcttaaacacaagtggtttttcctaattccagaggaactggacgtcaccaaacaaggttgcattttacttttgcatccagtttttatagttttccacaaccaagccacccttcacagataaaatatgatgctggcatggcaatcagaccaaagcactgtccccaattgttgtcttaactatgactagacatgttatacagccatttatcttgtacaactgagaagaatcatactttgacctaccttgtagagatgtgaggatttagatgtttgctaacttcaaaactgtgcttgaatagactaataatatatgctcatatcagatgtcagttttc

SEQ ID NO: 186223 - DNA, 2664 bp, Homo sapiens
  Payload ID: 16671
  Gene Symbol: SUPT7L
  Gene Name: SPT7-like STAGA complex gamma subunit
  Uniprot ID: O94864
  ENST ID: ENST00000464789
  CDS Start-End: 1011-2249
gagaagaagcgcttccggcggtcttagatcactaatcaacaaaccagctttcggggtctgacgcgatccttgcctcaggcctctcgaggtccagacagccgcccagcccgctctgcgacgcagcaggcaaggatctcacattatcagtctttgaccgacacagaatgcctggcatttgataaatgtttgttgaacttgaagagacatatggacaatgaatctgcaaaggtgagttgaaaccagattgtgaattttgttgaatggtaagccaaggaattctgactttttccaataggcaatgggaagccatttgatttaagttttaaaaagagtaagtctagcagcagtgtagagaatagatgacatacaaagagagattggaggaagggataccagttagaaggcagcagaaatctctcacgttctatatgtcaaaagttgaaagcataatgccatttagattaatggttcataaatttttccaccaggatcatgcctaagacacacagagtaagaaccacttcttattatctttaaccctactagtttttctcctattgatccagcacagatgtatcaagataccttatcatgccttgcttattgttcaggattgagcgtgatggtagttctggtaatgagttagtgagtgagatgggaaatagggatactagagctccagatgctgttgtagctattggtccactaatgacccaaattctaccctgtggttcagtgtagtaggaattgtcatagtatgacaataaccagcatctaacagttacatttctcttaatttatttagggagaacacctttggtcctacagttttgctgacactgacatttttctaagtggtcacaaatagcctactttttacataaataactggctagacctcgtatttttcactacagaagcctataatctaaagttgccaggatttaaacacattacttttaggttattgtctacatttatcctgagacctcttctcttcttattccaaaatgttgagatactggggagagataccaatatcatcaagccagaccaacagaagttccttcgatttgctcccacgggagttccgtctggtggaagtccatgacccacccctgcaccaaccctcagccaacaagccgaagccccccactatgctggacatcccctcagagccatgtagtctcaccatccatacgattcagttgattcagcacaaccgacgtcttcgcaaccttattgccacagctcaggcccagaatcagcagcagacagaaggtgtaaaaactgaagagagtgaacctcttccctcgtgccctgggtcacctcctctccctgatgacctcctgcctttagattgtaagaatcccaatgcaccattccagatccggcacagtgacccagagagtgacttttatcgtgggaaaggggaacctgtgactgaactcagctggcactcctgtcggcagctcctctaccaggcagtggccacaatcctggcccacgcgggctttgactgtgctaatgagagtgtcctggagaccctaactgatgtggcacatgagtattgccttaagtttaccaagttgctgcgttttgctgtggaccgggaggcccggctgggacagactccttttcctgatgtgatggagcaggtattccatgaagtgggtattggcagtgtgctctccctccagaagttctggcagcaccgcatcaaggactatcacagttacatgctacagattagtaagcaactctctgaagaatatgaaaggattgtcaatcctgagaaggccacagaggacgctaaacctgtgaagatcaaggaggaacctgtgagcgacatcacttttcctgtcagtgaggagctggaggctgaccttgcttctggagaccagtcactgcctatgggagtgcttggggctcagagcgaacgcttcccatctaacctggaggttgaagcttcaccacaggcttcaagtgcagaggtaaatgcttctcctctttggaatctggcccatgtgaaaatggagcctcaagaaagtgaagaaggcaatgtctctgggcatggtgtgctgggcagtgatgtcttcgaggagcctatgtcaggcatgagtgaagctgggattcctcagagccctgatgactcagatagcagctatggttcccactccactgacagcctcatggggtcctcccctgttttcaaccagcgctgcaagaagaggatgaggaaaatataaaaggaaaagagggagatgttttgtccagacctactagacccaacagaaaaggtttttgtattagaatctgtttccttaaaaattgatttgactcctgttcttaaacacaagtggtttttcctaattccagaggaactggacgtcaccaaacaaggttgcattttacttttgcatccagtttttatagttttccacaaccaagccacccttcacagataaaatatgatgctggcatggcaatcagaccaaagcactgtccccaattgttgtcttaactatgactagacatgttatacagccatttatcttgtacaactgagaagaatcatactttgacctaccttgtagagatgtgaggatttagatgtttgctaacttcaaaactgtgcttgaatagactaataatatatgctca

SEQ ID NO: 186224 - DNA, 1437 bp, Homo sapiens
  Payload ID: 16672
  Gene Symbol: SPTY2D1-AS1
  Gene Name: SPTY2D1 antisense RNA 1
  ENST ID: ENST00000501599
  CDS Start-End: 126-305
agactcgaacagacatgcgagacctctaccaactgaaggtttcgtgagcgcactcctttgccaagatcttggtgaatagtctttcactgtgcaattttatcttagaaattgttttacgtttgatcatgattgtgcttggctggatgttttttgttggacttgtgtgttacatgggcacgtttccagagttgatgcctccaactctgaagtggcaggagaggtggcctgttcaggagagcaaaacacaactgaggaggcgggctttaggtgaagatctgctgcagaaccatgtggaagggatataaatatcccccaggagggactccagtggaagtaagcaaggatgatcctggtgaagtaatgcagctgtgaagctcacctgaccagctgtacagttcctgttgttggtttcacataaaccacctaaattaatgagtaagaatgctcagcatccaatccatgaatacagaatttattctactttgtacttcaaagtcacaggatgacatccatatgatagttataaattctactctacattttcaagttctcaatccatagattaggacaagtcactttattgctggcaacattcatggaaggtccaggtttctcataaaaagactaagtttgattgggagcagggcagtgccctactcacagatcagcagaagaattacagaaatcaagagacaaccttttttttcctttcaaagtagcaaaggaacaataaaagattggctgactggtgagtggccccacattagagtgcatagctcatcaggatcaaggctggcatctgtgaacagttaacttcataagagcacaagtgggcattatatcatctgcattacagatttcaccctggaaaatatctgaaaatattttatgctcaaatgacagcctgcaaatgacagtatgcattccttctccttgagtacccaagtataaatctaaaatgataagggggcttcttcagtctgaaggcaggaaatccttgcagcagagcagctctagaatttcacaaaaataaaagcagcagctaacgcctcttcagcttcttggcccttcgacgttgcatttcttcttcttcacgtctcatttcctctaagtcctcttgcatacccagtcttaagctgccaaagaatttttaaagggtatttgtcaatatacatgagatgaccactttccttaaaaagaatgaaaattccaactgggagctcacatggattgtgctgatgctctcaaaatgcctcaaggctttaccactgaaaacaaactagcagggatatttttttaccaggggccacagactcaaattgtcgtgggaaaaagaactcacacaccacaaaaaccttactatttccattaaaataataaaatataggtttatctcaatagcttttaaaaataaacagcaagaagcatttattcatt

SEQ ID NO: 186225 - DNA, 573 bp, Homo sapiens
  Payload ID: 16672
  Gene Symbol: SPTY2D1-AS1
  Gene Name: SPTY2D1 antisense RNA 1
  ENST ID: ENST00000511927
  CDS Start-End: 141-311
atcctttggagccaaagactcgaacagacatgcgagacctctaccaactgaaggtttcgtgagcgcactcctttgccaagatcttggtgaatagtctttcactgtgcaattttatcttagaaattgttttacgtttgatcatgattgtgcttggctggatgttttttgttggacttgtgtgttacatgggcacgtttccagagttgatgcctccaactctgaagtggcaggagaggtggcctgttcaggagagcaaaacacaactgaggaggcgggctttaggtcttgctctgccacccaggctggagtgaggtgcaagcagtcttcccatctcagcttcttgggtagctgatcctcaggcacatgccaccatgcctggctaattttttttttatttttttagagacaaggtgtcactatgttgcccaggcaggtcttgaactccaggcctcaagtggtcccccagccttggcctcccagagtgctgggattgcaggcataaaccaccgtgccttgccaggaccagcatttttaacgtcccttttggcagatactgaaactggagttaacatt

SEQ ID NO: 186226 - DNA, 331 bp, Homo sapiens
  Payload ID: 16672
  Gene Symbol: SPTY2D1-AS1
  Gene Name: SPTY2D1 antisense RNA 1
  ENST ID: ENST00000542172
  CDS Start-End: 138-260
gaagctccttagtgaggagctgccatgctgggccatccaccatctggattcctacgactcagggaatagaacactgcaccttccagaagcacttgtttcttcgtgggtacaccaccagctgagaaagaagcctcatgatgattgttgtcttatggatgcttctcattgcaggaaccatgtggaagggatataaatatcccccaggagggactccagtggaagtaagcaaggatgatcctggtgaagtaatgcagctgtgaagctcacctgaccagctgtacagttcctgttgttggtttcacataaagtaattgcacattattttgtcata

SEQ ID NO: 186227 - DNA, 373 bp, Homo sapiens
  Payload ID: 16672
  Gene Symbol: SPTY2D1-AS1
  Gene Name: SPTY2D1 antisense RNA 1
  ENST ID: ENST00000634992
  CDS Start-End: 143-373
ggatcctttggagccaaagactcgaacagacatgcgagacctctaccaactgaaggtttcgtgagcgcactcctttgccaagatcttggtgaatagtctttcactgtgcaattttatcttagaaattgttttacgtttgatcatgattgtgcttggctggatgttttttgttggacttgtgtgttacatgggcacgtttccagagttgatgcctccaactctgaagtggcaggagaggtggcctgttcaggagagcaaaacacaactgaggaggcgggctttaggaaccatgtggaagggatataaatatcccccaggagggactccagtggaagtaagcaaggatgatcctggtgaagtaatgcagctgtga

SEQ ID NO: 186228 - DNA, 450 bp, Homo sapiens
  Payload ID: 16672
  Gene Symbol: SPTY2D1-AS1
  Gene Name: SPTY2D1 antisense RNA 1
  ENST ID: ENST00000635674
  CDS Start-End: 143-322
ggatcctttggagccaaagactcgaacagacatgcgagacctctaccaactgaaggtttcgtgagcgcactcctttgccaagatcttggtgaatagtctttcactgtgcaattttatcttagaaattgttttacgtttgatcatgattgtgcttggctggatgttttttgttggacttgtgtgttacatgggcacgtttccagagttgatgcctccaactctgaagtggcaggagaggtggcctgttcaggagagcaaaacacaactgaggaggcgggctttaggtgaagatctgctgcagaaccatgtggaagggatataaatatcccccaggagggactccagtggaagtaagcaaggatgatcctggtgaagtaatgcagctgtgaagctcacctgaccagctgtacagttcctgttgttggtttcacataaagtaattgcacatta

SEQ ID NO: 186229 - DNA, 2961 bp, Homo sapiens
  Payload ID: 16673
  Gene Symbol: SQLE
  Gene Name: squalene epoxidase
  Uniprot ID: Q14534
  ENST ID: ENST00000265896
  CDS Start-End: 899-2623
agacgcgtggagcctggcggcgagtgggggcgtgcgacggttactctggttactggggccgcgccgcgctggcgagagccgccgcccgcgagggatgctggtgaggaagccgtcgggagccgccgccgccatctgagggaggtaccctggaaaccaccttttatcggtggggaagtgcagtcgcggtgggcggctctgggggccagcgaaacgggaggcctctaaatctttaggttggggctgcattgccctggagccgcactcttgagtccgaggccatcttttgttggagaaggcgtcggcgttggcgttttcccgaggttgggctgtacagtgtctccgtccgcggaaaaagaagcctctgaacccgcgccggcccgcagcccccgtgccttccggccgctgctcgccgtcgccagaggctaggccacgtttcccccagtgccgaggtgtttctgtgaccctccctccactcccattcccttctgaaagggcacctgctcttggtgagaaaagaaattatagcacgaagagccagtatcagaagagtatccatcacccgcagcaaccgctcagggaacaccatcaaaaaagaaaaaaagggaatatctggatttcctgggcgaggaggagcgagtctgctcgggagctgttccagcaggcgatttttaaatactgctttctacgccctatacaacttggcttcacatacttttacactaactttatatgatttttaaaaactggtctgatcggacttctcgtcctgggacactgtttactggagtctggccggctctccgtgctcctcttggtacctcattttggggagaaccttaaacccactcgagcagataatctccgccttgaccggtgccaccaaagaagccttggaaccatgtggacttttctgggcattgccactttcacctatttttataagaagttcggggacttcatcactttggccaacagggaggtcctgttgtgcgtgctggtgttcctctcgctgggcctggtgctctcctaccgctgtcgccaccgaaacgggggtctcctcgggcgccagcagagcggctcccagttcgccctcttctcggatattctctcaggcctgcctttcattggcttcttctgggccaaatccccccctgaatcagaaaataaggagcagctcgaggccaggaggcgcagaaaaggaaccaatatttcagaaacaagcttaataggaacagctgcctgtacatcaacatcttctcagaatgacccagaagttatcatcgtgggagctggcgtgcttggctctgctttggcagctgtgctttccagagatggaagaaaggtgacagtcattgagagagacttaaaagagcctgacagaatagttggagaattcctgcagccgggtggttatcatgttctcaaagaccttggtcttggagatacagtggaaggtcttgatgcccaggttgtaaatggttacatgattcatgatcaggaaagcaaatcagaggttcagattccttaccctctgtcagaaaacaatcaagtgcagagtggaagagctttccatcacggaagattcatcatgagtctccggaaagcagctatggcagagcccaatgcaaagtttattgaaggtgttgtgttacagttattagaggaagatgatgttgtgatgggagttcagtacaaggataaagagactggagatatcaaggaactccatgctccactgactgttgttgcagatgggcttttctccaagttcaggaaaagcctggtctccaataaagtttctgtatcatctcattttgttggctttcttatgaagaatgcaccacagtttaaagcaaatcatgctgaacttattttagctaacccgagtccagttctcatctaccagatttcatccagtgaaactcgagtacttgttgacattagaggagaaatgccaaggaatttaagagaatacatggttgaaaaaatttacccacaaatacctgatcacctgaaagaaccattcttagaagccactgacaattctcatctgaggtccatgccagcaagcttccttcctccttcatcagtgaagaaacgaggtgttcttcttttgggagacgcatataatatgaggcatccacttactggtggaggaatgactgttgcttttaaagatataaaactatggagaaaactgctaaagggtatccctgacctttatgatgatgcagctattttcgaggccaaaaaatcattttactgggcaagaaaaacatctcattcctttgtcgtgaatatccttgctcaggctctttatgaattattttctgccacagatgattccctgcatcaactaagaaaagcctgttttctttatttcaaacttggtggcgaatgtgttgcgggtcctgttgggctgctttctgtattgtctcctaaccctctagttttaattggacacttctttgctgttgcaatctatgccgtgtatttttgctttaagtcagaaccttggattacaaaacctcgagcccttctcagtagtggtgctgtattgtacaaagcgtgttctgtaatatttcctctaatttactcagaaatgaagtatatggttcattaagcttaaaggggaaccatttgtgaatgaatatttggaacttaccaagtcctaagagacttttggaagaggatatatatagcatagtaccataccacttataaagtggaaactcttggaccaagatttggattaatttgtttttgaagttttttgtatataaatatgtaaatacatgctttaatttgcaatttaaaatgaaggggttaaataagttagacatttaaaagaaatgattgttaccataaattagtgctaatgctgaggagaactacagtttttcttttgaatttagtatttgagatgagttgttgggacatgcaaataaaatgaagaatgaa

SEQ ID NO: 186230 - DNA, 711 bp, Homo sapiens
  Payload ID: 16673
  Gene Symbol: SQLE
  Gene Name: squalene epoxidase
  ENST ID: ENST00000521232
  CDS Start-End: 159-711
ggttactctggttactggggccgcgccgcgctggcgagagccgccgcccgcgagggatgctggtgaggaagccgtcgggagccgccgccgccatctgagggagcattggttgagcctcagatggaggttggatatttgattatgaaagatggaacgaaatgttagaatttcattttgaaggagaagaacaaccactttccatgatgaaaaagtttttaaaaagttcttgggtaaggattggatttgtgcctgaggaagaaagaaacgtgctgcggcgcagaaaaggaaccaatatttcagaaacaagcttaataggaacagctgcctgtacatcaacatcttctcagaatgacccagaagttatcatcgtgggagctggcgtgcttggctctgctttggcagctgtgctttccagagatggaagaaaggtgacagtcattgagagagacttaaaagagcctgacagaatagttggagaattcctgcagccgggtggttatcatgttctcaaagaccttggtcttggagatacagtggaaggtcttgatgcccaggttgtaaatggttacatgattcatgatcaggaaagcaaatcagaggttcagattccttaccctctgtcagaaaacaatcaagtgcagagtggaagagctttccatcacggaagattcatcatgagtctccggaaagcagctatggcagagcccaagt

SEQ ID NO: 186231 - DNA, 554 bp, Homo sapiens
  Payload ID: 16673
  Gene Symbol: SQLE
  Gene Name: squalene epoxidase
  ENST ID: ENST00000518931
  CDS Start-End: 1-492
agaggagaaatgccaaggaatttaagagaatacatggttgaaaaaatttacccacaaatacctgatcacctgaaagaaccattcttagaagccactgacaattctcatctgaggtccatgccagcaagcttccttcctccttcatcagtgaagaaacgaggtgttcttcttttgggagacgcatataatatgaggcatccacttactggtggaggaatgactgttgcttttaaagatataaaactatggagaaaactgctaaagggtatccctgacctttatgatgatgcagctattttcgaggccaaaaaatcattttactgggcaagaaaaacatctcattcctttgtcgtgaatatccttgctcaggctctttatgaattattttctgccacagatgattccctgcatcaactaagaaaagcctgttttctttatttcaaacttggtggcgaatgtgttgcgggtcctgttgggctgctttctgtgtaagttgtgatggcacagaggatacaaacctgccagattttcttaggactgttcagttgatgaat

SEQ ID NO: 186232 - DNA, 1879 bp, Homo sapiens
  Payload ID: 16673
  Gene Symbol: SQLE
  Gene Name: squalene epoxidase
  ENST ID: ENST00000523430
  CDS Start-End: 104-1543
agctggctgagacgcgtggagcctggcggcgagtgggggcgtgcgacggttactctggttactggggccgcgccgcgctggcgagagccgccgcccgcgagggatgctgcgcagaaaaggaaccaatatttcagaaacaagcttaataggaacagctgcctgtacatcaacatcttctcagaatgacccagaagttatcatcgtgggagctggcgtgcttggctctgctttggcagctgtgctttccagagatggaagaaaggtgacagtcattgagagagacttaaaagagcctgacagaatagttggagaattcctgcagccgggtggttatcatgttctcaaagaccttggtcttggagatacagtggaaggtcttgatgcccaggttgtaaatggttacatgattcatgatcaggaaagcaaatcagaggttcagattccttaccctctgtcagaaaacaatcaagtgcagagtggaagagctttccatcacggaagattcatcatgagtctccggaaagcagctatggcagagcccaatgcaaagtttattgaaggtgttgtgttacagttattagaggaagatgatgttgtgatgggagttcagtacaaggataaagagactggagatatcaaggaactccatgctccactgactgttgttgcagatgggcttttctccaagttcaggaaaagcctggtctccaataaagtttctgtatcatctcattttgttggctttcttatgaagaatgcaccacagtttaaagcaaatcatgctgaacttattttagctaacccgagtccagttctcatctaccagatttcatccagtgaaactcgagtacttgttgacattagaggagaaatgccaaggaatttaagagaatacatggttgaaaaaatttacccacaaatacctgatcacctgaaagaaccattcttagaagccactgacaattctcatctgaggtccatgccagcaagcttccttcctccttcatcagtgaagaaacgaggtgttcttcttttgggagacgcatataatatgaggcatccacttactggtggaggaatgactgttgcttttaaagatataaaactatggagaaaactgctaaagggtatccctgacctttatgatgatgcagctattttcgaggccaaaaaatcattttactgggcaagaaaaacatctcattcctttgtcgtgaatatccttgctcaggctctttatgaattattttctgccacagatgattccctgcatcaactaagaaaagcctgttttctttatttcaaacttggtggcgaatgtgttgcgggtcctgttgggctgctttctgtattgtctcctaaccctctagttttaattggacacttctttgctgttgcaatctatgccgtgtatttttgctttaagtcagaaccttggattacaaaacctcgagcccttctcagtagtggtgctgtattgtacaaagcgtgttctgtaatatttcctctaatttactcagaaatgaagtatatggttcattaagcttaaaggggaaccatttgtgaatgaatatttggaacttaccaagtcctaagagacttttggaagaggatatatatagcatagtaccataccacttataaagtggaaactcttggaccaagatttggattaatttgtttttgaagttttttgtatataaatatgtaaatacatgctttaatttgcaatttaaaatgaaggggttaaataagttagacatttaaaagaaatgattgttaccataaattagtgctaatgctgaggagaactacagtttttcttttgaatttagtatttgagatgagttgttgggacatgcaaataaaatgaagaatg

SEQ ID NO: 186233 - DNA, 3293 bp, Homo sapiens
  Payload ID: 16674
  Gene Symbol: SART1
  Gene Name: squamous cell carcinoma antigen recognized by T cells 1
  Uniprot ID: O43290
  ENST ID: ENST00000312397
  CDS Start-End: 93-2495
aacacgacagcggctgccgagcgacccggaagtattcccattttgcgttgtctgggctcggcggcagccgggctcggagtggacgtgccactatggggtcgtccaagaagcatcgcggagagaaggaggcggccgggacgacggcggcggccggcaccgggggtgccaccgagcagccgccgcggcaccgggaacacaaaaaacacaagcaccggagtggcggcagtggcggtagcggtggcgaacgacggaagcggagccgggaacgtgggggcgagcgcgggagcgggcggcgcggggccgaagctgaggcccggagcagcacgcacgggcgggagcgcagccaggcagagccctccgagcggcgcgtgaagcgggagaagcgcgatgacggctacgaggccgctgccagctccaaaactagctcaggcgatgcctcctcactcagcatcgaggagactaacaaactccgggcaaagttggggctgaaacccttggaggttaatgccatcaagaaggaggcgggcaccaaggaggagcccgtgacagctgatgtcatcaaccctatggccttgcgacagcgagaggagctgcgggagaagctggcggctgccaaggagaagcgcctgctgaaccaaaagctggggaagataaagaccctaggagaggatgacccctggctggacgacactgcagcctggatcgagaggagccggcagctgcagaaggagaaggacctggcagagaagagggccaagttactggaggagatggaccaagagtttggtgtcagcactctggtggaggaggagttcgggcagaggcggcaggacctgtacagtgcccgggacctgcagggcctcaccgtggagcatgccattgattccttccgagaaggggagacaatgattcttaccctcaaggacaaaggcgtgctgcaggaggaggaggacgtgctggtgaacgtgaacctggtggataaggagcgggcagagaaaaatgtggagctgcggaagaagaagcctgactacctgccctatgccgaggacgagagcgtggacgacctggcgcagcaaaaacctcgctctatcctgtccaagtatgacgaagagcttgaaggggagcggccacattccttccgcttggagcagggcggcacggctgatggcctgcgggagcgggagctggaggagatccgggccaagctgcggctgcaggctcagtccctgagcacagtggggccccggctggcctccgaatacctcacgcctgaggagatggtgacctttaaaaagaccaagcggagggtgaagaaaatccgcaagaaggagaaggaggtagtagtgcgggcagatgacttgctgcctctcggggaccagactcaggatggggactttggttccagactgcggggacggggtcgccgccgagtgtccgaagtggaggaggagaaggagcctgtgcctcagcccctgccgtcggacgacacccgagtggagaacatggacatcagtgatgaggaggaaggtggagctccaccgccggggtccccgcaggtgctggaggaggacgaggcggagctggagctgcagaagcagctggagaagggacgccggctgcgacagttacagcagctacagcagctgcgagacagtggcgagaaggtggtggagattgtgaagaagctggagtctcgccagcggggctgggaggaggatgaggatcccgagcggaagggggccatcgtgttcaacgccacgtccgagttctgccgcaccttgggggagatccccacctacgggctggctggcaatcgcgaggagcaggaggagctcatggactttgaacgggatgaggagcgctcagccaacggtggctccgaatctgacggggaggagaacatcggctggagcacggtgaacctggacgaggagaagcagcagcaggatttctctgcttcctccaccaccatcctggacgaggaaccgatcgtgaatagggggctggcagctgccctgctcctgtgtcagaacaaagggctgctggagaccacagtgcagaaggtggcccgggtgaaggcccccaacaagtcgctgccctcagccgtgtactgcatcgaggataagatggccatcgatgacaagtacagccggagggaggaataccgaggcttcacacaggacttcaaggagaaggacggctacaaacccgacgttaagatcgaatacgtggatgagacgggccggaaactcacacccaaggaggctttccggcagctgtcgcaccgcttccatggcaagggctcaggcaagatgaagacagagcggcggatgaagaagctggacgaggaggcgctcctgaagaagatgagctccagcgacacgcccctgggcaccgtggccctgctccaggagaagcagaaggctcagaagaccccctacatcgtgctcagcggcagcggcaagagcatgaacgcgaacaccatcaccaagtgacagcgccctcccgccccggccctgcctcaaccttcatattaaataaagctccctccttattttttcctccctggtcgtggtacagattccagggttggatctttggttgggtgtggcacagagtctggctcctgctaggtgagacctggccatcaaatgacacaaacaactaaacgatggaagagagagcgagcccgggtcctctaaggctccttccttctcccctggctgtcggtcacacctctgcagggccggctctctgatagaaagtggaaggcggttttagaaactcatcaccctgctctctcctggcctcgggggctgcacaggtcactgtcctgtaatgtctcccggtcagggcagcccaggactgcccagcctggtgggctggggattgggctttgggtagggcacaggtgccaccttctgtcctggctgtcctgtgccaccctggtctgtgtctagaggagtgaaactcccagggttgggctgggagtatttggtgcacgcggtatggggagggctgagctcagtgcctcctgggagacttgtcccgtgtacagtgacccagaaagatgagattccttggcctgaactctgtgatagagtgtgactgagctgctgggggacatgtgagcctcaaatccatagaaagacaaacggccaccttgggtgcccaggatactggtgcctggccccacgtacacccacatacttctcagatggctcccacattttaagattttaaaaatgaaaccaaaaaataaattgaagaaaactgtaaactttaaagaataa

SEQ ID NO: 186234 - DNA, 753 bp, Homo sapiens
  Payload ID: 16674
  Gene Symbol: SART1
  Gene Name: squamous cell carcinoma antigen recognized by T cells 1
  ENST ID: ENST00000530251
  CDS Start-End: 53-547
ttttgcgttgtctgggctcggcggcagccgggctcggagtggacgtgccactatggggtcgtccaagaagcatcgcggagagaaggaggcggccgggacgacggcggcggccggcaccgggggtgccaccgagcagccgccgcggcaccgggaacacaaaaaacacaagcaccggagtggcggcagtggcggtagcggtggcgaacgacggaagcggagccgggaacgtgggggcgagcgcgggagcgggcggcgcggggccgaagctgaggcccggagcagcacgcacgggcgggagcgcagccaggcagagccctccgagcggcgcgtgaagcgggagaagcgcgatgacggctacgaggccgctgccagctccaaaactagctcaggcgatgcctcctcactcagcatcgaggagactaacaaactccgggcaaagttggggctgaaacccttggaggttaatgccatcaagaaggccatgggcgggcatagcctcacgtctgggccccccttccagaggcgggcaccaaggaggagcccgtgacagctgatgtcatcaaccctatggccttgcgacagcgagaggagctgcgggagaagctggcggctgccaaggagaagcgcctgctgaaccaaaagctggggaagataaagaccctaggagaggatgacccctggctggacgacactgcagcctggatcgagaggagccggcagctgcagaaggagaaggacctggcagagaagagg

SEQ ID NO: 186235 - DNA, 4004 bp, Homo sapiens
  Payload ID: 16675
  Gene Symbol: SART3
  Gene Name: squamous cell carcinoma antigen recognized by T cells 3
  Uniprot ID: Q15020
  ENST ID: ENST00000228284
  CDS Start-End: 236-3127
agttgtgacggaacgcatgccattataatgagtttttatatctggtgggagcttttacagggtataaaataatgtgaatttagtgtatgtggagattttcctgttatctaagttcccagtttctctttcaatggcaagaaaacgggtttttgataaggcgcgcgccgcgggcagcttctgcctcagcgggtcttcggcggccgcgggaagacccgagagtcattagaagcgcaagatggcgactgcggccgaaacctcggcttcagaacccgaggctgagtccaaggctgggcccaaggctgacggagaggaggatgaggttaaggcggctaggacaaggaggaaggtgttatcgcgggctgtggccgctgcgacatacaagaccatggggccagcgtgggatcagcaggaggaaggcgtgagcgagagcgatggggatgagtacgccatggcttcctccgcggagagctcccccggggagtacgagtgggaatatgacgaagaggaggagaaaaaccagctggagattgagagactggaggagcagttgtctatcaacgtctatgactacaactgccatgtggacttgatcagactgctcaggctggaaggggagcttaccaaggtgaggatggcccgccagaagatgagtgaaatctttcccttgactgaagagctctggctggagtggctgcatgacgagatcagcatggcccaggatggcctggacagagagcacgtgtatgacctctttgagaaagccgtgaaggattacatttgtcctaacatttggctagagtatggccagtactcagttggtgggattggtcagaaaggtggccttgagaaagttcgctccgtgtttgaaagggctctctcgtctgttggtttacatatgaccaaaggactcgccctctgggaggcttaccgagagtttgaaagtgcgattgtggaagctgctcggcttgagaaagtccacagtcttttccggcgacagttggcgatcccactctatgatatggaggccacatttgcagagtatgaagaatggtcagaagacccaataccagagtcagtaattcagaactataacaaagcactacagcagctggagaaatataaaccctatgaagaagcactgttgcaggcagaggcaccaaggctggcagaatatcaagcatatatcgattttgagatgaaaattggcgatcctgctcgcattcagttgatctttgagcgcgccctggtcgagaactgccttgtcccagacttatggatccgttacagtcagtacctagatcgacaactgaaagtaaaggatttggttttatctgtacataaccgcgctattagaaactgcccctggacagttgccttatggagtcggtacctcttggccatggagagacatggagttgatcatcaagtaatttctgtaaccttcgagaaagctttgaatgccggcttcatccaggccactgattatgtggagatttggcaggcataccttgattacctgaggagaagggttgatttcaaacaagactccagtaaagagctggaggagttgagggccgcctttactcgtgccttggagtatctgaagcaggaggtggaagagcgtttcaatgagagtggtgatccaagctgcgtgattatgcagaactgggctaggattgaggctcgactgtgcaataacatgcagaaagctcgggaactctgggatagcatcatgaccagaggaaatgccaagtacgccaacatgtggctagagtattacaacctggaaagagctcatggtgacacccagcactgccggaaggctctgcaccgggccgtccagtgcaccagtgactacccagagcacgtctgcgaagtgttactcaccatggagaggacagaaggttctttagaagattgggatatagctgttcagaaaactgaaacccgattagctcgtgtcaatgagcagagaatgaaggctgcagagaaggaagcagcccttgtgcagcaagaagaagaaaaggctgaacaacggaaaagagctcgggctgagaagaaagcgttaaaaaagaagaaaaagatcagaggcccagagaagcgcggagcagatgaggatgatgagaaagagtggggcgatgatgaagaagagcagccttccaaacgcagaagggtcgagaacagcatccctgcagctggagaaacacaaaatgtagaagtagcagcagggcccgctgggaaatgtgctgccgtagatgtggagcccccttcgaagcagaaggagaaggcagcctccctgaagagggacatgcccaaggtgctgcacgacagcagcaaggacagcatcaccgtctttgtcagcaacctgccctacagcatgcaggagccggacacgaagctcaggccactcttcgaggcctgtggggaggtggtccagatccgacccatcttcagcaaccgtggggatttccgaggttactgctacgtggagtttaaagaagagaaatcagcccttcaggcactggagatggaccggaaaagtgtagaagggaggccaatgtttgtttccccctgtgtggataagagcaaaaaccccgattttaaggtgttcaggtacagcacttccctagagaaacacaagctgttcatctcaggcctgcctttctcctgtactaaagaggaactagaagaaatctgtaaggctcatggcaccgtgaaggacctcaggctggtcaccaaccgggctggcaaaccaaagggcctggcctacgtggagtatgaaaatgaatcccaggcgtcgcaggctgtgatgaagatggacggcatgactatcaaagagaacatcatcaaagtggcaatcagcaaccctcctcagaggaaagttccagagaagccggagaccaggaaggcaccaggtggccccatgcttttgccgcagacatacggagcgagggggaagggaaggacgcagctgtctctactgcctcgtgccctgcagcgcccaagtgctgcagctcctcaggctgagaacggccctgccgcggctcctgcagttgccgccccagcagccaccgaggcacccaagatgtccaatgccgattttgccaagctgtttctgagaaagtgaacgggacgctgggagacaggaaatgccttacttcactctggcccggcggacctcccaccacccagcagtgcactggggatggacaggcctggtgtgctgcgtgctcgcaaccacagatggctcctcggctttagacagaaaggggaaggggttctaagtcaagagcctttcagtgctccctcatattgagggcagtggcagaaaagtgaccactctgcaggctgggcccaggatgtggtgtcctgagatagttttgtatcttaaagactgaggcacagaagcgaaacgagaacacactgtttttgagacacagttgtccaaatgtttctggccagctccggcccctttttgtatgacacttctcttccaccctgcacagcacatgtgcccgtcattcttttaattttaaaagatgaaatggcagatgctagtaattcacagaatggcctcttgtgggggtgggtctgagggaagtcagctataaaacatttgctggagttttgttcaatggggctgtgcatttttatattatgtgtttgtaaatgacatgtcagccattgtttcatgtttcctaaaagcagaatatttgcaacatttgttttgtataggaattatttgtgccacctgctgtggactgttttctttgcctagtgactagtgacctgtgttgtctaaacatgagtttcagccctttggttttgtttaataccatgtcaaatgcaaacttcaattctccccatttagctttattaaactgacgttctcttcaaaacttcttgctgaatggtactcagatgtgcattcacatacagatgtgttttgaagtgggtgtaccttgctttacctaatagatgtgtaaatagaacttttgtaagtc

SEQ ID NO: 186236 - DNA, 2834 bp, Homo sapiens
  Payload ID: 16675
  Gene Symbol: SART3
  Gene Name: squamous cell carcinoma antigen recognized by T cells 3
  Uniprot ID: Q15020
  ENST ID: ENST00000431469
  CDS Start-End: 6-2789
gcaagatggcgactgcggccgaaacctcggcttcagaacccgaggctgagtccaaggctgggcccaaggctgacggagaggaggatgaggttaaggcggctaggacaaggaggaaggtgttatcgcgggctgtggccgctgcgacatacaagaccatggggccagcgtgggatcagcaggaggaaggcgtgagcgagagcgatggggatgagtacgccatggcttcctccgcggagagctcccccggggagtacgagtgggaatatgacgaagaggaggagaaaaaccagctggagattgagagactggaggagcagttgtctatcaacgtctatgactacaactgccatgtggacttgatcagactgctcaggctggaaggggagcttaccaaggtgaggatggcccgccagaagatgagtgaaatctttcccttgactgaagagctctggctggagtggctgcatgacgagatcagcatggcccaggatggcctggacagagagcacgtgtatgacctctttgagaaagccgtgaaggattacatttgtcctaacatttggctagagtatggccagtactcagttggtgggattggtcagaaaggtggccttgagaaagttcgctccgtgtttgaaagggctctctcgtctgttggtttacatatgaccaaaggactcgccctctgggaggcttaccgagagtttgaaagtgcgattgtggaagctgctcggcttgagaaagtccacagtcttttccggcgacagttggcgatcccactctatgatatggaggccacatttgcagagtatgaagaatggtcagaagacccaataccagagtcagtaattcagaactataacaaagcactacagcagctggagaaatataaaccctatgaagaagcactgttgcaggcagaggcaccaaggctggcagaatatcaagcatatatcgattttgagatgaaaattggcgatcctgctcgcattcagttgatctttgagcgcgccctggtcgagaactgccttgtcccagacttatggatccgttacagtcagtacctagatcgacaactgaaagtaaaggatttggttttatctgtacataaccgcgctattagaaactgcccctggacagttgccttatggagtcggtacctcttggccatggagagacatggagttgatcatcaagtaatttctgactccagtaaagagctggaggagttgagggccgcctttactcgtgccttggagtatctgaagcaggaggtggaagagcgtttcaatgagagtggtgatccaagctgcgtgattatgcagaactgggctaggattgaggctcgactgtgcaataacatgcagaaagctcgggaactctgggatagcatcatgaccagaggaaatgccaagtacgccaacatgtggctagagtattacaacctggaaagagctcatggtgacacccagcactgccggaaggctctgcaccgggccgtccagtgcaccagtgactacccagagcacgtctgcgaagtgttactcaccatggagaggacagaaggttctttagaagattgggatatagctgttcagaaaactgaaacccgattagctcgtgtcaatgagcagagaatgaaggctgcagagaaggaagcagcccttgtgcagcaagaagaagaaaaggctgaacaacggaaaagagctcgggctgagaagaaagcgttaaaaaagaagaaaaagatcagaggcccagagaagcgcggagcagatgaggatgatgagaaagagtggggcgatgatgaagaagagcagccttccaaacgcagaagggtcgagaacagcatccctgcagctggagaaacacaaaatgtagaagtagcagcagggcccgctgggaaatgtgctgccgtagatgtggagcccccttcgaagcagaaggagaaggcagcctccctgaagagggacatgcccaaggtgctgcacgacagcagcaaggacagcatcaccgtctttgtcagcaacctgccctacagcatgcaggagccggacacgaagctcaggccactcttcgaggcctgtggggaggtggtccagatccgacccatcttcagcaaccgtggggatttccgaggttactgctacgtggagtttaaagaagagaaatcagcccttcaggcactggagatggaccggaaaagtgtagaagggaggccaatgtttgtttccccctgtgtggataagagcaaaaaccccgattttaaggtgttcaggtacagcacttccctagagaaacacaagctgttcatctcaggcctgcctttctcctgtactaaagaggaactagaagaaatctgtaaggctcatggcaccgtgaaggacctcaggctggtcaccaaccgggctggcaaaccaaagggcctggcctacgtggagtatgaaaatgaatcccaggcgtcgcaggctgtgatgaagatggacggcatgactatcaaagagaacatcatcaaagtggcaatcagcaaccctcctcagaggaaagttccagagaagccggagaccaggaaggcaccaggtggccccatgcttttgccgcagacatacggagcgagggggaagggaaggacgcagctgtctctactgcctcgtgccctgcagcgcccaagtgctgcagctcctcaggctgagaacggccctgccgcggctcctgcagttgccgccccagcagccaccgaggcacccaagatgtccaatgccgattttgccaagctgtttctgagaaagtgaacgggacgctgggagacaggaaatgccttacttcactctggcccg

SEQ ID NO: 186237 - DNA, 1935 bp, Homo sapiens
  Payload ID: 16675
  Gene Symbol: SART3
  Gene Name: squamous cell carcinoma antigen recognized by T cells 3
  ENST ID: ENST00000547528
  CDS Start-End: 7-924
cgcaagatggcgactgcggccgaaacctcggcttcagaacccgaggctgagtccaaggctgggcccaaggctgacggagaggaggatgaggttaaggcggctaggacaaggaggaaggtgttatcgcgggctgtggccgctgcgacatacaagaccatggggccagcgtgggatcagcaggaggaaggcgtgagcgagagcgatggggatgagtacgccatggcttcctccgcggagagctcccccggggagtacgagtgggaatatgacgaagaggaggagaaaaaccagctggagattgagagactggaggagcagttgtctatcaacgtctatgactacaactgccatgtggacttgatcagactgctcaggctggaaggggagcttaccaaggtgaggatggcccgccagaagatgagtgaaatctttcccttgactgaagagctctggctggagtggctgcatgacgagatcagcatggcccaggatggcctggacagagagcacgtgtatgacctctttgagaaagccgtgaaggattacatttgtcctaacatttggctagagtatggccagtactcagttggtgggattggtcagaaaggtggccttgagaaagttcgctccgtgtttgaaagggctctctcgtctgttggtttacatatgaccaaaggactcgccctctgggaggcttaccgagagtttgaaagtgcgattgtggaagctgctcggcttgagaaagtccacagtcttttccggcgacagttggcgatcccactctatgatatggaggccacatttgcagagtatgaagaatggtcagaagacccaataccagagtcagtaattcagaactataacaaagcactacagcagctggagaaatataaaccctatgaagaagcactggttaagaaatagaacattgccagtaccttagaagtctcctatgtgcccctctccgattgcctcctcctccctctcccgagagttgcaggcagaggcaccaaggctggcagaatatcaagcatatatcgattttgagatgaaaattggcgatcctgctcgcattcagttgatctttgagcgcgccctggtcgagaactgccttgtcccagacttatggatccgttacagtcagtacctagatcgacaactgaaagtaaaggatttggttttatctgtacataaccgcgctattagaaactgcccctggacagttgccttatggagtcggtacctcttggccatggagagacatggagttgatcatcaagtaatttctgtaaccttcgagaaagctttgaatgccggcttcatccaggccactgattatgtggagatttggcaggcataccttgattacctgaggagaagggttgatttcaaacaagactccagtaaagagctggaggagttgagggccgcctttactcgtgccttggagtatctgaagcaggaggtggaagagcgtttcaatgagagtggtgatccaagctgcgtgattatgcagaactgggctaggattgaggctcgactgtgcaataacatgcagaaagctcgggaactctgggatagcatcatgaccagaggaaatgccaagtacgccaacatgtggctagagtattacaacctggaaagagctcatggtgacacccagcactgccggaaggctctgcaccgggccgtccagtgcaccagtgactacccagagcacgtctgcgaagtgttactcaccatggagaggacagaaggttctttagaagattgggatatagctgttcagaaaactgaaacccgattagctcgtgtcaatgagcagagaatgaaggctgcagagaaggaagcagcccttgtgcagcaagaagaagaaaaggctgaacaacggaaaagagctcgggctgagaagaaagcgttaaaaaagaagaaaaa

SEQ ID NO: 186238 - DNA, 582 bp, Homo sapiens
  Payload ID: 16675
  Gene Symbol: SART3
  Gene Name: squamous cell carcinoma antigen recognized by T cells 3
  ENST ID: ENST00000550322
  CDS Start-End: 114-582
agatagcacgtttattttgtttgtggcagttgtctatcaacgtctatgactacaactgccatgtggacttgatcagactgctcaggctggaaggggagcttaccaaggtgaggatggcccgccagaagatgagtgaaatctttcccttgactgaagagctctggctggagtggctgcatgacgagatcagcatggcccaggatggcctggacagagagcacgtgtatgacctctttgagaaagccgtgaaggattacatttgtcctaacatttggctagagtatggccagtactcagttggtgggattggtcagaaaggtggccttgagaaagttcgctccgtgtttgaaagggctctctcgtctgttggtttacatatgaccaaaggactcgccctctgggaggcttaccgagagtttgaaagtgcgattgtggaagctgctcggcttgagaaagtccacagtcttttccggcgacagttggcgatcccactctatgatatggaggccacatttgcagagtatgaagaatggtcagaagacccaataccagagtcagtaattcagaactataacaaagcac

SEQ ID NO: 186239 - DNA, 878 bp, Homo sapiens
  Payload ID: 16675
  Gene Symbol: SART3
  Gene Name: squamous cell carcinoma antigen recognized by T cells 3
  ENST ID: ENST00000547397
  CDS Start-End: 1-435
gcactggagatggaccggaaaagtgtagaagggaggccaatgtttgtttccccctgtgtggataagagcaaaaaccccgattttaaggtgttcaggtacagcacttccctagagaaacacaagctgttcatctcaggcctgcctttctcctgtactaaagaggaactagaagaaatctgtaaggctcatggcaccgtgaaggacctcaggctggtcaccaaccgggctggcaaaccaaagggcctggcctacgtggagtatgaaaatgaatcccaggcgtcgcaggctgtgatgaagatggacggcatgactatcaaagagaacatcatcaaagtggcaatcagcaaccctcctcagaggaaagttccagagaagccggagaccaggaaggcaccaggtggccccatgcttttgccgcagacatacggagcgtaagtgcttgcatggtagactagtgcaaacttcgtcctggctggcaccagttcatggatcacggggggattaacccgggatgaattagcttcctgttaggacagaaaagccaagatgtgctgttccttgtggtaatcactgtggttccactggagcaaggcgtccagagcaggatgcaagcctaggcagtgacctctgcctggtactggccaatttacacttgtcatttatttcagacagaaataaggcagtgattattttaaagtcccctttgccagttggatctgtgtgtttacaaagaaatctcatacccatgtgtgtgccagtctacggccctagctatgatccacataagctgtgctgttcgctggtttgggatgaggaggagatagcagaattgccaggtgactggtgaggtctgagaggtgatagtcacactgatcccc

SEQ ID NO: 186240 - DNA, 1184 bp, Homo sapiens
  Payload ID: 16675
  Gene Symbol: SART3
  Gene Name: squamous cell carcinoma antigen recognized by T cells 3
  Uniprot ID: Q15020
  ENST ID: ENST00000546611
  CDS Start-End: 247-636
cttctgtccgaagttgtgacggaacgcatgccattataatgagtttttatatctggtgggagcttttacagggtataaaataatgtgaatttagtgtatgtggagattttcctgttatctaagttcccagtttctctttcaatggcaagaaaacgggtttttgataaggcgcgcgccgcgggcagcttctgcctcagcgggtcttcggcggccgcgggaagacccgagagtcattagaagcgcaagatggcgactgcggccgaaacctcggcttcagaacccgaggctgagtccaaggctgggcccaaggctgacggagaggaggatgaggttaaggcggctaggacaaggaggaaggtgttatcgcgggctgtggccgctgcgacatacaagaccatggggccagcgtgggatcagcaggaggaaggcgtgagcgagagcgatggggatgagtacgccatggcttcctccgcggagagctcccccggggagtacgagtgggaatatgacgaagaggaggagaaaaaccagctggagattgagagactggaggagcaggtgggcccgggggtgggcagcgggcatcttccagtctttcaggtcctcgggtccccatgtcctggcccgcctccctagtcctcggcggcgataaagccgccaaggctgcaaacccgcttttcgtgacagtagctcctgtcggatttgagtgcttactgcctgcccattgccttgcaaacgttatctcattgaatcctcgccacgaccctgtgaaggaagccctgttatctatccccattttactggaggaaactgaggctcgtggaggaaagtttcttgctcaagataacacttcctgcaagtcaggccttgtactttgatcccattccagaactcccactcttaaccacacgtccaacagtagaaataaactcattcgcaagagagtgttattttgttatgtaggaatgacggcgatgatgaaacttgtggtaagaaaaatattgaccgcgatggtgataatagaaatggaaaggtttctggttctggaggttaaggcctcagttctagctgttcaactcttgtatgtgcttgtaagaatttcttaatttctctcaccctctcgacttccttatctgcagattgggagcaacaatttctgcataatataattgttgtaacagtaa

SEQ ID NO: 186241 - DNA, 2318 bp, Homo sapiens
  Payload ID: 16675
  Gene Symbol: SART3
  Gene Name: squamous cell carcinoma antigen recognized by T cells 3
  ENST ID: ENST00000546815
  CDS Start-End: 6-2318
gcaagatggcgactgcggccgaaacctcggcttcagaacccgaggctgagtccaaggctgggcccaaggctgacggagaggaggatgaggttaaggcggctaggacaaggaggaaggtgttatcgcgggctgtggccgctgcgacatacaagaccatggggccagcgtgggatcagcaggaggaaggcgtgagcgagagcgatggggatgagtacgccatggcttcctccgcggagagctcccccggggagtacgagtgggaatatgacgaagaggaggagaaaaaccagctggagattgagagactggaggagcagttgtctatcaacgtctatgactacaactgccatgtggacttgatcagactgctcaggctggaaggggagcttaccaaggtgaggatggcccgccagaagatgagtgaaatctttcccttgactgaagagctctggctggagtggctgcatgacgagatcagcatggcccaggatggcctggacagagagcacgtgtatgacctctttgagaaagccgtgaaggattacatttgtcctaacatttggctagagtatggccagtactcagttggtgggattggtcagaaaggtggccttgagaaagttcgctccgtgtttgaaagggctctctcgtctgttggtttacatatgaccaaaggactcgccctctgggaggcttaccgagagtttgaaagtgcgattgtggaagctgctcggcccgtagctggcttcctttccccttttgaccgggaacaaacctttgattcacagcttgagaaagtccacagtcttttccggcgacagttggcgatcccactctatgatatggaggccacatttgcagagtatgaagaatggtcagaagacccaataccagagtcagtaattcagaactataacaaagcactacagcagctggagaaatataaaccctatgaagaagcactgttgcaggcagaggcaccaaggctggcagaatatcaagcatatatcgattttgagatgaaaattggcgatcctgctcgcattcagttgatctttgagcgcgccctggtcgagaactgccttgtcccagacttatggatccgttacagtcagtacctagatcgacaactgaaagtaaaggatttggttttatctgtacataaccgcgctattagaaactgcccctggacagttgccttatggagtcggtacctcttggccatggagagacatggagttgatcatcaagtaatttctgtaaccttcgagaaagctttgaatgccggcttcatccaggccactgattatgtggagatttggcaggcataccttgattacctgaggagaagggttgatttcaaacaagactccagtaaagagctggaggagttgagggccgcctttactcgtgccttggagtatctgaagcaggaggtggaagagcgtttcaatgagagtggtgatccaagctgcgtgattatgcagaactgggctaggattgaggctcgactgtgcaataacatgcagaaagctcgggaactctgggatagcatcatgaccagaggaaatgccaagtacgccaacatgtggctagagtattacaacctggaaagagctcatggtgacacccagcactgccggaaggctctgcaccgggccgtccagtgcaccagtgactacccagagcacgtctgcgaagtgttactcaccatggagaggacagaaggttctttagaagattgggatatagctgttcagaaaactgaaacccgattagctcgtgtcaatgagcagagaatgaaggctgcagagaaggaagcagcccttgtgcagcaagaagaagaaaaggctgaacaacggaaaagagctcgggctgagaagaaagcgttaaaaaagaagaaaaagatcagaggcccagagaagcgcggagcagatgaggatgatgagaaagagtggggcgatgatgaagaagagcagccttccaaacgcagaagggtcgagaacagcatccctgcagctggagaaacacaaaatgtagaagtagcagcagggcccgctgggaaatgtgctgccgtagatgtggagcccccttcgaagcagaaggagaaggcagcctccctgaagagggacatgcccaaggtgctgcacgacagcagcaaggacagcatcaccgtctttgtcagcaacctgccctacagcatgcaggagccggacacgaagctcaggccactcttcgaggcctgtggggaggtggtccagatccgacccatcttcagcaaccgtggggatttccgaggttactgctacgtggagttt

SEQ ID NO: 186242 - DNA, 548 bp, Homo sapiens
  Payload ID: 16675
  Gene Symbol: SART3
  Gene Name: squamous cell carcinoma antigen recognized by T cells 3
  ENST ID: ENST00000550619
  CDS Start-End: 216-548
gatggaaaacagcttgcagcatatagggggctacttaagaaagagtggcataggaggggggccgggggcgccctctgaggaagtgaagtttatacctgaagtatgaaaaggggtggctaggcagagagaagttgtctatcaacgtctatgactacaactgccatgtggacttgatcagactgctcaggctggaaggggagcttaccaaggtgaggatggcccgccagaagatgagtgaaatctttcccttgactgaagagctctggctggagtggctgcatgacgagatcagcatggcccaggatggcctggacagagagcacgtgtatgacctctttgagaaagccgtgaaggattacatttgtcctaacatttggctagagtatggccagtactcagttggtgggattggtcagaaaggtggccttgagaaagttcgctccgtgtttgaaagggctctctcgtctgttggtttacatatgaccaaaggactcgccctctgggaggcttaccgagagtttgaaagtgcgattgtggaagctgctcgg

SEQ ID NO: 186243 - DNA, 3637 bp, Homo sapiens
  Payload ID: 16675
  Gene Symbol: SART3
  Gene Name: squamous cell carcinoma antigen recognized by T cells 3
  Uniprot ID: Q15020
  ENST ID: ENST00000546728
  CDS Start-End: 8-1102
gcgcaagatggcgactgcggccgaaacctcggcttcagaacccgaggctgagtccaaggctgggcccaaggctgacggagaggaggatgaggttaaggcggctaggacaaggaggaaggtgttatcgcgggctgtggccgctgcgacatacaagaccatggggccagcgtgggatcagcaggaggaaggcgtgagcgagagcgatggggatgagtacgccatggcttcctccgcggagagctcccccggggagtacgagtgggaatatgacgaagaggaggagaaaaaccagctggagattgagagactggaggagcagttgtctatcaacgtctatgactacaactgccatgtggacttgatcagactgctcaggctggaaggggagcttaccaaggtgaggatggcccgccagaagatgagtgaaatctttcccttgactgaagagctctggctggagtggctgcatgacgagatcagcatggcccaggatggcctggacagagagcacgtgtatgacctctttgagaaagccgtgaaggattacatttgtcctaacatttggctagagtatggccagtactcagttggtgggattggtcagaaaggtggccttgagaaagttcgctccgtgtttgaaagggctctctcgtctgttggtttacatatgaccaaaggactcgccctctgggaggcttaccgagagtttgaaagtgcgattgtggaagctgctcggcttgagaaagtccacagtcttttccggcgacagttggcgatcccactctatgatatggaggccacatttgcagagtatgaagaatggtcagaagacccaataccagagtcagtaattcagaactataacaaagcactacagcagctggagaaatataaaccctatgaagaagcactgttgcaggcagaggcaccaaggctggcagaatatcaagcatatatcgattttgagatgaaaattggcgatcctgctcgcattcagttgatctttgagcgcgccctggtcgagaactgccttgtcccagacttatggatccgttacagatcgacaactgaaagtaaaggatttggttttatctgtacataaccgcgctattagaaactgcccctggacagttgccttatggagtcggtacctcttggccatggagagacatggagttgatcatcaagtaatttctgtaaccttcgagaaagctttgaatgccggcttcatccaggccactgattatgtggagatttggcaggcataccttgattacctgaggagaagggttgatttcaaacaagactccagtaaagagctggaggagttgagggccgcctttactcgtgccttggagtatctgaagcaggaggtggaagagcgtttcaatgagagtggtgatccaagctgcgtgattatgcagaactgggctaggattgaggctcgactgtgcaataacatgcagaaagctcgggaactctgggatagcatcatgaccagaggaaatgccaagtacgccaacatgtggctagagtattacaacctggaaagagctcatggtgacacccagcactgccggaaggctctgcaccgggccgtccagtgcaccagtgactacccagagcacgtctgcgaagtgttactcaccatggagaggacagaaggttctttagaagattgggatatagctgttcagaaaactgaaacccgattagctcgtgtcaatgagcagagaatgaaggctgcagagaaggaagcagcccttgtgcagcaagaagaagaaaaggctgaacaacggaaaagagctcgggctgagaagaaagcgttaaaaaagaagaaaaagatcagaggcccagagaagcgcggagcagatgaggatgatgagaaagagtggggcgatgatgaagaagagcagccttccaaacgcagaagggtcgagaacagcatccctgcagctggagaaacacaaaatgtagaagtagcagcagggcccgctgggaaatgtgctgccgtagatgtggagcccccttcgaagcagaaggagaaggcagcctccctgaagagggacatgcccaaggtgctgcacgacagcagcaaggacagcatcaccgtctttgtcagcaacctgccctacagcatgcaggagccggacacgaagctcaggccactcttcgaggcctgtggggaggtggtccagatccgacccatcttcagcaaccgtggggatttccgaggttactgctacgtggagtttaaagaagagaaatcagcccttcaggcactggagatggaccggaaaagtgtagaagggaggccaatgtttgtttccccctgtgtggataagagcaaaaaccccgattttaaggtgttcaggtacagcacttccctagagaaacacaagctgttcatctcaggcctgcctttctcctgtactaaagaggaactagaagaaatctgtaaggctcatggcaccgtgaaggacctcaggctggtcaccaaccgggctggcaaaccaaagggcctggcctacgtggagtatgaaaatgaatcccaggcgtcgcaggctgtgatgaagatggacggcatgactatcaaagagaacatcatcaaagtggcaatcagcaaccctcctcagaggaaagttccagagaagccggagaccaggaaggcaccaggtggccccatgcttttgccgcagacatacggagcgagggggaagggaaggacgcagctgtctctactgcctcgtgccctgcagcgcccaagtgctgcagctcctcaggctgagaacggccctgccgcggctcctgcagttgccgccccagcagccaccgaggcacccaagatgtccaatgccgattttgccaagctgtttctgagaaagtgaacgggacgctgggagacaggaaatgccttacttcactctggcccggcggacctcccaccacccagcagtgcactggggatggacaggcctggtgtgctgcgtgctcgcaaccacagatggctcctcggctttagacagaaaggggaaggggttctaagtcaagagcctttcagtgctccctcatattgagggcagtggcagaaaagtgaccactctgcaggctgggcccaggatgtggtgtcctgagatagttttgtatcttaaagactgaggcacagaagcgaaacgagaacacactgtttttgagacacagttgtccaaatgtttctggccagctccggcccctttttgtatgacacttctcttccaccctgcacagcacatgtgcccgtcattcttttaattttaaaagatgaaatggcagatgctagtaattcacagaatggcctcttgtgggggtgggtctgagggaagtcagctataaaacatttgctggagttttgttcaatggggctgtgcatttttatattatgtgtttgtaaatgacatgtcagccattgtttcatgtttcctaaaagcagaatatttgcaacatttgttttgtataggaattatttgtgccacctgctgtggactgttttctttgcctagtgactagtgacctgtgttgtctaaacatgagtttcagccctttggttttgtttaataccatgtcaaatgcaaacttcaattctccccatttagcttta

SEQ ID NO: 186244 - DNA, 394 bp, Homo sapiens
  Payload ID: 16676
  Gene Symbol: SLIRP
  Gene Name: SRA stem-loop interacting RNA binding protein
  Uniprot ID: Q9GZT3
  ENST ID: ENST00000238688
  CDS Start-End: 34-357
gacctcggctcgagaaggtgctttagtctgaagatggcggcctcagcagcgagaggtgctgcggcgctgcgtagaagtatcaatcagccggttgcttttgtgagaagaattccttggactgcggcgtcgagtcagctgaaagaacactttgcacagttcggccatgtcagaaggtgcattttaccttttgacaaggagactggctttcacagaggtttgggttgggttcagttttcttcagaagaaggacttcggaatgcactacaacaggaaaatcatattatagatggagtaaaggttcacactagaaggccaaaacttccgcaaacatctgatgatgaaaagaaagatttttgagactgcagcctattaataaagttaacataactgagaa

SEQ ID NO: 186245 - DNA, 285 bp, Homo sapiens
  Payload ID: 16676
  Gene Symbol: SLIRP
  Gene Name: SRA stem-loop interacting RNA binding protein
  ENST ID: ENST00000553981
  CDS Start-End: 1-171
gtgagaagaattccttggactgcggcgtcgagtcagctgaaagaacactttgcacagttcggccatgtcagaaggacaaggagactggctttcacagaggtttgggttgggttcagttttcttcagaagaaggacttcggaatgcactacaacaggaaaatcatattatagatggagtaaaggtccaggttcacactagaaggccaaaacttccgcaaacatctgatgatgaaaagaaagatttttgagactgcagcctattaataaagttaacataactgagaa

SEQ ID NO: 186246 - DNA, 729 bp, Homo sapiens
  Payload ID: 16676
  Gene Symbol: SLIRP
  Gene Name: SRA stem-loop interacting RNA binding protein
  ENST ID: ENST00000556831
  CDS Start-End: 1-290
cctcagcagcgagaggtgctgcggcgctgcgtagaagtatcaatcagccggttgcttttgtgagaagaattccttggactgcggcgtcgagtcagctgaaagaacactttgcacagttcggccatgtcagaaggtgcattttaccttttgacaaggagactggctttcacagaggtttgggttgggttcagttttcttcagaagaaggacttcggaatgcactacaacaggaaaatcatattatagatggagtaaaggtaaatttatttctatgccagatacatacatgatatacatgtaggtactatttaattatgtatcaattaaatagatcataaatgtggaatgatggggacttggagagatttgtaactgaagctgccttaatgcttgttaagaatggtggggtggaggctgggcacggtggctcacgcctgtaatcccagcactttgggaggccgaggcgggcggatcacaaggtcaggagatcgagaccatcctggctaacacggtgaaaccccgtctctactaaaaatacaaaaaattagcctggcaaggtggcgggcgcctgtagtcccagctactcgggaggctgaggcaggagaatggcgtgaaccccagggggtggagcctgcagtgagccgagattgcgccactgcactccagcctgggcgatagcgagactccatctcaaacaaacaaacaaacaaaacaacaacaaaaaaagaa

SEQ ID NO: 186247 - DNA, 725 bp, Homo sapiens
  Payload ID: 16676
  Gene Symbol: SLIRP
  Gene Name: SRA stem-loop interacting RNA binding protein
  ENST ID: ENST00000557431
  CDS Start-End: 10-384
agtctgaagatggcggcctcagcagcgagaggtgctgcggcgctgcgtagaagtatcaatcagccggttgcttttgtgagaagaattccttggactgcggcgtcgagtcagctgaaagaacactttgcacagttcggccatgtcagaaggtgcattttaccttttgacaaggagactggctttcacagaggtttgggttgggttcagttttcttcagaagaaggacttcggaatgcactacaacaggaaaatcatattatagatggagtaaaggaatccttgtttcgggacacccagtggacagcgaaaggagagagaccaccacaggcaaacggccggaaagccgcgcagtcgcagcccgcgcgcttcactccgcccaaataagccactaccgtcaccaaccccatctcgttcgcccgagccgcggacctgagggagcgctgtccgctccccgcaagatgctcacgcgaaaaacccactcttcagtgtctgagaccactccgcagctttcggcctcggtgagcgggtgaactaaacccgggaaaccgctgaaagaccccagcttcgactaggcctagtcgtagcggcggccagcgggagggcgtagccgtagtcttggcccacgtcattctgtgccccgggtcaggtcaccgcccggagggtatgggaagagaaatgaagaagactggtactcccagacccttccgtatcgaggaccccaatca

SEQ ID NO: 186248 - DNA, 408 bp, Homo sapiens
  Payload ID: 16676
  Gene Symbol: SLIRP
  Gene Name: SRA stem-loop interacting RNA binding protein
  Uniprot ID: Q9GZT3
  ENST ID: ENST00000557342
  CDS Start-End: 42-371
ggggccgcgacctcggctcgagaaggtgctttagtctgaagatggcggcctcagcagcgagaggtgctgcggcgctgcgtagaagtatcaatcagccggttgcttttgtgagaagaattccttggactgcggcgtcgagtcagctgaaagaacactttgcacagttcggccatgtcagaaggtgcattttaccttttgacaaggagactggctttcacagaggtttgggttgggttcagttttcttcagaagaaggacttcggaatgcactacaacaggaaaatcatattatagatggagtaaaggtccaggttcacactagaaggccaaaacttccgcaaacatctgatgatgaaaagaaagatttttgagactgcagcctattaataaagttaacataactgagaa

SEQ ID NO: 186249 - DNA, 471 bp, Homo sapiens
  Payload ID: 16676
  Gene Symbol: SLIRP
  Gene Name: SRA stem-loop interacting RNA binding protein
  ENST ID: ENST00000555890
  CDS Start-End: 1-121
ggcggcctcagcagcgagaggtgctgcggcgctgcgtagaagtatcaatcagccggttgcttttgtgagaagaattccttggactgcggcgtcgaggatcatagtccacatagcacagtaactggtatgaaaacactcgatatttgctgaggatggagactgcagccaactcaacaacttctctgtccatctcaccaccaagtctggtcagctgaaagaacactttgcacagttcggccatgtcagaaggtgcattttaccttttgacaaggagactggctttcacagaggtttgggttgggttcagttttcttcagaagaaggacttcggaatgcactacaacaggaaaatcatattatagatggagtaaaggtccaggttcacactagaaggccaaaacttccgcaaacatctgatgatgaaaagaaagatttttgagactgcagcctattaataaagttaacataact

SEQ ID NO: 186250 - DNA, 865 bp, Homo sapiens
  Payload ID: 16676
  Gene Symbol: SLIRP
  Gene Name: SRA stem-loop interacting RNA binding protein
  ENST ID: ENST00000557623
  CDS Start-End: 10-306
agtctgaagatggcggcctcagcagcgagaggtgctgcggcgctgcgtagaagtatcaatcagccggttgcttttgtgagaagaattccttggactgcggcgtcgagtcagctgaaagaacactttgcacagttcggccatgtcagaaggtgcattttaccttttgacaaggagactggctttcacagaggtttgggttgggttcagttttcttcagaagaaggacttcggaatgcactacaacaggaaaatcatattatagatggagtaaagtgtctcaaatctcagcccactataagaagttaaaatcagaactgtttcatcttgtctcaagtttcaacatacaacttccaatttttttgtcatcatgctggcatttacatccaaatgtaaagtatgttaattttcgtttccctgaggataggtattcacatcaacacacacaatatgctgttcctaaacttgtaccttggattggttgaagagcctttggtcatactgaacttcattggaagtccgaggattaggaacaccgagagcaataacttcactgatatcccgattttcatttctctgaagtttcgacctattttgaaatacgacatcactaactgaaaactctttatagacaagctgaatatgttcaatagaaatacaaccaatctcagaaacaaaggatgtgaatatgtcacattcacatcttgtgaacatatattccttgatgatacataatcaagctggcagcccttataaagcatttcagattagagggagagttttacaattaggacgtcctgttagctcaaaagaacatctaacagattcgttgacatggaattctttaatataagcaatcaccttacaa

SEQ ID NO: 186251 - DNA, 408 bp, Homo sapiens
  Payload ID: 16676
  Gene Symbol: SLIRP
  Gene Name: SRA stem-loop interacting RNA binding protein
  ENST ID: ENST00000556375
  CDS Start-End: 1-219
aatcagccggttgcttttgtgagaagaattccttggactgcggcgtcgagtcagctgaaagaacactttgcacagttcggccatgtcagaaggtgcattttaccttttgaatccttgtttcgggacacccagtggacagcgaaaggagagagaccaccacaggcaaacggccggaaagccgcgcagtcgcagcccgcgcgcttcactccgcccaaataagccactaccgtcaccaaccccatctcgttcgcccgagccgcggacctgagggagcgctgtccgctccccgcaagatgctcacgcgaaaaacccactcttcagtgtctgagaccactccgcagctttcggcctcggtgagcgggtgaactaaacccgggaaaccgctgaaagaccccagcttcgactagg

SEQ ID NO: 186252 - DNA, 626 bp, Homo sapiens
  Payload ID: 16676
  Gene Symbol: SLIRP
  Gene Name: SRA stem-loop interacting RNA binding protein
  ENST ID: ENST00000556310
  CDS Start-End: 1-231
aatcagccggttgcttttgtgagaagaattccttggactgcggcgtcgagtcagctgaaagaacactttgcacagttcggccatgtcagaaggtgcattttaccttttgacaaggagactggctttcacagaggtttgggttgggttcagttttcttcagaagaaggacttcggaatgcactacaacaggaaaatcatattatagatggagtaaagtccatggtctcataataaaatgaagcattatagaaccagctcaagataccatccagttacaaaataccaatcaactcaaatcagaccagtcggcaacctctttgtttagggaatccttgtttcgggacacccagtggacagcgaaaggagagagaccaccacaggcaaacggccggaaagccgcgcagtcgcagcccgcgcgcttcactccgcccaaataagccactaccgtcaccaaccccatctcgttcgcccgagccgcggacctgagggagcgctgtccgctccccgcaagatgctcacgcgaaaaacccactcttcagtgtctgagaccactccgcagctttcggcctcggtgagcgggtgaactaaacccgggaaaccgctgaaagaccccagcttcgactagg

SEQ ID NO: 186253 - DNA, 420 bp, Homo sapiens
  Payload ID: 16676
  Gene Symbol: SLIRP
  Gene Name: SRA stem-loop interacting RNA binding protein
  ENST ID: ENST00000613856
  CDS Start-End: 42-320
ggggccgcgacctcggctcgagaaggtgctttagtctgaagatggcggcctcagcagcgagaggtgctgcggcgctgcgtagaagtatcaatcagccggttgcttttgtgagaagaattccttggactgcggcgtcgagtcagctgaaagaacactttgcacagttcggccatgtcagaaggtgcattttaccttttgacaaggagactggctttcacagaggtttgggttgggttcagttttcttcagaagaaggacttcggaatgcactacaacaggaaaatcatattatagatggagtaaagtgcttatttttttaaggtccaggttcacactagaaggccaaaacttccgcaaacatctgatgatgaaaagaaagatttttgagactgcagcctattaataaagttaacataactg

SEQ ID NO: 186254 - DNA, 2783 bp, Homo sapiens
  Payload ID: 16677
  Gene Symbol: SHB
  Gene Name: Src homology 2 domain containing adaptor protein B
  Uniprot ID: Q15464
  ENST ID: ENST00000377707
  CDS Start-End: 567-2096
gccgccgggacgggcacgggcgcgcgggctccggcgggcgccggctgccttcctccgtcgctcgctgtctctcccggccgcattctcctccgctgcggggccgagctctccccagcgctcgcaggaaggaagaagggagccgaggacgccgagaagttcccgcggcagccgcggatcccggccaaggcggaggctgcggctccgacggggcaggagcgcgatccacggcgaggggcgtacggccaaagggtccgcggcgtggagcgctcggaccttccgctctcccccgggcgtgggccgggaccccatgagacgcgcccacgaggggcgcgagattcctagcttgggcggcgctaggcggagggaggtgttgcagccgccggagccagagagctgccggcaggaggcggcggcggcaagaacttgaacttggcgtcgggagcgggcgccccggacgccccccgccggggccggggcgccgagggacctgcgccgcagcgctgccccccgaatggccgcggcggcggaccgggctcccgcgccgcggccctaggcggcctctcgccatggccaagtggctaaacaagtacttcagcttgggcaacagcaagaccaagagccccccgcagccgccgcggccagactaccgcgagcagcggcgccgaggcgagcggccttcgcagcccccccaggccgtgccgcaggcctcctccgccgcctcggcgtcctgcggtccggccaccgcctcctgcttctcagcctcttcgggctcgctgcccgacgacagcggcagcaccagcgacctcatccgcgcctaccgcgcgcagaaggagcgagacttcgaggacccctacaacgggcctggctcgtcgctgcgcaaactgcgcgccatgtgccgcctggactactgcggcggcagcggggagccaggcggggtccagcgcgccttctcggcctcgtccgcgtcgggcgccgcgggctgttgctgcgcctcctcgggcgcgggggccgccgcgtcctcgtcctcgtcctccggctctccgcatctctaccgcagcagcagcgagcggcggcccgccacgccggccgaggtgcgctacatctcccccaagcaccgcctcatcaaagtggagagcgccgcgggcggtggggccggggaccccctggggggcgcctgcgcgggcggccgcacctggagcccgacggcctgcggaggcaagaaactgctcaacaagtgcgccgcctcagccgcggaggagagcggggccggcaagaaggacaaggtgaccatagccgatgactactcagatccctttgatgccaagaatgatctcaagagcaaagcaggaaagggggagagtgctggctacatggagccctatgaggcacagaggatcatgacagaatttcagaggcaggaaagtgtccggtcccagcataaaggtatccagttatatgacaccccttacgaacctgaaggccaaagtgttgactcagactcggagagcacagtcagcccccgactgcgggagagcaagctgccccaggatgacgacaggcccgccgatgagtacgaccagccttgggagtggaaccgggtcaccatcccagccctggcagcacagtttaatggcaacgagaagcggcagtcatccccctcaccttcgcgggaccggcggcgccagcttcgtgcccctggagggggctttaagcctatcaaacatgggagccctgagttctgcgggatcctaggagaaagggtggatcctgccgtccccctggagaagcaaatatggtatcacggagccatcagcagaggagacgccgagaacctgctgcgactctgcaaggagtgtagctaccttgtccggaacagccagaccagcaagcatgactactccctctccctgaggagcaaccagggttttatgcacatgaaactggccaaaaccaaagagaaatacgttctgggtcagaacagccctccgttcgacagtgtcccggaagtcatccactactacaccaccagaaagctacccatcaaaggggctgagcacttgtccctcctctatcccgtggctgtgaggaccctgtgagcggaccagacctgccctgctctgtgacagagcctgagacttggaggtgccagaggccccccaccaaccagcccagccactgttgctggctgtgtcgtttgtgttgtgtgtatggtactagcacaccactgcatgtctctagaatgctgttgccacttacgggggctggagaaggcctggataaagacagaagggcggcaacacaccaccccagcccccacccccaccctctccttgagtttctgtgaattaaaatatttgcaaatccaaagagatgccttccaggatgaacaaaggcagaccagctccgaggggcggggtagggtggggcgggagctccctggctgacatctctttgttctccagctgtctcaaattcacacctctgtacagggcaaagttttcccacaggagcccccctactgatgctgggagccaaatgctggtgctttgagagtcccggaggccccggggttcccgccccgctggtgtgtatatgtgtgtctgtgtgagtgtgtgtgtgagtacagatgtgagaaggtggtcacacacagatgggtaagcccactgatctacttgtagtcactcagtgtaatcattaggctatcttcaaggaatcattgtgcagtcaaaaagaggattcaattatttatgaatagggtgtgtaaataaaatagtcatttaata

SEQ ID NO: 186255 - DNA, 6243 bp, Homo sapiens
  Payload ID: 16678
  Gene Symbol: SHE
  Gene Name: Src homology 2 domain containing E
  Uniprot ID: Q5VZ18
  ENST ID: ENST00000304760
  CDS Start-End: 88-1575
gccgggcgtgggcgacggccggccgggggcgcacggagcagccgtcgcggggcctcgccgcggcctccagcgccccagtcacggggaatgcagtggtccccgacccctggcgcctctgcgtgtctgggctgggcttcctcgctcgcctgctccacggccccgacgctcctgggccgagccggccggggccccctcatggcggccaagtggttcaaggagttccccctgaacctgaagaccgtgtcggagcgggccaagcccgggggcggcggcggcaaattgcgcaagaactcggaggcgggcggcgctgggccgggtcctggcaagggccgcaagaactcggcggccgagctggggagcggcagggccggcgtcggccccaaggacagccggctgtcccgcgacagcctgcagggtctgattcaggccgccgcgggcaagggccgcaaaaactcccgggccacggaggaggagccccaccggggtgcaaccaagagctcgggctgcagcacctacatcaacaggctcatcaaggtggacactcaggagaagaacgggaagagcaactaccccagcagcagtagctccagctccagctcctcttcctccgcgtcctcttccccttcctccctggggcccgagctggacaagggcaagattattaagcagcaagagacggtcatcattttagaagactatgctgacccttatgatgccaaacggacaaagggtcaaagggatgcagagagagtcggagagaacgacggttacatggaaccatatgatgcacagcaaatgataacagaaattagacgacggggttccaaagatcccctggtgaaggctctccagctgcttgacagtccctgtgaacccgcagacggtggcctgaaatcagagaccttggccaaaagacggagttccaaggacctcctggggaagccgccacagctatacgacactccctacgagcctgcagaaggggggcccagggcagaggggaaggcgcggcccccagacagccggctgcccgagaacgacgagaggcccgcggcagagtacgagcagccatgggagtggaagaaggagcagatcgtgcgggctctgtcagtccagtttgaaggagctgagcgaccttccttcagggaggagacagtgaggcagcaccaccggcagaagagctggacccagaagatcctgaagccagccctctcggaccacagtgagggagagaaagtggacccgggcctgcccctggagaagcagccctggtatcatggtgccatcagccgtgctgaggctgagagtcgactacagccctgcaaagaagctggttacctggttcgaaatagtgagtcagggaacagcaggtactccattgccctaaagactagtcaaggatgtgtccacatcatagtggctcagaccaaagacaacaaatacacactgaatcagacaagcgctgtgtttgacagcatccctgaagtggtacactattattccaatgaaaagttgcctttcaaaggggcagaacacatgactttactctacccagtgcacagcaagcttcactaagattcagccactgcaagccctgggcctctggcaccttcaagggcatcatcagcgcacaaccagcatctcagaggacaaggctggactagcaactgctagaaaatgggagtcttccttgaaaagtcagagagtgatttgttttgttttgtttgagacgaagtctcgctgtgttgcccaggctggagtgcaatggcgcaatcttggctcactgcaacatctgactcctgggttcaagcagttcttccccatcagcctcccaagtaggtgggactataggttcgcaccaccactcccagctaatttttttttttgtatttttagtagagatggggtttcgccgtcttcgtcaggctggtctcaaactcctgacctcaaatgatccacccacctcagtctccccgagtgcctggattacaggcatgagccactgcacccggccaagtctttggtcttaaagtgattccatgacactttgtttgtggcctgtcccttgtttccttgctaagtagttctacaataagaaatcatgatttagctgttgcctccagctctggggtagggtgttctttttatggtgtgaccctcaggaaggttaagtcaggagttcaggagcatcagagttctctagaaatgtgcctacttgttacctggaatacctggtctctaaacaaaccaacaaaaaatccacgtggcttttccacatgatggtgcagactggaagaggatgttatattggactcgttattggggaaatgaatgagcgggagaaaatgtgaatgacgggcaagaaggtggtctttctccctcagaagtcctaattcagctctggagttcatggaaatccgcaacttcagagtgtggcctaaggattattttgttggtcagcctttccaagaaagtgtgtgttctctcaatctctgtggattttctcattttttagcaaatcagtgagataagcataaataggaaggaagataccccaggtttaagaatcaccaatatcattaggcattggcatcattattagaattctgaattatagaataaaaggtacaacaaaaatttcatttctgaattttaaaattctggaaatttgcaaagctccacaactgtttttttactgaattaattacatagaacttcgatgtcttttgtttcatcatcattgggcattttagttgctatggaataatttttaatttttgtctctaaaattagatttgctttgtagtaaattttttaaaaatgcaaccctaagatctgattatatgaactgggtctctaaagcctacaaagattctctcgttctgtaccaagcagactgccttgtactatacagaagtgtttgaaaagacctagaggttttctcttaaataccattacttaagattcatagtattaggatctttatgatttatcatgagcttatatcaccagtttatttactgtgaaaaaaaccatgggaatggcatactgtgagaagagtactatggtgaatggctccagaattaaaattcagcagatgtgtctgtattctggggttggtcatttgggtctcaaaactgccccatatgcaaatgtactgactgtcatcaatgaaaagttaacctttgtagcttataaatacacacaaaatgttgatttggttaattttttaggaaagtatacctttgtagttactagttacatttgactgtaagatttagaggttagtaaatttttgcttctttattcagataagatctcagccaaaaggttgtgtgatctttgattttaaaaatttaagaggaacttttcctcactggaacacaatgattttattaataaagaatgtaggctgggtgcggtggctcatgcacgtaatcccaacaatttgggaggctgaggcaggcagatcacgtgaggtcaggagtttgagaccagcctggccaacatggtgaaaccctgtctgtagtaaaaatacaaaaattagctgggcacggtggcgggcacctgtagttccagctgcttgggaggctgaggcacgagaatcacttgagcccaggaggtggaggttgcagtgagccaagattatgtcactgcactccatcctgggtgacaagagcgaaactccatctcaaaaaaaaaaaaaaaaaaaagcctggcctggtggtggatgcctgtggttccagctattcgggaggctgaggtaggtggatcacctctgctcaggtcaaggctgcagcgagccatgatcgcaccattgcactccagcctgagtgacagagtgagaccctgtctcaacaagcaagcaaacaaaaaaccaaaaggaatgtttttttcagatactgatagaatgttttcagtgtgtattggttcatttactatatctttagtgtaagattttaaaaggttttttcagcatccattcaacaaatatttattatctttatacaaattattcattgtgttaaacttatttttagtttaacattctagaaatgaaacgtttttacttaaccttattctacaaagggaatacagcagttattctaattttaataaatgctaaaagctttatacaatttttctttgtgcactaaatgatttttggcccatacccagcaactgtgatgaatgtataatgaaataacatcttgaaaacaggccagatacattaagtatttattgagcttctgtcatatgcccagtattatgcttcttctatactgtttctctgtgacaagtcatactatattctttatagaattaaaagtagaggagaggcagagtttacatattgtccagttgctttacagttgtacaggaggttataagaagaaatatagtaaattagtgggaagtcagaggtgggggcgttagtgagctattttcttcttgaggttgtgacacaagctgacaaaagccagggagttcacagctgtgtggtggcacaaagttccatatgttctaaaaacaattaggcccagcagggtgtccctaatggcttccttgttaaacctccatggccagctgatctgaagctctgtgacatgttctctgagctctgaatgctctggctttttgtcattttgtcttgagacaagtattttcctgtagtcctcattccttcgagttattccatctcccaggatattctctggtgagaagaatgtctttcagtgaatttgccttgaatttagcatccatagagctgtgtcagtgttcttcttgatcacaccttctttaaaaaaaatacttgcttgcgatgactggacaagttcagttggttagtttcaggcctataagaagagagagtaaaggaccttgctatttactttgataccatagttgtatctcaggatggcctgcaaaccactggccttgtgtgtatttaagctaggaataaaataatggagaagtgttaatatgtatacaaaaaggtaaatattgatatatctactctctgttgggggcagaagtgtcattttaagttattcaaagcactttcttaagcattttagaaagcctttattctttgctgttggaagtctccgtactttgcagaattggtatttgtgtactagcctctgccgcaggatggggaggtgggcaggtagctgataggggcagccaggagtttttgaggcaggtggtgggaaattgtcctaatttgttaattggattatgtaactctgttactagtctgttattggctgttgttactggatgcatcttgatattcagaagaataactgtgaggcattcttcagttgcgggttaagtggggttagtttctgttctgtcagatgccctttttcagtcaaaggttagccccttgtttctccctccttccagggtttagggagtgcagtgatgtcgatttcatttcccttccccgcaccccttgacactcagcaggattgcactgaaacccttcacagatctctcgttcactagttgtctcctatttttccataactagcactagtttggccttatgacctggttagaatcactcttctgtattctcatttccaatttttgtgccccactaacgtggactagagaaacttggcctgctgtgcagtgggccttctgttcaacttaccctccaccgctgaccctgtgtgaagagagatggtgcgttactgccatctaatgggaaaagagaaaactgcagttgggaaaagcagctgtgcatttaagggtagggctttctgaaggatttctgatacagtccagaaaagggaaaatgatgacacagcagttgccatcttgaaaaatgccctttcctgcggaaagggtgttttgaagtctaatacaactatcatcacaaggtccctggactaaggctggatcgtgtaatttagaatctcaaattgtattttaattaatatgctggcaacagaatcattgaaacaggcgtctcattttgtcaagttcttagccgttcagtttgtcaggggctttaatattttagatatcaactaatacatagtttcaacttttaaaaatgtttgaagattgtatgtaatataggtgtctatctatagtgccttagtaatttaaatcagaaatattttataaaacttctggttgttttgcagtagccaatataggcttcatgccctcctgaagatagtttcctctgaaatgtaactttaaataaacattattccaagaaaa

SEQ ID NO: 186256 - DNA, 6855 bp, Homo sapiens
  Payload ID: 16678
  Gene Symbol: SHE
  Gene Name: Src homology 2 domain containing E
  ENST ID: ENST00000555188
  CDS Start-End: 1-397
agaggggaaggcgcggcccccagacagccggctgcccgagaacgacgagaggcccgcggcagagtacgagcagccatgggagtggaagaaggagcagatcgtgcgggctctgtcagtccagtttgaaggagctgagcgaccttccttcagggaggagacagtgaggcagcaccaccggcagaagagctggacccagaagatcctgaagccagccctctcggaccacagtgagggagagaaagtggacccgggcctgcccctggagaagcagccctggtatcatggtgccatcagccgtgctgaggctgagagtcgactacagccctgcaaagaagctggttacctggttcgaaatagtgagtcagggaacagcaggtactccattgccctaaagtaagtaagccccatggctttcctcatctccaaggggaaggaacactgtgtgacagtcttctagtcaaaaaaaacatactgtgaaggtgtttcacaggggtgtgcattgcagaaaataagaggcatttgtttggacaatggaacatgagacacttggatgagaatgcaaaattggtattgggtaaatgcctccattatctattatgataatgaaggtcttattgcattatctttgtgcattagtcaatgtctaccttacattacctaatctggagtaggccctctcagtagagaaataattcctgatgaaaagaattatttctaacagggtagtacagtcattcttcttttattccctagtattggggactttaataaatcaagatccccctgattgtcaaaatgccaactgcaattttgacaccagtttcttctggtgaagaaggaaatgctgacttgcctgttgctccctctgtctgattgtacacagaaaattcacttttgcctggtaggcctggtggagtgtgtatcatggaaattctcactgctccgtgagttcagtgtccctgtattggaggatcattgtcaagagccctaacagcatttccttcctgaggaagctgagcccctgcagctgaaacaatcaggctggaggagaacagagtcgggcgggggagttgagcaatatggctcagaaaatgggataggccaccagatatacaataccaggaatagctcgactgtgttcctgaaattggtgcttgtggattaaatctttgagcttttggtgccagctttcattttatacaaccaggaatggtctttccagatgcgaggggaggaaatggtttttattattattatttatgtgttctttttggaaaaaaagaagaagaacccttacttacgtccttttagctgtggtgaggaggatgagtttttttggggtttcttttctttttctttttttttttttttgagatggagtctcactctgttgcctaggctagagttcagtggcataatctcggctcactacaaccttcgcctcctgggttcaagtgattctcctgcctcagcctcccaagtagctgggattacaggtgcctgccaccatgcccggctaatttttttgtattttttagtagagatggggttttaccatgttggccaggctggtcttgaactcctgacctcaagtgatccgcccacttcggcctcccacagtgctgggatacaggcgtgagccaccgtgcccagccgaggatgagtttctacctcaccttagtagcctcgtgcttgggcgtaagcactggttttgcaatttgagagctagaagggacttggcattctttttaattgttttctttgttccactacctgatgactcatatgtgataaggataaaccactcaaggattacatgcgtttagactgtgaaatttctgagagtaccactagagtgtggaatgcatttctgtgtgtgtagaaccattacgggatggatgagaacctatcaacctagtgtgaatctggctgcaattgttttcagtggggagggatcctctgcccactcattcatgtctcctccttgattttcattccaggactagtcaaggatgtgtccacatcatagtggctcagaccaaagacaacaaatacacactgaatcagacaagcgctgtgtttgacagcatccctgaagtggtacactattattccaatgaaaagttgcctttcaaaggggcagaacacatgactttactctacccagtgcacagcaagcttcactaagattcagccactgcaagccctgggcctctggcaccttcaagggcatcatcagcgcacaaccagcatctcagaggacaaggctggactagcaactgctagaaaatgggagtcttccttgaaaagtcagagagtgatttgttttgttttgtttgagacgaagtctcgctgtgttgcccaggctggagtgcaatggcgcaatcttggctcactgcaacatctgactcctgggttcaagcagttcttccccatcagcctcccaagtaggtgggactataggttcgcaccaccactcccagctaatttttttttttgtatttttagtagagatggggtttcgccgtcttcgtcaggctggtctcaaactcctgacctcaaatgatccacccacctcagtctccccgagtgcctggattacaggcatgagccactgcacccggccaagtctttggtcttaaagtgattccatgacactttgtttgtggcctgtcccttgtttccttgctaagtagttctacaataagaaatcatgatttagctgttgcctccagctctggggtagggtgttctttttatggtgtgaccctcaggaaggttaagtcaggagttcaggagcatcagagttctctagaaatgtgcctacttgttacctggaatacctggtctctaaacaaaccaacaaaaaatccacgtggcttttccacatgatggtgcagactggaagaggatgttatattggactcgttattggggaaatgaatgagcgggagaaaatgtgaatgacgggcaagaaggtggtctttctccctcagaagtcctaattcagctctggagttcatggaaatccgcaacttcagagtgtggcctaaggattattttgttggtcagcctttccaagaaagtgtgtgttctctcaatctctgtggattttctcattttttagcaaatcagtgagataagcataaataggaaggaagataccccaggtttaagaatcaccaatatcattaggcattggcatcattattagaattctgaattatagaataaaaggtacaacaaaaatttcatttctgaattttaaaattctggaaatttgcaaagctccacaactgtttttttactgaattaattacatagaacttcgatgtcttttgtttcatcatcattgggcattttagttgctatggaataatttttaatttttgtctctaaaattagatttgctttgtagtaaattttttaaaaatgcaaccctaagatctgattatatgaactgggtctctaaagcctacaaagattctctcgttctgtaccaagcagactgccttgtactatacagaagtgtttgaaaagacctagaggttttctcttaaataccattacttaagattcatagtattaggatctttatgatttatcatgagcttatatcaccagtttatttactgtgaaaaaaaccatgggaatggcatactgtgagaagagtactatggtgaatggctccagaattaaaattcagcagatgtgtctgtattctggggttggtcatttgggtctcaaaactgccccatatgcaaatgtactgactgtcatcaatgaaaagttaacctttgtagcttataaatacacacaaaatgttgatttggttaattttttaggaaagtatacctttgtagttactagttacatttgactgtaagatttagaggttagtaaatttttgcttctttattcagataagatctcagccaaaaggttgtgtgatctttgattttaaaaatttaagaggaacttttcctcactggaacacaatgattttattaataaagaatgtaggctgggtgcggtggctcatgcacgtaatcccaacaatttgggaggctgaggcaggcagatcacgtgaggtcaggagtttgagaccagcctggccaacatggtgaaaccctgtctgtagtaaaaatacaaaaattagctgggcacggtggcgggcacctgtagttccagctgcttgggaggctgaggcacgagaatcacttgagcccaggaggtggaggttgcagtgagccaagattatgtcactgcactccatcctgggtgacaagagcgaaactccatctcaaaaaaaaaaaaaaaaaaaagcctggcctggtggtggatgcctgtggttccagctattcgggaggctgaggtaggtggatcacctctgctcaggtcaaggctgcagcgagccatgatcgcaccattgcactccagcctgagtgacagagtgagaccctgtctcaacaagcaagcaaacaaaaaaccaaaaggaatgtttttttcagatactgatagaatgttttcagtgtgtattggttcatttactatatctttagtgtaagattttaaaaggttttttcagcatccattcaacaaatatttattatctttatacaaattattcattgtgttaaacttatttttagtttaacattctagaaatgaaacgtttttacttaaccttattctacaaagggaatacagcagttattctaattttaataaatgctaaaagctttatacaatttttctttgtgcactaaatgatttttggcccatacccagcaactgtgatgaatgtataatgaaataacatcttgaaaacaggccagatacattaagtatttattgagcttctgtcatatgcccagtattatgcttcttctatactgtttctctgtgacaagtcatactatattctttatagaattaaaagtagaggagaggcagagtttacatattgtccagttgctttacagttgtacaggaggttataagaagaaatatagtaaattagtgggaagtcagaggtgggggcgttagtgagctattttcttcttgaggttgtgacacaagctgacaaaagccagggagttcacagctgtgtggtggcacaaagttccatatgttctaaaaacaattaggcccagcagggtgtccctaatggcttccttgttaaacctccatggccagctgatctgaagctctgtgacatgttctctgagctctgaatgctctggctttttgtcattttgtcttgagacaagtattttcctgtagtcctcattccttcgagttattccatctcccaggatattctctggtgagaagaatgtctttcagtgaatttgccttgaatttagcatccatagagctgtgtcagtgttcttcttgatcacaccttctttaaaaaaaatacttgcttgcgatgactggacaagttcagttggttagtttcaggcctataagaagagagagtaaaggaccttgctatttactttgataccatagttgtatctcaggatggcctgcaaaccactggccttgtgtgtatttaagctaggaataaaataatggagaagtgttaatatgtatacaaaaaggtaaatattgatatatctactctctgttgggggcagaagtgtcattttaagttattcaaagcactttcttaagcattttagaaagcctttattctttgctgttggaagtctccgtactttgcagaattggtatttgtgtactagcctctgccgcaggatggggaggtgggcaggtagctgataggggcagccaggagtttttgaggcaggtggtgggaaattgtcctaatttgttaattggattatgtaactctgttactagtctgttattggctgttgttactggatgcatcttgatattcagaagaataactgtgaggcattcttcagttgcgggttaagtggggttagtttctgttctgtcagatgccctttttcagtcaaaggttagccccttgtttctccctccttccagggtttagggagtgcagtgatgtcgatttcatttcccttccccgcaccccttgacactcagcaggattgcactgaaacccttcacagatctctcgttcactagttgtctcctatttttccataactagcactagtttggccttatgacctggttagaatcactcttctgtattctcatttccaatttttgtgccccactaacgtggactagagaaacttggcctgctgtgcagtgggccttctgttcaacttaccctccaccgctgaccctgtgtgaagagagatggtgcgttactgccatctaatgggaaaagagaaaactgcagttgggaaaagcagctgtgcatttaagggtagggctttctgaaggatttctgatacagtccagaaaagggaaaatgatgacacagcagttgccatcttgaaaaatgccctttcctgcggaaagggtgttttgaagtctaatacaactatcatcacaaggtccctggactaaggctggatcgtgtaatttagaatctcaaattgtattttaattaatatgctggcaacagaatcattgaaacaggcgtctcattttgtcaagttcttagccgttcagtttgtcaggggctttaatattttagatatcaactaatacatagtttcaacttttaaaaatgtttgaagattgtatgtaatataggtgtctatctatagtgccttagtaatttaaatcagaaatattttataaaacttctggttgttttgcagtagccaatataggcttcatgccctcctgaagatagtttcctctgaaatgtaactttaaataaacattattccaagaaaa

SEQ ID NO: 186257 - DNA, 693 bp, Homo sapiens
  Payload ID: 16678
  Gene Symbol: SHE
  Gene Name: Src homology 2 domain containing E
  ENST ID: ENST00000486773
  CDS Start-End: 1-124
cagccgtgctgaggctgagagtcgactacagccctgcaaagaagctggttacctggttcgaaatagtgagtcagggaacagcaggtactccattgccctaaaaaatcaccatctgctctcctaagttcttctggaaagagcaccgtaaccatgtcatcctaacagcaatgccatgaagaaagggaggcagctccctccacgtcctggctccagtgcccactcccgtgccccctccatggcccacgcagcctggccacctgggtgacatctggtccctgtgtcactttctgcaagacaaggaccagcctcaaagaggagagcatggtgtcctgaaggagatggcggccaccatcacctgtcctgtggctttcctctgactgcccaggtgggggcccagaggcggcgcctctcagtccagctttgagtggagttacataatttccaggcttccctgcagttctcgcctccccatccctgaactgtttacacagtagctctcacccacaaagagtccgcatgatggcttttcctctgtttggaagatgtggatggctgtgtcccaagtttttcctacctaagatccttttcagtaggggatggatttggtctatctgatgatcaagagttcagggtggcctttgtgatagtgttacaccccctcccaggtccaataaacagtcttctgacaaataa

SEQ ID NO: 186258 - DNA, 2500 bp, Homo sapiens
  Payload ID: 16679
  Gene Symbol: SHF
  Gene Name: Src homology 2 domain containing F
  Uniprot ID: Q7M4L6
  ENST ID: ENST00000290894
  CDS Start-End: 496-1767
gtactaaccactatacgatcacggcgagctaccgggacgccacgacgagcagctgacccagtgttgcccttctcgtctagatggcggccattccagctttcctaagcgtccattatctaccaggttcctcccgcacccacgttcacccgcaagagcagccgggagcgctgtggactccctagcccgaagtctcctcttggctgtacgcacggaccgcaaaagaagggacatgaaagtgctttgcaaccaaaggattcctatgaggccgggcctgcaatgatgtgaagcccctgaggacgcccgaatggtggcccaaagtctctctgacgctcaccatgccctgactatcatgctatctgaacgactttggctgggactggagctcttaaattttacaagaaggaaaatcagttctgacccaccaccatacaacttccttgaggcgcgagggtgtccacaatctccacagaggcggcattgggtcaccgctggaggatgcagcaggagggaggacccgtgaggagcgccccctgtaggaccggaaccctggagggttcgcggcaagggtctccggggcataggaaacgggcatcccccaagggtagtctgagttccgcccagccccattcctggatgctcacgccgtctcccctaaactcccactgcgctcaccgggagcccatctcatcatcaccacagcccgtggctaatgggccaaaacagaagaagaaaagcaactggcggagtacaacgcgcctgcgcattatcagactcagggacaggctggaacctcgccccctagctatcctagaagactatgcggacccgtttgatgttcaggagactggcgaaggctcagcaggagcttcaggagccccagagaaggtccctgaaaatgatggctacatggagccctatgaggctcaaaagatgatggccgagatccggggctccaaggagacagcaactcagcccttgcctctgtatgacacaccctatgagccagaggaggatggggccaccgcggaaggtgagggggccccctggccccgggagtcccgcctgccagaggatgatgagaggccccctgaggagtatgaccagccctgggagtggaagaaggagcggatttccaaagcctttgcagttgacattaaggtcatcaaagacctaccttggcctccacctgtgggacagctggacagcagcccctccctgcctgatggggacagggacatctccggtccagcctcgcccctccctgagcccagcctggaggacagcagcgcccagtttgaaggaccggagaagagctgcctgtcacctggccgggaggagaaggggcggctacctccccgactctctgcagggaaccccaagtcagccaaacccctaagcatggagcccagcagccccctgggggagtggacagatccagcactgcctctggaaaaccaggtctggtatcacggggccatcagccgaaccgacgccgagaacctgctccggctgtgcaaagaggccagctacctggtgcgcaacagtgagaccagcaagaatgacttctccctctccctcaagagcagccagggattcatgcacatgaagctgtcccgaaccaaggaacacaaatatgtgctgggccagaacagcccgcccttcagcagcgtccctgaaattgtgcaccactatgccagccgcaagctacccattaagggagccgaacacatgtccctgctctaccctgtggccatccggactctttagatgtgaagccagggcactgtgatagacctgtacccagccctgtgcccatcacctggctgagggctgtggctcttgccagggacgtgatctttcaaacctttcttctcctgggatccagtagaagctggagattccttaatttattctaaagggaaagggctcctggggccttggagtaaggggttgtctggagctggggaaagaggaatccctggagagaaaggatagcccctggaggaagggggttccagagctactgggatggtagggagtttcagactggcagctccggctcctttccgaccttagggcagaggtggtgacctccaccaccaccaccctctccccactgggtccgtgcgaggtagtgcagaattcggccccttggggcgccttaccacctctctgcctccgtccccgacttccaccccagaccgtcggagggctccgcccagagtctggtaagaggtttggggaagacaggcccctgggaagcagccggctttggggggtggggagagaaggggaggggctcgggcagagggaactgtgcagtccccaggccgccccggctccgggccagaggcaataaataaacccgatcctgccgggcacagccgcgcccgcgcctccggcgccgtccccgggctgacgggggagggagcggagaagcgagcgcagattctgcgtataaatcagctctggagcagacacagcccggctgtgaaaagca

SEQ ID NO: 186259 - DNA, 1163 bp, Homo sapiens
  Payload ID: 16679
  Gene Symbol: SHF
  Gene Name: Src homology 2 domain containing F
  ENST ID: ENST00000458022
  CDS Start-End: 210-929
gagttgccacctgggtgcccatgggcactgcaggctagagctgaggaggcccacgccagcctcggaggggtcgcagctctgggcatgggcccaggacttggctagctatcctagaagactatgcggacccgtttgatgttcaggagactggcgaaggctcagcaggagcttcaggagccccagagaaggtccctgaaaatgatggctacatggagccctatgaggctcaaaagatgatggccgagatccggggctccaaggagacagcaactcagcccttgcctctgtatgacacaccctatgagccagaggaggatggggccaccgcggaaggtgagggggccccctggccccgggagtcccgcctgccagaggatgatgagaggccccctgaggagtatgaccagccctgggagtggaagaaggagcggatttccaaagcctttgcagcccagtttgaaggaccggagaagagctgcctgtcacctggccgggaggagaaggggcggctacctccccgactctctgcagggaaccccaagtcagccaaacccctaagcatggagcccagcagccccctgggggagtggacagatccagcactgcctctggaaaaccaggtctggtatcacggggccatcagccgaaccgacgccgagaacctgctccggctgtgcaaagaggccagctacctggtgcgcaacagtgagaccagcaagaatgacttctccctctccctcaagagcagccagggattcatgcacatgaagctgtcccgaaccaaggaacacaaatatgtgctgggccagaacagcccgcccttcagcagcgtccctgaaattgtgcaccactatgccagccgcaagctacccattaagggagccgaacacatgtccctgctctaccctgtggccatccggactctttagatgtgaagccagggcactgtgatagacctgtacccagccctgtgcccatcacctggctgagggctgtggctcttgccagggacgtgatctttcaaacctttcttctcctgggatccagtagaagctggagattccttaatttattctaaagggaaagggctcctggggccttggagtaaggggttgtctggagctggggaaagaggaatccctggagagaaaggatagcccctg

SEQ ID NO: 186260 - DNA, 884 bp, Homo sapiens
  Payload ID: 16679
  Gene Symbol: SHF
  Gene Name: Src homology 2 domain containing F
  ENST ID: ENST00000559566
  CDS Start-End: 1-599
ctggcgaaggctcagcaggagcttcaggagccccagagaaggtccctgaaaatgatggctacatggagccctatgaggctcaaaagatgatggccgagatccggggctccaaggagacagcaactcagcccttgcctctgtatgacacaccctatgagccagaggaggatggggccaccgcggaaggtgagggggccccctggccccgggagtcccgcctgccagaggatgatgagaggccccctgaggagtatgaccagccctgggagtggaagaaggagcggatttccaaagcctttgcagcccagtttgaaggaccggagaagagctgcctgtcacctggccgggaggagaaggggcggctacctccccgactctctgcagggaaccccaagtcagccaaacccctaagcatggagcccagcagccccctgggggagtggacagatccagcactgcctctggaaaaccaggtctggtatcacggggccatcagccgaaccgacgccgagaacctgctccggctgtgcaaagaggccagctacctggtgcgcaacagtgagaccagcaagaatgacttctccctctccctcaagtgagtggggacagttgtggtttcagggacagcaagcagggtggaaggggactccagtattccccttatgcccaaccaagctggggaggtccccatcccccatgaacaatccccaggcactgggggtcctgagatgtctgagactcagcccctgctctcaaggagctcagagtccattgggagaaatagttgatccgcagcatccagctcagaagggttctgttctagttgtgtggcctggcccccttaacctctctaggcctcagtttccttactaatgaaatggatg

SEQ ID NO: 186261 - DNA, 1731 bp, Homo sapiens
  Payload ID: 16679
  Gene Symbol: SHF
  Gene Name: Src homology 2 domain containing F
  ENST ID: ENST00000560734
  CDS Start-End: 2-874
catgttactgagcggagctcctccggctggctcccgcccggggccgcgaacgcaggggagcgctgggggcggcccgggggggtcccgccggggcgccgggggtgcgggagccggcccaggagggggcggcagcggcggagtagccaagtggctccgggagcacctgggcttccgcggggggggcggcggcggagggggcagcaagccggcgccccccgagcccgactaccgcccccctgcgccctctccggccgcgccccccgcgccgcccccggacatcctggccgcctacaggctgcagcgggagcgcgacttcgaagacccctactccggggggtcgtccggctccgccgccctcgccacccctgtcgcccccggacccacgccgcccccgcgccacggctctcccccacaccgccttattcgggtcgagaccccggggcccccggcgccgcctgctgatgagcggatctccggaccccccgccagcagcgataggctagctatcctagaagactatgcggacccgtttgatgttcaggagactggcgaaggctcagcaggagcttcaggagccccagagaaggtccctgaaaatgatggctacatggagccctatgaggctcaaaagatgatggccgagatccggggctccaaggagacagcaactcagcccttgcctctgtatgacacaccctatgagccagaggaggatggggccaccgcggaaggtgagggggccccctggccccgggagtcccgcctgccagaggatgatgagaggccccctgaggagtatgaccagccctgggagtggaagaaggagcggatttccaaagcctttgcaggagcagccagggattcatgcacatgaagctgtcccgaaccaaggaacacaaatatgtgctgggccagaacagcccgcccttcagcagcgtccctgaaattgtgcaccactatgccagccgcaagctacccattaagggagccgaacacatgtccctgctctaccctgtggccatccggactctttagatgtgaagccagggcactgtgatagacctgtacccagccctgtgcccatcacctggctgagggctgtggctcttgccagggacgtgatctttcaaacctttcttctcctgggatccagtagaagctggagattccttaatttattctaaagggaaagggctcctggggccttggagtaaggggttgtctggagctggggaaagaggaatccctggagagaaaggatagcccctggaggaagggggttccagagctactgggatggtagggagtttcagactggcagctccggctcctttccgaccttagggcagaggtggtgacctccaccaccaccaccctctccccactgggtccgtgcgaggtagtgcagaattcggccccttggggcgccttaccacctctctgcctccgtccccgacttccaccccagaccgtcggagggctccgcccagagtctggtaagaggtttggggaagacaggcccctgggaagcagccggctttggggggtggggagagaaggggaggggctcgggcagagggaactgtgcagtccccaggccgccccggctccgggccagaggcaataaataaacccgatcctgccgggcacagccgcgcccgcgcctccggcgccgtccccgggctgacgggggagggagcggagaagcgagcgcagattctgcgtataaat

SEQ ID NO: 186262 - DNA, 2499 bp, Homo sapiens
  Payload ID: 16679
  Gene Symbol: SHF
  Gene Name: Src homology 2 domain containing F
  ENST ID: ENST00000560471
  CDS Start-End: 5-1249
ccccatgttactgagcggagctcctccggctggctcccgcccggggccgcgaacgcaggggagcgctgggggcggcccgggggggtcccgccggggcgccgggggtgcgggagccggcccaggagggggcggcagcggcggagtagccaagtggctccgggagcacctgggcttccgcggggggggcggcggcggagggggcagcaagccggcgccccccgagcccgactaccgcccccctgcgccctctccggccgcgccccccgcgccgcccccggacatcctggccgcctacaggctgcagcgggagcgcgacttcgaagacccctactccggggggtcgtccggctccgccgccctcgccacccctgtcgcccccggacccacgccgcccccgcgccacggctctcccccacaccgccttattcgggtcgagaccccggggcccccggcgccgcctgctgatgagcggatctccggaccccccgccagcagcgataggctagctatcctagaagactatgcggacccgtttgatgttcaggagactggcgaaggctcagcaggagcttcaggagccccagagaaggtccctgaaaatgatggctacatggagccctatgaggctcaaaagatgatggccgagatccggggctccaaggagacagcaactcagcccttgcctctgtatgacacaccctatgagccagaggaggatggggccaccgcggaaggtgagggggccccctggccccgggagtcccgcctgccagaggatgatgagaggccccctgaggagtatgaccagccctgggagtggaagaaggagcggatttccaaagcctttgcagttgacattaaggtcatcaaagacctaccttggcctccacctgtgggacagctggacagcagcccctccctgcctgatggggacagggacatctccggtccagcctcgcccctccctgagcccagcctggaggacagcagcgcccagtttgaaggaccggagaagagctgcctgtcacctggccgggaggagaaggggcggctacctccccgactctctgcagggaaccccaagtcagccaaacccctaagcatggagcccagcagccccctgggggagtggacagatccagcactgcctctggaaaaccagctggtatcacggggccatcagccgaaccgacgccgagaacctgctccggctgtgcaaagaggccagctacctggtgcgcaacagtgagaccagcaagaatgacttctccctctccctcaagtgagtggggacagttgtggtttcagggacagcaagcagggtggaaggggactccagtattccccttatgcccaaccaagctggggaggtccccatcccccatgaacaatccccaggcactgggggtcctgagatgtctgagactcagcccctgctctcaaggagctcagagtccattgggagaaatagttgatccgcagcatccagctcagaagggttctgttctagttgtgtggcctggcccccttaacctctctaggcctcagtttccttactaatgaaatggatgggggataatatagggaaggattaggtgaaataatgcatgggaagtgcttagcatagtgctaagggctcaataaattatcactgtcattattaatggaagcccaagatgttctagaagcataggcaaggagataggagctttgcgtgagggagtctgtagggtgttggggggggctggttcctggaaggagggcagggcagtggacacaaagtatttctgtttactctgaggaagagtgtgtgtgtctgtgtgtgtgttcggggatggggggtgtctgagcttttgggtcctggaagacgtagaggaggcaaggccctccctccccatcaggctttcctcccaggagcagcagatcagcctcccagactccctggtagcatggccagccctgccctgggcaaccaggagttctgcctggtagaccctgcaccccgttaggaagccagtggggtggtatgttcatttgccccccaccatcactagtaggacacctgcaccactttctaccacattctctgggaccatcagagtacagatataccctcccattcagacaaatccaatctatgggaacttggggctgctaaacaagacatatttgggggataattattcaacttccctcaaagataatagaaaaagtggtgggtgtgttggctcacatctgtaatcccagcactttcaaaggccgtggcaggtggatcacctgaagtcaggagttcgagaccaacctgaccaacatggtgaaaccccgtctctactaaaaatacaaaaattagttgggtgtgatggtgagcactggtaatgccagctactcgggaggctgaggcaggaaaatcgcttgaacccaggaggcggaggttgcagtgagccgatattgcgccattgcactccagcccaggccaacaacagcaagactctgtctcag

SEQ ID NO: 186263 - DNA, 2062 bp, Homo sapiens
  Payload ID: 16679
  Gene Symbol: SHF
  Gene Name: Src homology 2 domain containing F
  ENST ID: ENST00000560540
  CDS Start-End: 6-1109
gccccatgttactgagcggagctcctccggctggctcccgcccggggccgcgaacgcaggggagcgctgggggcggcccgggggggtcccgccggggcgccgggggtgcgggagccggcccaggagggggcggcagcggcggagtagccaagtggctccgggagcacctgggcttccgcggggggggcggcggcggagggggcagcaagccggcgccccccgagcccgactaccgcccccctgcgccctctccggccgcgccccccgcgccgcccccggacatcctggccgcctacaggctgcagcgggagcgcgacttcgaagacccctactccggggggtcgtccggctccgccgccctcgccacccctgtcgcccccggacccacgccgcccccgcgccacggctctcccccacaccgccttattcgggtcgagaccccggggcccccggcgccgcctgctgatgagcggatctccggaccccccgccagcagcgataggctagctatcctagaagactatgcggacccgtttgatgttcaggagactggcgaaggctcagcaggagcttcaggagccccagagaaggtccctgaaaatgatggctacatggagccctatgaggctcaaaagatgatggccgagatccggggctccaaggagacagcaactcagcccttgcctctgtatgacacaccctatgagccagaggaggatggggccaccgcggaaggtgagggggccccctggccccgggagtcccgcctgccagaggatgatgagaggccccctgaggagtatgaccagccctgggagtggaagaaggagcggatttccaaagcctttgcagcccagtttgaaggaccggagaagagctgcctgtcacctggccgggaggagaaggggcggctacctccccgactctctgcagggaaccccaagtcagccaaacccctaagcatggagcccagcagccccctgggggagtggacagatccagcactgcctctggaaaaccagctggtatcacggggccatcagccgaaccgacgccgagaacctgctccggctgtgcaaagaggccagctacctggtgcgcaacagtgagaccagcaagaatgacttctccctctccctcaagagcagccagggattcatgcacatgaagctgtcccgaaccaaggaacacaaatatgtgctgggccagaacagcccgcccttcagcagcgtccctgaaattgtgcaccactatgccagccgcaagctacccattaagggagccgaacacatgtccctgctctaccctgtggccatccggactctttagatgtgaagccagggcactgtgatagacctgtacccagccctgtgcccatcacctggctgagggctgtggctcttgccagggacgtgatctttcaaacctttcttctcctgggatccagtagaagctggagattccttaatttattctaaagggaaagggctcctggggccttggagtaaggggttgtctggagctggggaaagaggaatccctggagagaaaggatagcccctggaggaagggggttccagagctactgggatggtagggagtttcagactggcagctccggctcctttccgaccttagggcagaggtggtgacctccaccaccaccaccctctccccactgggtccgtgcgaggtagtgcagaattcggccccttggggcgccttaccacctctctgcctccgtccccgacttccaccccagaccgtcggagggctccgcccagagtctggtaagaggtttggggaagacaggcccctgggaagcagccggctttggggggtggggagagaaggggaggggctcgggcagagggaactgtgcagtccccaggccgccccggctccgggccagaggcaataaataaacccgatcctgccgggcacagccgcgcccgcgcctccggcgccgtccccgggctgacgggggagggagcggagaagcgagcgcagattctgcgtataaatcagctctggagcagacacagcccggctgtgaaaagca

SEQ ID NO: 186264 - DNA, 603 bp, Homo sapiens
  Payload ID: 16679
  Gene Symbol: SHF
  Gene Name: Src homology 2 domain containing F
  ENST ID: ENST00000561239
  CDS Start-End: 1-484
cagcccctccctgcctgatggggacagggacatctccggtccagcctcgcccctccctgagcccagcctggaggacagcagcgcccagtttgaaggaccggagaagagctgcctgtcacctggccgggaggagaaggggcggctacctccccgactctctgcagggaaccccaagtcagccaaacccctaagcatggagcccagcagccccctgggggagtggacagatccagcactgcctctggaaaaccaggtctggtatcacggggccatcagccgaaccgacgccgagaacctgctccggctgtgcaaagaggccagctacctgctgtcatactctaggagtctgaattgtaaaatcaaagaagcatttcccagaaaagtttttgtcaaaaatttgatttacataacctcagaaatgtgtattgctttaaaaattataaagttcatggagcataccaagcagcctgtataccatttctaaaccaactactcccctgcaagatagatctcttttttatagacagaaaataaattcaaagaggtttgttacttgcccaaggccacccggtaataaagtccccaaaccaggatttgaaccca

SEQ ID NO: 186265 - DNA, 597 bp, Homo sapiens
  Payload ID: 16679
  Gene Symbol: SHF
  Gene Name: Src homology 2 domain containing F
  ENST ID: ENST00000558685
  CDS Start-End: 1-440
atgaccagccctgggagtggaagaaggagcggatttccaaagcctttgcagttgacattaaggtcatcaaagacctaccttggcctccacctgtgggacagctggacagcagcccctccctgcctgatggggacagggacatctccggtccagcctcgcccctccctgagcccagcctggaggacagcagcgcccagtttgaaggaccggagaagagctgcctgtcacctggccgggaggagaaggggcggctacctccccgactctctgcagggaaccccaagtcagccaaacccctaagcatggagcccagcagccccctgggggagtggacagatccagcactgcctctggaaaaccaggtgggacacccacaatgggtgggcctggacagcgagggacccagcagagatgccccccttcctctctctcatccttagctggtatcacggggccatcagccgaaccgacgccgagaacctgctccggctgtgcaaagaggccagctacctggtgcgcaacagtgagaccagcaagaatgacttctccctctccctcaagtgagtggggacagttgtggtttcagggacagcaagc

SEQ ID NO: 186266 - DNA, 578 bp, Homo sapiens
  Payload ID: 16679
  Gene Symbol: SHF
  Gene Name: Src homology 2 domain containing F
  ENST ID: ENST00000561278
  CDS Start-End: 499-578
agtgttgcccttctcgtctagatggcggccattccagctttcctaagcgtccattatctaccaggttcctcccgcacccacgttcacccgcaagagcagccgggagcgctgtggactccctagcccgaagtctcctcttggctgtacgcacggaccgcaaaagaagggacatgaaagtgctttgcaaccaaaggattcctatgaggccgggcctgcaatgatgtgaagcccctgaggacgcccgaatggtggcccaaagtctctctgacgctcaccatgccctgactatcatgctatctgaacgactttggctgggactggagctcttaaattttacaagaaggaaaatcagttctgacccaccaccatacaacttccttgaggcgcgagctagctatcctagaagactatgcggacccgtttgatgttcaggagactggcgaaggctcagcaggagcttcaggagccccagagaaggtccctgaaaatgatggctacatggagccctatgaggctcaaaagatgatggccgagatccggggctccaaggagacagcaactcagcccttgcctctgta

SEQ ID NO: 186267 - DNA, 604 bp, Homo sapiens
  Payload ID: 16679
  Gene Symbol: SHF
  Gene Name: Src homology 2 domain containing F
  ENST ID: ENST00000558294
  CDS Start-End: 1-491
ccccctggccccgggagtcccgcctgccagaggatgatgagaggccccctgaggagtatgaccagccctgggagtggaagaaggagcggatttccaaagcctttgcaggggacacccacaatgggtgggcctggacagcgagggacccagcagagatgccccccttcctctctctcatccttagctggtatcacggggccatcagccgaaccgacgccgagaacctgctccggctgtgcaaagaggccagctacctggtgcgcaacagtgagaccagcaagaatgacttctccctctccctcaagagcagccagggattcatgcacatgaagctgtcccgaaccaaggaacacaaatatgtgctgggccagaacagcccgcccttcagcagcgtccctgaaattgtgcaccactatgccagccgcaagctacccattaagggagccgaacacatgtccctgctctaccctgtggccatccggactctttagatgtgaagccagggcactgtgatagacctgtacccagccctgtgcccatcacctggctgagggctgtggctcttgccagggacgtgatctttcaaacctttcttctcctggga

SEQ ID NO: 186268 - DNA, 2577 bp, Homo sapiens
  Payload ID: 16680
  Gene Symbol: SHD
  Gene Name: Src homology 2 domain containing transforming protein D
  Uniprot ID: Q96IW2
  ENST ID: ENST00000543264
  CDS Start-End: 1464-2486
caaaaggacagatgcagaggacaggcgccaggcacagataccatctcccttccccaagccagctgcccccaaccctccccctgcccgcaattagtcctctggggcgggagcggggcacagagcagagccctcttgggggaggggaagcccgatccgcacccacccttcctttgcccccctcttccttctgctgctccaatatcaatttcagccagtgacctctccaccaatttgcacatccccactctcccggtccgtttcaccgccagacatcggttccatttcgaccctcactggcggtcattcccaccccctctgctggtcaatttcaccccttttggcggtcaagtgcagtcccccatttcccgggcaatttccccctcccctccttctccctctcccctcccctccccagcagtgtcactcccagctgctccccacctcccgcgctccgcgctcgctgcggccagtctcgggcgtcccggtcagtgtccagctgccgcggcctcggccccggcgactcccgcccccagccccccttccctccgcgggcagcggctccctccctccccagaacagctgaaggtctcagtcacctccgaggggagcgcagggggaggggaggggcgggggacgcggcggaggggaggtgggggagccttgacgctgctgcccgggacgcggcccggggctggtgggaacaggggcgtcctcctgcgcgcccccctccccagcgtcccacctcccggcggcggcggggaaagtctctccgaaagcgtgaagggggattggaggaggtttttatttccctttgtgcgggtggctggggccggatcgaggcggcgggggccgcgggactgggggctccccgctgagccgagaggagcgcgacaaaggatgcgtcccgccggggtcacagtctccgcggcccaactttgcgcgcggcgcccgcgcccctggggagcccgcccgctgcgctgagaacccaggcgtccgggctgggagaggggccgggagcgtccgcaggtggcgctggcccggatctcccgaccccaggaagggatcccggagcttcctggaggcggcgggcggccgtgtcgctccagggaaccgcgctgcccgcggaaactccgcgcgcctccgcggatgcccctcgccctagcccccagcgcgcggggttcggggccctgcgaggtccccccttcccccgcggtgcttcccaagctgggctaaggcgggcttctcttcctccctcctctgtcgcctccttttcctccccctcgttcaccttttccttccctctatccatccagagccccgccaaagggcgcacctgatctttctcatccttccctgctcttcccttcctctccacctcctcctcctccttggggaaaggggcccggagaagggcatgtgggggcccctctgacagtggcccgattggggtgacaggcgcccaaatggccaagtggctacgggactacctgagctttgggggtcggaggccccctccgcagccgcccaccccggactacaccgagagcgacatcctgagggcctaccgcgcgcagaagaacctggacttcgaggacccctatgaggacgcggagagccgcttggagccggaccccgcgggccctggggactccaagaaccccggagatgccaagtatggttctcccaagcaccggctcatcaaggtggaggctgcggatatggccagagccaaggcccttctgggcggccccggggaggagctggaagccgacactgagtatttagacccctttgatgctcagcctcatcctgcacccccggatgatgggtacatggagccctacgatgcccaatgggtcatgagtgaacttcccggcagaggggtgcagctctatgacaccccttatgaggaacaggacccagagacagcagatggacccccttctgggcagaagcctcggcagagccggatgccccaggaagatgaacggccagcagatgagtatgatcagccctgggagtggaagaaagaccacatctccagggcgtttgcagtgcagtttgacagtccagagtgggagaggactccaggctcagccaaggagctccggagacctccgcccagaagcccccagcctgcggagcgtgtggacccagccctgcccctggagaaacagccgtggtttcatggccccctgaacagggcggatgcagagagcctcctgtccctctgcaaggaaggcagctacctagtgcggctcagtgagaccaacccccaggactgctccttgtctctcaggagcagccagggcttcctgcatctgaagttcgcgcggacccgtgagaaccaggtggtgctgggccaacacagcgggcccttccccagcgtgcccgagctcgtcctccactacagttcacgcccactgccggtgcagggtgccgagcatctggctctgctgtaccccgtggtcacgcagaccccctgacagtgaccctcggcccccttttgagtcctcgggcccagaatcgtatcccaaagccctcccatggcctagaaaataaataagttattgtttg

SEQ ID NO: 186269 - DNA, 1729 bp, Homo sapiens
  Payload ID: 16680
  Gene Symbol: SHD
  Gene Name: Src homology 2 domain containing transforming protein D
  ENST ID: ENST00000599689
  CDS Start-End: 769-1671
tgggaacaggggcgtcctcctgcgcgcccccctccccagcgtcccacctcccggcggcggcggggaaagtctctccgaaagcgtgaagggggattggaggaggtttttatttccctttgtgcgggtggctggggccggatcgaggcggcgggggccgcgggactgggggctccccgctgagccgagaggagcgcgacaaaggatgcgtcccgccggggtcacagtctccgcggcccaactttgcgcgcggcgcccgcgcccctggggagcccgcccgctgcgctgagaacccaggcgtccgggctgggagaggggccgggagcgtccgcaggtggcgctggcccggatctcccgaccccaggaagggatcccggagcttcctggaggcggcgggcggccgtgtcgctccagggaaccgcgctgcccgcggaaactccgcgcgcctccgcggatgcccctcgccctagcccccagcgcgcggggttcggggccctgcgaggtccccccttcccccgcggtgcttcccaagctgggctaaggcgggcttctcttcctccctcctctgtcgcctccttttcctccccctcgttcaccttttccttccctctatccatccagagccccgccaaagggcgcacctgatctttctcatccttccctgctcttcccttcctctccacctcctcctcctccttggggaaaggggcccggagaagggcatgtgggggcccctctgacagtggcccgattggggtgacaggcgcccaaatggccaagtggctacgggactacctgagctttgggggtcggaggccccctccgcagccgcccaccccggactacaccgagagcgacatcctgagggcctaccgcgcgcagaagaacctggacttcgaggacccctatgaggacgcggagagccgcttggagccggaccccgcgggccctggggactccaagaaccccggagatgccaagtatggttctcccaagcaccggctcatcaaggtggaggctgcggatatggccagagccaaggcccttctgggcggccccggggaggagctggaagccgacactgagtatttagacccctttgatgctcagcctcatcctgcacccccggatgatgggtacatggagccctacgatgcccaatgggtcatgagtgaacttcccggcagaggggtgcagctctatgacaccccttatgaggaacaggacccagagacagcagatggacccccttctgggcagaagcctcggcagagccggatgccccaggaagatgaacggccagcagatgagtatgatcagccctgggagtggaagaaagaccacatctccagggcgtttgcagtgcagtttgacagtccagagtgggagaggactccaggctcagccaaggagctccggagacctccgcccagaagcccccagcctgcggagcgtgtggacccagccctgcccctggagaaacagccgagcagccagggcttcctgcatctgaagttcgcgcggacccgtgagaaccaggtggtgctgggccaacacagcgggcccttccccagcgtgcccgagctcgtcctccactacagttcacgcccactgccggtgcagggtgccgagcatctggctctgctgtaccccgtggtcacgcagaccccctgacagtgaccctcggcccccttttgagtcctcgggcccagaatcgtatcccaaagccctc

SEQ ID NO: 186270 - DNA, 558 bp, Homo sapiens
  Payload ID: 16680
  Gene Symbol: SHD
  Gene Name: Src homology 2 domain containing transforming protein D
  ENST ID: ENST00000593383
  CDS Start-End: 1-117
gacaccccttatgaggaacaggacccagagacagcagatggacccccttctgggcagaagcctcggcagagccggatgccccaggaagatgaacggccagcagatgatgcagtttgacagtccagagtgggagaggactccaggctcagccaaggagctccggagacctccgcccagaagcccccagcctgcggagcgtgtggacccagccctgcccctggagaaacagccgtggtttcatggccccctgaacagggcggatgcagagagcctcctgtccctctgcaaggaaggcagctacctagtgcggctcagtgagaccaacccccaggactgctccttgtctctcaggagcagccagggcttcctgcatctgaagttcgcgcggacccgtgagaaccaggtggtgctgggccaacacagcgggcccttccccagcgtgcccgagctcgtcctccactacagttcacgcccactgccggtgcagggtgccgagcatctggctctgctgtaccccgtggtcacgcagaccccctgacagtgaccctcggccccctt

SEQ ID NO: 186271 - DNA, 1534 bp, Homo sapiens
  Payload ID: 16681
  Gene Symbol: SKAP1
  Gene Name: src kinase associated phosphoprotein 1
  Uniprot ID: Q86WV1
  ENST ID: ENST00000336915
  CDS Start-End: 71-1150
gtcgccttccagcccgtccgcctcccgaccagggcccgcgccccgtcccgcctctctcccgcccagccaaatgcaggccgccgccctccctgaggagatccgttggctcctggaagatgctgaagagtttctggcagaaggtttgcggaatgagaacctcagcgctgttgcaagggatcacagagaccatattctacggggctttcagcaaatcaaagccaggtactattgggattttcagccccaagggggagacattggacaggacagctctgatgataatcacagcgggactcttggcctgtccctcacatccgatgcaccctttttgtcagattatcaggatgagggaatggaagacatcgtaaaaggagctcaagaacttgataacgtaatcaagcaaggatacttggagaagaaaagcaaagatcatagtttctttggatcggagtggcagaagcgatggtgtgttgtcagcagaggtctcttctactactatgctaatgagaagagcaagcagcccaaagggaccttcctcattaagggctacggtgtacggatggccccccacctgcgaagagattccaagaaagaatcctgctttgaactgacctcccaggataggcgcagctatgagtttacagctactagtccagcagaagccagagactgggtggatcaaataagtttcttgttaaaggatctgagctccttaaccattccatatgaagaggatgaggaggaagaagaaaaagaagagacatatgatgatattgatggttttgactccccaagttgtggttcccagtgcagacccactatcttgcctgggagtgtggggataaaagagcctacagaggagaaagaagaagaagatatttatgaagtcttgccagatgaagagcatgatctagaagaggatgagagtggcactcgacgaaaaggagtagactatgccagttactaccagggcctatgggattgccatggtgaccagccagatgaactgtccttccaacggggtgacctcatccgtattctgagcaaggagtataacatgtatggctggtgggtgggagaactgaacagcctcgttgggattgttccaaaggagtatctcaccactgcctttgaagtggaagaaagatgaaacccaggaaatatattcttccctctctcctgcctttatgaggaaactgatcatcaaaagttcccactccctacttctgccaccccaccaacgccttggactcctctctttgctgaagagacccaagtctcttgacacctcagagtgactgtaagctaccagtaagacaagtgggaagaggcacgttcatcaaacctgttactaaaccagcctagtcatagctcatccccatctctaaatgtgtccacacaaccacatctgccttttccacaagcttttcacaaagaaggtgagagagaaggaaaccttgggaggaggacattactggttgttctggctggtttgaaaagcacaaataaacttgggatgtggttccttgccatg

SEQ ID NO: 186272 - DNA, 783 bp, Homo sapiens
  Payload ID: 16681
  Gene Symbol: SKAP1
  Gene Name: src kinase associated phosphoprotein 1
  ENST ID: ENST00000581400
  CDS Start-End: 1-277
gggagacattggacaggacagctctgatgataatcacagcgggactcttggcctgtccctcacatccgatgcaccctttttgtcagattatcaggatgagggaatggaagacatcgtaaaaggagctcaagaacttgataacgtaatcaagcaaggatacttggagaagaaaagcaaagatcatagtttctttggatcggagtggcagaagcgatggtgtgttgtcagcagaggtctcttctactactatgctaatgagaagatttacagctactagtccagcagaagccagagactgggtggatcaaataagtttcttgttaaaggatctgagctccttaaccattccatatgaagaggatgaggaggaagaagaaaaagaagagacatatgatgatattgatggttttgactccccaagttgtggttcccagtgcagacccactatcttgcctgggagtgtggggataaaagagcctacagaggagaaagaagaagaagatatttatgaagtcttgccagatgaagagcatgatctagaagaggatgagagtggcactcgacgaaaaggagtagactatgccagttactaccagggcctatgggattgccatggtgaccagccagatgaactgtccttccaacggggtgacctcatccgtattctgagcaaggagtataacatgtatggctggtgggtgggagaactgaacagcctcgttgggattgttccaaaggagtatctcaccactgcctttgaagtggaagaaagatgaaacccag

SEQ ID NO: 186273 - DNA, 696 bp, Homo sapiens
  Payload ID: 16681
  Gene Symbol: SKAP1
  Gene Name: src kinase associated phosphoprotein 1
  ENST ID: ENST00000581419
  CDS Start-End: 1-117
gggactcttggcctgtccctcacatccgatgcaccctttttgtcagattatcaggatgaggtagagacggggtttcaccgtgttagccaggatggtctcgatctcctgacctcgtgatccgcccgcctcggcctcccaaagtgctgggattactggcttgagccaccgcgccggcctaattaaatgttcttatctaaacttggggaatggaagacatcgtaaaaggagctcaagaacttgataacgtaatcaagcaaggatacttggagaagaaaagcaaagatcatagtttctttggatcggagtggcagaagcgatggtgtgttgtcagcagaggtctcttctactactatgctaatgagaagagcaagcagcccaaagggaccttcctcattaagggctacggtgtacggatggccccccacctgcgaagagattccaagaaagaatcctgctttgaactgacctcccaggataggcgcagctatgagtttacagctactagtccagcagaagccagagactgggtggatcaaataagtttcttgttaaaggatctgagctccttaaccattccatatgaagaggatgaggaggaagaagaaaaagaagagacatatgatgatattgatggttttgactccccaagttgtggttcccagtgcagacccactatcttgcctgggagtgtgggga

SEQ ID NO: 186274 - DNA, 1687 bp, Homo sapiens
  Payload ID: 16681
  Gene Symbol: SKAP1
  Gene Name: src kinase associated phosphoprotein 1
  ENST ID: ENST00000584709
  CDS Start-End: 156-467
cccggggacccacggccccgccccgcggccgggctgggcgggcggcgaccgcggctgaggtacaggtgcctcgcggtgcagccgggtcgccttccagcccgtccgcctcccgaccagggcccgcgccccgtcccgcctctctcccgcccagccaaatgcaggccgccgccctccctgaggagatccgttggctcctggaagatgctgaagagtttctggcagaaggtttgcggaatgagaacctcagcgctgttgcaagggatcacagagaccatattctacggggctttcagcaaatcaaagccaggtactattgggattttcagccccaagggggagacattggacaggacagctctgatgataatcacagcgggactcttggcctgtccctcacatccgatgcaccctttttgtcagattatcaggatgagggtattttgagaagaatgaataggagagtatagagaaaataggaattatagaagataaagccaacttatccatcagtgaatggaagacatcgtaaaaggagctcaagaacttgataacgtaatcaagcaaggatacttggagaagaaaagcaaagatcatagtttctttggatcggagtggcagaagcgatggtgtgttgtcagcagaggtctcttctactactatgctaatgagaagagcaagcagcccaaagggaccttcctcattaagggctacggtgtacggatggccccccacctgcgaagagattccaagaaagaatcctgctttgaactgacctcccaggataggcgcagctatgagtttacagctactagtccagcagaagccagagactgggtggatcaaataagtttcttgttaaaggatctgagctccttaaccattccatatgaagaggatgaggaggaagaagaaaaagaagagacatatgatgatattgatggttttgactccccaagttgtggttcccagtgcagacccactatcttgcctgggagtgtggggataaaagagcctacagaggagaaagaagaagaagatatttatgaagtcttgccagatgaagagcatgatctagaagaggatgagagtggcactcgacgaaaaggagactatgccagttactaccagggcctatgggattgccatggtgaccagccagatgaactgtccttccaacggggtgacctcatccgtattctgagcaaggagtataacatgtatggctggtgggtgggagaactgaacagcctcgttgggattgttccaaaggagtatctcaccactgcctttgaagtggaagaaagatgaaacccaggaaatatattcttccctctctcctgcctttatgaggaaactgatcatcaaaagttcccactccctacttctgccaccccaccaacgccttggactcctctctttgctgaagagacccaagtctcttgacacctcagagtgactgtaagctaccagtaagacaagtgggaagaggcacgttcatcaaacctgttactaaaccagcctagtcatagctcatccccatctctaaatgtgtccacacaaccacatctgccttttccacaagcttttcacaaagaaggtgagagagaaggaaaccttgggaggaggacattactggttgttctggctggtttgaaaagcacaaataaacttgggatgtggttccttg

SEQ ID NO: 186275 - DNA, 678 bp, Homo sapiens
  Payload ID: 16681
  Gene Symbol: SKAP1
  Gene Name: src kinase associated phosphoprotein 1
  ENST ID: ENST00000579336
  CDS Start-End: 380-678
gagcctcacatttacagccacactctctctgctgtaataattccttctttctgttgttatagatctcttaacattctaataaattctctgtctctgttgtactcttttggcaaaataacctttcacgttgcatttccctagcttggcagtgatatctgccttactgtcgcagtagcctcttcttaagcttctctaataacctttccttgactattgtggttcctcagggatgtaacagctgtttctgtgcttttattttacataccagagaggatgccttcccttggcagttgcatctctctagggatacagggagctttcctgtcttgcaggcaagcagcccaaagggaccttcctcattaagggctacggtgtacggatggccccccacctgcgaagagattccaagaaagaatcctgctttgaactgacctcccaggataggcgcagctatgagtttacagctactagtccagcagaagccagagactgggtggatcaaataagtttcttgttaaaggatctgagctccttaaccattccatatgaagaggatgaggaggaagaagaaaaagaagagacatatgatgatattgatggttttgactccccaagttgtggttcccagtgcagacccactatcttgcctgggagtgtggggataaaagagcctacaga

SEQ ID NO: 186276 - DNA, 1477 bp, Homo sapiens
  Payload ID: 16681
  Gene Symbol: SKAP1
  Gene Name: src kinase associated phosphoprotein 1
  Uniprot ID: Q86WV1
  ENST ID: ENST00000584924
  CDS Start-End: 100-1179
gaggtacaggtgcctcgcggtgcagccgggtcgccttccagcccgtccgcctcccgaccagggcccgcgccccgtcccgcctctctcccgcccagccaaatgcaggccgccgccctccctgaggagatccgttggctcctggaagatgctgaagagtttctggcagaaggtttgcggaatgagaacctcagcgctgttgcaagggatcacagagaccatattctacggggctttcagcaaatcaaagccaggtactattgggattttcagccccaagggggagacattggacaggacagctctgatgataatcacagcgggactcttggcctgtccctcacatccgatgcaccctttttgtcagattatcaggatgagggaatggaagacatcgtaaaaggagctcaagaacttgataacgtaatcaagcaaggatacttggagaagaaaagcaaagatcatagtttctttggatcggagtggcagaagcgatggtgtgttgtcagcagaggtctcttctactactatgctaatgagaagagcaagcagcccaaagggaccttcctcattaagggctacggtgtacggatggccccccacctgcgaagagattccaagaaagaatcctgctttgaactgacctcccaggataggcgcagctatgagtttacagctactagtccagcagaagccagagactgggtggatcaaataagtttcttgttaaaggatctgagctccttaaccattccatatgaagaggatgaggaggaagaagaaaaagaagagacatatgatgatattgatggttttgactccccaagttgtggttcccagtgcagacccactatcttgcctgggagtgtggggataaaagagcctacagaggagaaagaagaagaagatatttatgaagtcttgccagatgaagagcatgatctagaagaggatgagagtggcactcgacgaaaaggagtagactatgccagttactaccagggcctatgggattgccatggtgaccagccagatgaactgtccttccaacggggtgacctcatccgtattctgagcaaggagtataacatgtatggctggtgggtgggagaactgaacagcctcgttgggattgttccaaaggagtatctcaccactgcctttgaagtggaagaaagatgaaacccaggtatcagaaccatggccaatgaactgcctaatagttgagtggaacttgtgggccactactttgtttctctgaaagatgagagttgccagtgaagtagcttttcttcatttctcatactaatgctagtgattcaccactgatggaaagaaaatgcctctggaattgtttttttcttaaatttggggacagtgtcacttaggataaggttcaactaatagcaacataaaatctaaactaaaaatgacttaattaacacagaaagccaggcacagtggctcacacctgtaatcc

SEQ ID NO: 186277 - DNA, 563 bp, Homo sapiens
  Payload ID: 16681
  Gene Symbol: SKAP1
  Gene Name: src kinase associated phosphoprotein 1
  ENST ID: ENST00000583844
  CDS Start-End: 1-99
tataacatgtatggctggtgggtgggagaactgaacagcctcgttgggattgttccaaaggagtatctcaccactgcctttgaagtggaagaaagatgaaacccaggttacctcaaggccaagacagatgctcaatctccagccatcctgtctgcaacctacacagcacagcaggaaagataaaaggagaaggaaatatattcttccctctctcctgcctttatgaggaaactgatcatcaaaagttcccactccctacttctgccaccccaccaacgccttggactcctctctttgctgaagagacccaagtctcttgacacctcagagtgactgtaagctaccagtaagacaagtgggaagaggcacgttcatcaaacctgttactaaaccagcctagtcatagctcatccccatctctaaatgtgtccacacaaccacatctgccttttccacaagcttttcacaaagaaggtgagagagaaggaaaccttgggaggaggacattactggttgttctggctggtttgaaaagcacaaataaacttgggatgtggttcctt

SEQ ID NO: 186278 - DNA, 3998 bp, Homo sapiens
  Payload ID: 16682
  Gene Symbol: SKAP2
  Gene Name: src kinase associated phosphoprotein 2
  Uniprot ID: O75563
  ENST ID: ENST00000345317
  CDS Start-End: 315-1394
aggctctttcttctggggccgggaaaaccgaggaatacacatgcgcagttggacccctcaggcccttcgtgtcccttcccacccatctccccgccccggccctctgggcggggctgggccgacagtccagctgcagctcgctggagattcagtgacttccttgttgtgagccccggcccggcagtgtcccgactcgtagccccgctgttcttaatccgggccgctagcctgagtctaggtcgcagccgcagccccaccccgtcggtcaccttttcagcgcaggtcctttccccgcacgccctgcgctccctaacatgcccaaccccagcagcacctcctctccctaccccctccctgaggaaattaggaacctgttggcagatgttgaaacatttgtagcagatatactgaaaggagaaaatttatccaagaaagcaaaggaaaagagagaatcccttattaagaagataaaagatgtaaagtctatctatcttcaggaatttcaagacaaaggtgatgcagaagatggggaagaatatgatgacccttttgctgggcctccagacactatttcattagcctcagaacgatatgataaagacgatgaagccccctctgatggagcccagtttcctccaattgcagcacaagaccttccttttgttctaaaggctggctaccttgaaaaacgcagaaaagatcacagctttctgggatttgaatggcagaaacggtggtgtgctctcagtaaaacggtattctattattatggaagtgataaagacaaacaacagaaaggtgaatttgcaatagatggctacagtgtcagaatgaataacactctaagaaaggatggaaagaaagattgctgttttgaaatctctgctcctgataaacgtatatatcagtttacagcagcttctcccaaagatgctgaagaatgggtacagcagctgaaatttgtattgcaagatatggaatctgatattattcctgaggattatgatgagagaggagaattatatgatgatgttgatcatcctctaccaataagcaatccactaacaagcagtcaaccaatagatgatgaaatttatgaagaacttccagaagaagaagaggacagtgctccagtgaaagtggaagaacaaaggaagatgagtcaggatagtgtccatcacacctcaggggataagagcactgattatgctaatttttaccagggattgtgggattgtactggagctttttctgatgagttgtcatttaagcgtggtgatgtgatttacattcttagcaaggaatacaatagatatggctggtgggtaggagaaatgaagggagccattggcttggtgcctaaagcctacataatggagatgtatgatatttgagagtcctggaaaaggaaaattcttctgcttgtctgcaaatgctttggatttagaagcgtcatgaaagcacgagtgacagctcctaacctctccttgttttattaaacattacttatctttgactgttattttatgcagtcgctcattaaaatattcctctgatgtgaaattaaatgaaggatattaatgtaaattagatgcaaccagttaagttatacctgttgctattttgcaaagaaataattatagtttttatttacccatttgatttgtgtgaagaattcatcactattttatacgtaacatatagtctactatagcatagtatgctactattgctacttctggtgtgatttgtaatgtttcttaatcattggacatcaattatttttagagagtaatgtataatttcatagcattttaaatttagtgtatcatgcgagttttttttggtagatgctgaagaatgtggttgctaaacaaagaatgctaaagaatgttcaaactttatagataactttattgttattatttattttcacacatttaattcctattaagtacagccgcaagaaagaaaaaatgatgaagttgcaaatggcagtgtgctgtcacctgcaacagaagtgcgtaccagaagtatgactcatgcaaagcattttaccgtacaaatatcctggtgcgatgatgggcctggcaacattttctactgtacttttgtttaaatttaatgaaacaaaaaattcctaagaaataccaccctaccactaacaaaatggtataaagaatctcccagccaggccaacatggtgaaaccctgtctctactaaaaattagccaagtgtggtaatgttcacctgcagtcccagctacttgggaggccaaggcacgagaattgcttgaacaaggtaggcagaggttgcagtgagccaagatcgcgccactgcactccagcctgggcgacagagtgagactccatctcagaaaaaaaaaaaaaaaaaaacagaatctcagtgtattctcaaagtaaaaaggcataaccaagcactctcttatcttgccttattgctatactatttacatcccactgcagaacagcagatttgaggcttttctatatacttctcagagcactgaaaagaaaggaagggtttgcagaggagagtgtagaaatcccagtggtagcatgtaccaacaggtgagtagaaaggtagtgttagcctgacatttgagttatactctgtgctgcctgagcaagatttgtagaatcatataattaccttttcatgtatatttgaaatcagaggtgtttaaaatacctatgagataccaatgtagccttaacatatgtcaaaatgcattgctggttagataattatttggactacacataaactcctaatattgaatcattacctatcaggtattatctttatggaacttttcaatatctttgctttataaagattctaaacatgtatctgagctggtaatattttaaaatctccattatttgtgtaaaactgtttataagcagtgtttgagagggtctgctttaccattaccccctcaatatcatgatcatccaatctcaaatgtgaaaaaaaaaaagaaatttgattttagggattgtgagtaaacaagtttatatagagagacattgtgaagttaaagttttcagaagttacatttgtgcagttcttaccttttcctcatatagtgccattgaaatagactgaaattatcttggcaaaagttagacaaccaaagacgactttagtggactggttttcaaaacttgagcagctgaaaagcaaaagccgttgtttcccatgacaatgtagcctttgtggatttgggtttgtgctttgggttgaaaagaagtttttagtcctaggccagtagatggcagcagcttttcattgcagacaaaacctcttgaaacccttcccccatggcacaaactcgcccatgatggaaagcatctagatttctgcctccttttacagttaatccaggagagggagtcctttgccaactgatgaccaacagttccaagccagatagtctcgtgaacagtgacaatacagaaataaggtgttatttctgttcagatctccaccggcctttgttcttttaaaacttgaatataggtgggagacataagaaaggaaagaaaagacttaaaactggagtgacaggacaaataatcattactttcaattcatgactgctttatattcatttgatgaaatcatttgtatacaaaccagggagagttttctttacacccttgacaatatatcacatactcttcaagatcataataatatcattaatataaatttaaacaacatggcttgttagaaaatatgctaattgctatggtctcattatgtttgcttagcttttatttgtttttctgtgaacagttagagagctaatttttttcaaaggtgattgtaagtcatattttatatagcattttgcttgattatttgctctgtactgaatttgtactctattgccattagatcttacaataatgttccactctgcaaatttttaaggttcaaataaagtttaattgtttgcaaactgtta

SEQ ID NO: 186279 - DNA, 577 bp, Homo sapiens
  Payload ID: 16682
  Gene Symbol: SKAP2
  Gene Name: src kinase associated phosphoprotein 2
  ENST ID: ENST00000432747
  CDS Start-End: 199-577
aatttttctctgcttgttggacatgaagagagggagacaaaggctctcagaaagagaaagacgggctggtgaaggacaaactaaggaatttgattattcacttttccaagataaagtggcatggagtggggaaagaccattaaggaatgctgaacataaaggaatcctggggacctgaccctcagttaagacataagaatgacaaccaggagtgtgctcgatgttgaaacatttgtagcagatatactgaaaggagaaaatttatccaagaaagcaaaggaaaagagagaatcccttattaagaagataaaagatgtaaagtctatctatcttcaggaatttcaagacaaaggtgatgcagaagatggggaagaatatgatgacccttttgctgggcctccagacactatttcattagcctcagaacgatatgataaagacgatgaagccccctctgatggagcccagtttcctccaattgcagcacaagaccttccttttgttctaaaggctggctaccttgaaaaacgcagaaaagatcacagctttctgggatttgaatggcagaaacggtggt

SEQ ID NO: 186280 - DNA, 1150 bp, Homo sapiens
  Payload ID: 16683
  Gene Symbol: SRCIN1
  Gene Name: SRC kinase signaling inhibitor 1
  ENST ID: ENST00000613927
  CDS Start-End: 1-919
gtccgaggagctggaggtgcagaagccccaggtgaagctgcgccgggctgtgtctgaggtggcccgcccagcctccacaccacccatcatggcctcggccatcaaggacgaggatgacgaggatcgcatcatcgcagagctagaggtgtttgagagaagctcagtgtcttccctcccccccacgccccgccgccagctgatccccaccttgctgtccccccaggacctggggccccccgggggctcagccccaggccctacacggaaggctgccccaggtcccagggccttctgcgtcccaaggatcatcttgacagagtgtgcccccaaccctccctccccgccagaggccagacttgaggaactgggacccaggacagctcccaccccaagacctcagaccctggctgacagcacgaggggctgggatggcccacagtccccaccaggggtagtgggggagacttctgggccgaggagcagcttcatgccccggaaggagggggcagctctgaagagactgggtggaggaggcagcagcctagaggatggaggagccagagtacagtgtcctcagggaccagcccaggatgggactccagagacctctactgctgacacctacccagaggagatcctcaaggactctggacatgatgcccaaacctgcagtagggagcatcagggccaggctgctgccaactcaggccgcaccacgtggggcgccactgcccagcagatggacagcttggaggagacgctccgggagctggaagccaccctgagcaacatgggcacaggccctgccatggggtcccctggcagccccccacccctacccctccgcccccaggtggctgcccgcttttcatcctcctctgctgccttcctcctccatttccagagtcagacagagtagggggcagcagaaatgccaggccagccccctcctcccaccggccttctctcagctcttaccactctcctgggagcctggtgccagagcagggtttgcaggcagagtccgggggaggctgggaagccggcctacccaggggccggccaatccccagccttggcaagaaccagggcctcccccttctgctctgtatctgtaaaccaacaaataaagttctctccccaccttcca

SEQ ID NO: 186281 - DNA, 1431 bp, Homo sapiens
  Payload ID: 16683
  Gene Symbol: SRCIN1
  Gene Name: SRC kinase signaling inhibitor 1
  ENST ID: ENST00000612431
  CDS Start-End: 11-1431
acgcgtccccatgcagccctggcagtgcctccggcgctttgccctggcctggtgggagaggacggcggagggcagagcccgctctcccagggaggaggctggaccgagggaccctgggggccgaggggagccagatccggagcggagcagcccccccatgctgtctgcggacgatgcggagtacccgcgggagtaccggaccctggggggcgggggcggcgggggcagcgggggccggcgcttctccaacgtggggctggtgcacacgtccgagcggcggcacacggtgatcgcggcccagagtctggaggcgctcagcgggctccagaaggcggacgccgaccgcaagcgtgatgccttcatggaccacctgaagagcaagtacccacagcacgccctggccctgcgaggccagcaggacaggatgcgagagcaggttggcggctggaccgtggaccccgtatgcctcctcagctccctctgctcccacctccatggcgactccgccccctccggggctggccagccggcccagacccgcagctcacgccacactcagggagcccagcccgggctggcagaccaggcggcaaagctgtcctacgcctccgccgagtcgctggagaccatgtcggaggccgagctgcccctgggcttcagcaggatgaaccgcttccgacagagcctgcctctctcccgctcggccagccagaccaagctgcgctccccaggggtgctgttcctgcagttcggggaggagactcggcgcgtgcacatcacgcacgaggtcagcagcctggacacgctgcacgcactcatcgcgcacatgttcccgcagaagctcaccatgggcatgcttaagtcgcccaataccgccatcctcatcaaagacgaggctcgcaacgtcttctacgagctggaggacgtccgggacatccaggaccgcagtattatcaagatctacagaaaggagcccctctacgctgccttccctggctcacatctcaccaacggggacctccggagagagatggtgtacgcatcgcgggagtcctcgcccacgcggcgcctcaacaacctgtcaccagcgccgcacctggcatccggctcgccgccgcccgggctgccgtcggggctgccgtccgggctgcagtccggttcgccgtcgcgttcgcgcctatcgtacgccggggggcgcccgccttcgtacgccggcagcccggtgcaccacgcggccgagaggctgggaggcgccccggccgcccagggcgtcagccccagccccagcgccatcctggagcggcgcgacgtgaagccggacgaggacctggcgagcaaggcgggcggcatggtgctggtgaaaggcgagggcctctatgctgacccctacgggctgctgcacgagggccgtctgagcctggccgcggccgc

SEQ ID NO: 186282 - DNA, 4635 bp, Homo sapiens
  Payload ID: 16683
  Gene Symbol: SRCIN1
  Gene Name: SRC kinase signaling inhibitor 1
  ENST ID: ENST00000622190
  CDS Start-End: 1-2785
gttcccgcagaagctcaccatgggcatgcttaagtcgcccaataccgccatcctcatcaaagacgaggctcgcaacgtcttctacgagctggaggacgtccgggacatccaggaccgcagtattatcaagatctacagaaaggagcccctctacgctgccttccctggctcacatctcaccaacggggacctccggagagagatggtgtacgcatcgcgggagtcctcgcccacgcggcgcctcaacaacctgtcaccagcgccgcacctggcatccggctcgccgccgcccgggctgccgtcggggctgccgtccgggctgcagtccggttcgccgtcgcgttcgcgcctatcgtacgccggggggcgcccgccttcgtacgccggcagcccggtgcaccacgcggccgagaggctgggaggcgccccggccgcccagggcgtcagccccagccccagcgccatcctggagcggcgcgacgtgaagccggacgaggacctggcgagcaaggcgggcggcatggtgctggtgaaaggcgagggcctctatgctgacccctacgggctgctgcacgagggccgtctgagcctggccgcggccgccggcgacccgttcgcctacccgggcgccggcggcctctacaagcgcggctcggtgcgctcgctcagcacctactcggccgccgcgctgcagtccgatctggaggactccctgtacaaggcggcgggcggcggcggcccgctgtacggcgacggctacggcttccgcctgccgccttcgtcaccgcagaagctggccgacgtggcagcaccccccggaggtcccccgccaccgcacagcccctactcggggccgcccagccgcggctcgccagtgcgccagtccttccgcaaggactcgggctcctcgtccgtctttgccgagagtcctggagggaagacccgcagcgcggggagcgcctcgacggccggagctcccccttcggagctcttccctgggcctggggaacgctcgctggttgggttcgggccgccagtgccagccaaggacacggagaccagggagcgcatggaggccatggagaagcagattgccagcctcacaggcctggtgcagagcgccttactgcgaggctctgagcctgagacccccagcgagaagattgaaggctccaatggagcagccaccccctcagcaccctgtgggtcaggcggccggagcagcggggccaccccggtgtccggcccgcccccgccctcggccagcagcacccccgcaggtcagcctaccgccgttagccggctgcagatgcagcttcacctgcgaggcctgcagaacagcgccagtgacttgcgcggccagctccagcagttgcgcaagctccagctacagaaccaggagtcggtgcgcgcgctgctgaagcgcacggaggcagagctgagcatgcgcgtgtcggaggcggcgcggcggcaggaggacccgctgcagcggcagcgcaccctggtggaagaggaacggctgcgctatctcaacgacgaggagcttattacccagcagctcaatgacctggagaaatcggtggagaagatccagagagacgtgtcccacaaccaccggctggtgcccggccctgagctggaggagaaggcactggtgctgaagcagctcggggagacgctgacagagctcaaggctcacttcccgggcctgcagagcaagatgcgggtggtgctgcgcgtggaggtggaggcggtgaagttcctgaaggaggagccccagcgcctggatgggctcctcaagcgctgccgcggggtcacggacacgctggcccagatccgaaggcaagtggatgagggtgtgtggccaccccccaacaatctcctgagtcagtcccccaagaaggtgacggcagagactgacttcaacaagagcgtggacttcgaaatgccaccccccagccccccgctgaacctgcatgagctgagcgggccagctgaaggagcctctcttacccccaaggggggcaaccccaccaaaggcctggacactcctggcaagagaagcgtggacaaagctgtgtctgttgaggctgcagagcgagactgggaggagaagcgggcagccctgacccagtacagtgccaaggacatcaaccggctgctggaagagacacaggcagagctgctcaaggccatccctgacctggactgtgccagcaaggcccatccaggcccggcccccactccagatcacaagccccccaaggccccccacggccagaaggcagccccccgaacggagcccagtgggaggaggggctcagatgagttgaccgtgccccgataccgcacagagaagccctccaagtcgcccccaccgccccctccccgccggagcttcccctcctcccatggcctgaccaccacacgtaccggagaggtggtggtcaccagcaagaaggactcggccttcatcaagaaggctgagtccgaggagctggaggtgcagaagccccaggtgaagctgcgccgggctgtgtctgaggtggcccgcccagcctccacaccacccatcatggcctcggccatcaaggacgaggatgacgaggatcgcatcatcgcagagctagagagtggcggaggcagtgtaccacccatgaaggtggtgactccgggggcctctcggctgaaggcggcccagggccaggcgggcagccccgacaaaagcaaacatggcaagcagagggccgagtacatgcggatccaggcccagcagcaggtctaatgagcaggcgcggaggctgtgtggagagtggacatacctcacctgtgggtgtttactgcccttgtggcctggtcagaggctgcagggtggctcctggacccagatgttgtgagagacccttagtgcactcgtttgatttagttaatatttatgagcagctcctgtatgacaggcccattctgggtgtgagggtgggggctgtgatatgtccagatgctctcacttaaagaaggttctagactcagaggcaagacgttagagaaggttctagactcagaggcaagaggttagagatgggtgagtccatctctttttcagatgagggggcagctcagaggaggagaggggcttcccaaaggtgcacagcaaggtggcatcacagccaggatcgggacctaggaatcttggaacccttccctgcactggccctgggacagccctgggcacccaaggccctgcctccctactggctcccaggagaatttctcaaaaagcagccctccagccccccgcagcctctccacagctcccacctgcctcctcatggcccccagacaccctgcgagccccacctccagatctttttcctgccactgccagggatgagttccccttgtcctgtccgggctggaccctcctgggtgcccagcagagcagctgacactgacagagctttcgctggggccaggcatgcgcattatctcatctcacactcaccacactgaggaaggtctattacccccatgtgacgggggcggaaactgaggcttaatccaaggccacacggctagcaagtggggggcaggacacaagtccagactgcctccctccccaccacaaagtgcttcagcctctccagcagccccttccctcagctctaatgatgttgcactgtttcccaccctagtccctccctccccagagcccagctcctccgctgtggtgtcagcctcatgcctttatggcccagcctccaccccatctccggggttgcctgggtctccagtgacatcgagatgggctcttttcacccccctcccccactgctctgcagcatgtggccttgtagaccccccccacacctgcatagggctgtgcagaccctctgttcctcagcatcctctccccagcctccacctggagcctctgggctcctttctgggtgactccctctattttttgagacggagtcttgctctgtctcccaggctggagtccagtggtgtgatctcagctcactgcagcctccgcctcctgggttcaagtgattctcgtgcctcagcctcccgagcagctgagactacaggctaattaccacactggctaatttttgtatttttagtagagacggggtttcaccatgttggccaggctggtctcaaactcctgagctcaggtgatcctcccacctcagcctcccaaagtgctgggattacaggcgtgagccattgcaccctgcctgggcgactctcctttgcctgcctcttcccttcctgtgccccactcctcagcctcttctcctcacaccatgccttcctctcctcaggcaccaggtgcactgcttagtccctgcccccacccaggtctccattctgagctccagtcacccacacacgcttccccgggcatccccaggctcctcgaatgcgtgtgtccagacataatgctcccccgaccacgctgccccagccggtacgaggctgccccagctgctgtctccctcaggaagggtcgcccacccccagccttcccaagcccctccgtgcccctgtctcacttccagtgctccagtagcctttcttataaacatggcttctttcttgtaaagtaataaatgtttacagtggaaa

SEQ ID NO: 186283 - DNA, 7058 bp, Homo sapiens
  Payload ID: 16683
  Gene Symbol: SRCIN1
  Gene Name: SRC kinase signaling inhibitor 1
  Uniprot ID: Q9C0H9
  ENST ID: ENST00000615049
  CDS Start-End: 226-3777
acactcgctctcgcacactcggtgacacgcccgcgcgcgcgctcacccacacgcccggccgccggcgccctcccagctggtccaccccggcggggcccgcgcccccggcccgcccgcctggcaccgcgccccggggctggggccgagcgaggagcccgcgaggcggcgagagggcgagcgccaggcaggccggcccggggcccccgccccccgcgcccccgcccgatggggaacgctccgtcccaagatccggagcggagcagcccccccatgctgtctgcggacgatgcggagtacccgcgggagtaccggaccctggggggcgggggcggcgggggcagcgggggccggcgcttctccaacgtggggctggtgcacacgtccgagcggcggcacacggtgatcgcggcccagagtctggaggcgctcagcgggctccagaaggcggacgccgaccgcaagcgtgatgccttcatggaccacctgaagagcaagtacccacagcacgccctggccctgcgaggccagcaggacaggatgcgagagcagccaaactactggagtttcaagacccgcagctcacgccacactcagggagcccagcccgggctggcagaccaggcggcaaagctgtcctacgcctccgccgagtcgctggagaccatgtcggaggccgagctgcccctgggcttcagcaggatgaaccgcttccgacagagcctgcctctctcccgctcggccagccagaccaagctgcgctccccaggggtgctgttcctgcagttcggggaggagactcggcgcgtgcacatcacgcacgaggtcagcagcctggacacgctgcacgcactcatcgcgcacatgttcccgcagaagctcaccatgggcatgcttaagtcgcccaataccgccatcctcatcaaagacgaggctcgcaacgtcttctacgagctggaggacgtccgggacatccaggaccgcagtattatcaagatctacagaaaggagcccctctacgctgccttccctggctcacatctcaccaacggggacctccggagagagatggtgtacgcatcgcgggagtcctcgcccacgcggcgcctcaacaacctgtcaccagcgccgcacctggcatccggctcgccgccgcccgggctgccgtcggggctgccgtccgggctgcagtccggttcgccgtcgcgttcgcgcctatcgtacgccggggggcgcccgccttcgtacgccggcagcccggtgcaccacgcggccgagaggctgggaggcgccccggccgcccagggcgtcagccccagccccagcgccatcctggagcggcgcgacgtgaagccggacgaggacctggcgagcaaggcgggcggcatggtgctggtgaaaggcgagggcctctatgctgacccctacgggctgctgcacgagggccgtctgagcctggccgcggccgccggcgacccgttcgcctacccgggcgccggcggcctctacaagcgcggctcggtgcgctcgctcagcacctactcggccgccgcgctgcagtccgatctggaggactccctgtacaaggcggcgggcggcggcggcccgctgtacggcgacggctacggcttccgcctgccgccttcgtcaccgcagaagctggccgacgtggcagcaccccccggaggtcccccgccaccgcacagcccctactcggggccgcccagccgcggctcgccagtgcgccagtccttccgcaaggactcgggctcctcgtccgtctttgccgagagtcctggagggaagacccgcagcgcggggagcgcctcgacggccggagctcccccttcggagctcttccctgggcctggggaacgctcgctggttgggttcgggccgccagtgccagccaaggacacggagaccagggagcgcatggaggccatggagaagcagattgccagcctcacaggcctggtgcagagcgccttactgcgaggctctgagcctgagacccccagcgagaagattgaaggctccaatggagcagccaccccctcagcaccctgtgggtcaggcggccggagcagcggggccaccccggtgtccggcccgcccccgccctcggccagcagcacccccgcaggtcagcctaccgccgttagccggctgcagatgcagcttcacctgcgaggcctgcagaacagcgccagtgacttgcgcggccagctccagcagttgcgcaagctccagctacagaaccaggagtcggtgcgcgcgctgctgaagcgcacggaggcagagctgagcatgcgcgtgtcggaggcggcgcggcggcaggaggacccgctgcagcggcagcgcaccctggtggaagaggaacggctgcgctatctcaacgacgaggagcttattacccagcagctcaatgacctggagaaatcggtggagaagatccagagagacgtgtcccacaaccaccggctggtgcccggccctgagctggaggagaaggcactggtgctgaagcagctcggggagacgctgacagagctcaaggctcacttcccgggcctgcagagcaagatgcgggtggtgctgcgcgtggaggtggaggcggtgaagttcctgaaggaggagccccagcgcctggatgggctcctcaagcgctgccgcggggtcacggacacgctggcccagatccgaaggcaagtggatgagggtgtgtggccaccccccaacaatctcctgagtcagtcccccaagaaggtgacggcagagactgacttcaacaagagcgtggacttcgaaatgccaccccccagccccccgctgaacctgcatgagctgagcgggccagctgaaggagcctctcttacccccaaggggggcaaccccaccaaaggcctggacactcctggcaagagaagcgtggacaaagctgtgtctgttgaggctgcagagcgagactgggaggagaagcgggcagccctgacccagtacagtgccaaggacatcaaccggctgctggaagagacacaggcagagctgctcaaggccatccctgacctggactgtgccagcaaggcccatccaggcccggcccccactccagatcacaagccccccaaggccccccacggccagaaggcagccccccgaacggagcccagtgggaggaggggctcagatgagttgaccgtgccccgataccgcacagagaagccctccaagtcgcccccaccgccccctccccgccggagcttcccctcctcccatggcctgaccaccacacgtaccggagaggtggtggtcaccagcaagaaggactcggccttcatcaagaaggctgagtccgaggagctggaggtgcagaagccccaggtgaagctgcgccgggctgtgtctgaggtggcccgcccagcctccacaccacccatcatggcctcggccatcaaggacgaggatgacgaggatcgcatcatcgcagagctagagagtggcggaggcagtgtaccacccatgaaggtggtgactccgggggcctctcggctgaaggcggcccagggccaggcgggcagccccgacaaaagcaaacatggcaagcagagggccgagtacatgcggatccaggcccagcagcaggccactaaaccatctaaagagatgagcgggtcgaatgagacctcgagcccagtctcagaaaagccctcggcttccagaacctctatccctgtattgacttcctttggggcaaggaattcttccatctccttctagaagcccctcaccccgctgccccgcctgtccccctccctcactcctgccatttctcccctctcttccttcatctccaccccaccccaccctactctccagacgccctgaggggtgtgccctgaagaggagggtgcggccctcctcagcgacccctacccatcatctgttggtgtttttggttttgtttttttttttttttttaacaattaacttttaattatctttttttaaacagtaaaactaaaaaccaaacacaccaccttccttgatcccagctggcctctcgctggccgcacctgtcacatctctccttcttctctttcaccactctttcccccagtccatcctgaagctcctgcacccccttcccgccttcccctcacttcccaagaatactccaaacaaactctgaaccacggagacttggagcagtgggagacccctctcccgtttctcgataccttcctggaggaacgcggggacatcggaccaacccatacatcaagccagagagcggggcttagggagactggccttggagatgccccactccctgtctaagctccgacaagactgtgacttcctctgtggctgctctgcctcctcccactcacacccaagtgggcctggagtagagacggacaggctggagacgaggccggagtttgagaggcctcagggtgggtgtgaggccatggagtctgtatccctggggaggcgctggcctcctgggccttgccgtccagtggggagtggagggcagaggccctttggtctgctggctgtggagggtgggttgcacggacagccggatatcggggacactgccttgggagagggcggcccggacgggtatttggtacttttagtttcctgatttagcactttaaatggcattaacttattgaatggggatggggtgggcaagagtgaggggcctagaaaaccaggttttgtggcttgcagttgggggaagggtctggtttgagggaaatgggagggtcgagaggggcttgacggggagcactgaagacacctgggacccgcaggtggggtgacttgaacttcagtcatcctcttggcaatttgagggttttcccaggaaaggatgagacgtagtttttcaatggggctctggtgaccctggtgagatgtctgaaggtccctgaggcctgaccatccagccagcgcccctggcctgtggacgccctgcctgccctgcagaggcggttggcagtgccgcctggcttttggccgggtcctggggaggcagagagaggccaattttggttctcactcctggccccccagagggcacagtgaggagccggtagggagaggataggagaagaggaggaggaggagcggggtccccggccgcaggattcccacttggagcacaaagtgaagtaagcacaggggagggggactagaatcagtcccccatagcaagcacagaaaggaggagctgcgcagaaggcagagccccccagaccctggggcctggctggggaaggtccgcacctggggagagctgggagctgttgaaggtttggggggaggggaaacgggttgtgtttcttcatttctttttttgtttttgcctttgttggttcatccttgttttctagctttggatcatttttgtaccaaggcgagcaagcctttttgaaaaataacaaaagaggaaaaaaaaaatccctcctggaaaaaaaaaaaaaccctggaaaatagaaaaaaaaaaaaggacctcataaatgatgcaattacttttaattgcaggcaactctttacatttaagtgaagtgtcttaacattttatattgttttaaaaatatatttacatattatatatataatatacgtaatataaatatatataaatatttaaaaaagaaaaaaaaaagaaaaccacggcactctccctggccactgttttggcgggggaggggggctggggggcgggcacgtcggcctggcttctgtggtcccagtgaaatggtctggtttgatttggctgtacagagaccccctgacttgggaggggaggggggagtggtgccccctcctccctccactccattactctctgcttgctacttcgcttgcccccagctcccaccctcagccctgtgactggaatgtgtgccccaccgtcattgtcctgagttgaatgtccctttgtgggggaggtggggggggcagtgtccatccacgaaggggcagaaggagggagccacgtgccccgccccacccgctcgggtgaagcccagtgggatttgcatctttctttctctttggttcctgcacatttatgggctgggaggcatccgtgtggaattgcgtgcagcctgtgtgtgtgctggcacaagcccatgcactgtgtgtgcagacgcatggggcctgcacccacaggcatggccgagcacatgtgtgggggaaggcgtgggcacataggtgcatgtaacctgtttgggcattggcacgtgcctacctgcatgttagcgtgagaggagctttgtgtgtgagaacatgtgtaatgtgtgtgcagacatgccgagagccagagacttgtgtgtgggccacgtacatgtggatagagacgcatacatggaggtgcatgtaatctgtgtctccgagtgtgtgtgtgcaggtatgtgtgctggtgcagacccaagtgtgtgggtgtgcctctgtgtgcgtgtgttccatcatccctgcaccactggctccagatcccttcctgagcccccgtccccgctggccctctcacagcctgcagcacatcagtgcccccagctgcatgcgcctcgctgctctgtccatcagtgtgtgcttgaccaagagaaaactaagacgtctcgggggacccctgtacctggtcctctcagcccccgcccactgtgctgtgttactcgcatgggggatttcctgccccttccacaatatgctgtttccccaggagcctcaggcctgaggctctgagtggggtccccagggggccccccggggtgagccccggctccacaccctgccccatccaccctgtagggcccatgttggtgtagcagtgatggcttctgtggatattctgtgacctctgtcggtgtaacttgacaatttctaaatggaaaagggttgctgtgttttctctgtctctcttttttaatgtccttttttcttctcccccgctccctgctctctttccttttcagtttttctagccaagtgtttggggctttaataaaacttgtttctttttcctctcctggatctccttc

SEQ ID NO: 186284 - DNA, 4644 bp, Homo sapiens
  Payload ID: 16683
  Gene Symbol: SRCIN1
  Gene Name: SRC kinase signaling inhibitor 1
  ENST ID: ENST00000621492
  CDS Start-End: 138-3791
ggcggggcccgcgcccccggcccgcccgcctggcaccgcgccccggggctggggccgagcgaggagcccgcgaggcggcgagagggcgagcgccaggcaggccggcccggggcccccgccccccgcgcccccgcccgatggggaacgctccgtcccaagatccggagcggagcagcccccccatgctgtctgcggacgatgcggagtacccgcgggagtaccggaccctggggggcgggggcggcgggggcagcgggggccggcgcttctccaacgtggggctggtgcacacgtccgagcggcggcacacggtgatcgcggcccagagtctggaggcgctcagcgggctccagaaggcggacgccgaccgcaagcgtgatgccttcatggaccacctgaagagcaagtacccacagcacgccctggccctgcgaggccagcaggacaggatgcgagagcaggttggcggctggaccgtggaccccgtatgcctcctcagctccctctgctcccacctccatggcgactccgccccctccggggctggccagccggcccagcagccaaactactggagtttcaagacccgcagctcacgccacactcagggagcccagcccgggctggcagaccaggcggcaaagctgtcctacgcctccgccgagtcgctggagaccatgtcggaggccgagctgcccctgggcttcagcaggatgaaccgcttccgacagagcctgcctctctcccgctcggccagccagaccaagctgcgctccccaggggtgctgttcctgcagttcggggaggagactcggcgcgtgcacatcacgcacgaggtcagcagcctggacacgctgcacgcactcatcgcgcacatgttcccgcagaagctcaccatgggcatgcttaagtcgcccaataccgccatcctcatcaaagacgaggctcgcaacgtcttctacgagctggaggacgtccgggacatccaggaccgcagtattatcaagatctacagaaaggagcccctctacgctgccttccctggctcacatctcaccaacggggacctccggagagagatggtgtacgcatcgcgggagtcctcgcccacgcggcgcctcaacaacctgtcaccagcgccgcacctggcatccggctcgccgccgcccgggctgccgtcggggctgccgtccgggctgcagtccggttcgccgtcgcgttcgcgcctatcgtacgccggggggcgcccgccttcgtacgccggcagcccggtgcaccacgcggccgagaggctgggaggcgccccggccgcccagggcgtcagccccagccccagcgccatcctggagcggcgcgacgtgaagccggacgaggacctggcgagcaaggcgggcggcatggtgctggtgaaaggcgagggcctctatgctgacccctacgggctgctgcacgagggccgtctgagcctggccgcggccgccggcgacccgttcgcctacccgggcgccggcggcctctacaagcgcggctcggtgcgctcgctcagcacctactcggccgccgcgctgcagtccgatctggaggactccctgtacaaggcggcgggcggcggcggcccgctgtacggcgacggctacggcttccgcctgccgccttcgtcaccgcagaagctggccgacgtggcagcaccccccggaggtcccccgccaccgcacagcccctactcggggccgcccagccgcggctcgccagtgcgccagtccttccgcaaggactcgggctcctcgtccgtctttgccgagagtcctggagggaagacccgcagcgcggggagcgcctcgacggccggagctcccccttcggagctcttccctgggcctggggaacgctcgctggttgggttcgggccgccagtgccagccaaggacacggagaccagggagcgcatggaggccatggagaagcagattgccagcctcacaggcctggtgcagagcgccttactgcgaggctctgagcctgagacccccagcgagaagattgaaggctccaatggagcagccaccccctcagcaccctgtgggtcaggcggccggagcagcggggccaccccggtgtccggcccgcccccgccctcggccagcagcacccccgcaggtcagcctaccgccgttagccggctgcagatgcagcttcacctgcgaggcctgcagaacagcgccagtgacttgcgcggccagctccagcagttgcgcaagctccagctacagaaccaggagtcggtgcgcgcgctgctgaagcgcacggaggcagagctgagcatgcgcgtgtcggaggcggcgcggcggcaggaggacccgctgcagcggcagcgcaccctggtggaagaggaacggctgcgctatctcaacgacgaggagcttattacccagcagctcaatgacctggagaaatcggtggagaagatccagagagacgtgtcccacaaccaccggctggtgcccggccctgagctggaggagaaggcactggtgctgaagcagctcggggagacgctgacagagctcaaggctcacttcccgggcctgcagagcaagatgcgggtggtgctgcgcgtggaggtggaggcggtgaagttcctgaaggaggagccccagcgcctggatgggctcctcaagcgctgccgcggggtcacggacacgctggcccagatccgaaggcaagtggatgagggtgtgtggccaccccccaacaatctcctgagtcagtcccccaagaaggtgacggcagagactgacttcaacaagagcgtggacttcgaaatgccaccccccagccccccgctgaacctgcatgagctgagcgggccagctgaaggagcctctcttacccccaaggggggcaaccccaccaaaggcctggacactcctggcaagagaagcgtggacaaagctgtgtctgttgaggctgcagagcgagactgggaggagaagcgggcagccctgacccagtacagtgccaaggacatcaaccggctgctggaagagacacaggcagagctgctcaaggccatccctgacctggactgtgccagcaaggcccatccaggcccggcccccactccagatcacaagccccccaaggccccccacggccagaaggcagccccccgaacggagcccagtgggaggaggggctcagatgagttgaccgtgccccgataccgcacagagaagccctccaagtcgcccccaccgccccctccccgccggagcttcccctcctcccatggcctgaccaccacacgtaccggagaggtggtggtcaccagcaagaaggactcggccttcatcaagaaggctgagtccgaggagctggaggtgcagaagccccaggtgaagctgcgccgggctgtgtctgaggtggcccgcccagcctccacaccacccatcatggcctcggccatcaaggacgaggatgacgaggatcgcatcatcgcagagctagagagtggcggaggcagtgtaccacccatgaaggtggtgactccgggggcctctcggctgaaggcggcccagggccaggcgggcagccccgacaaaagcaaacatggcaagcagagggccgagtacatgcggatccaggcccagcagcaggccactaaaccatctaaagagatgagcgggtcgaatgagacctcgagcccagtctcagaaaagccctcggcttccagaacctctatccctgtattgacttcctttggggcaaggaattcttccatctccttctagaagcccctcaccccgctgccccgcctgtccccctccctcactcctgccatttctcccctctcttccttcatctccaccccaccccaccctactctccagacgccctgaggggtgtgccctgaagaggagggtgcggccctcctcagcgacccctacccatcatctgttggtgtttttggttttgtttttttttttttttttaacaattaacttttaattatctttttttaaacagtaaaactaaaaaccaaacacaccaccttccttgatcccagctggcctctcgctggccgcacctgtcacatctctccttcttctctttcaccactctttcccccagtccatcctgaagctcctgcacccccttcccgccttcccctcacttcccaagaatactccaaacaaactctgaaccacggagacttggagcagtgggagacccctctcccgtttctcgataccttcctggaggaacgcggggacatcggaccaacccatacatcaagccagagagcggggcttagggagactggccttggagatgccccactccctgtctaagctccgacaagactgtgacttcctctgtggctgctctgcctcctcccactcacacccaagtgggcctggagtagagacggacaggctggagacgaggccggagtttgagaggcctcagggtgggtgtgaggccatggagtctgtatccctggggaggcgctggcctcctgggccttgccgtccagtggggagtggagggcagaggccctttggtctgctggctgtggagggtgggttgcacggacagccggatatcggggacactgccttgggagagggcggcccggacggg

SEQ ID NO: 186285 - DNA, 7058 bp, Homo sapiens; identical to SEQ ID NO: 186283
  Payload ID: 16683
  Gene Symbol: SRCIN1
  Gene Name: SRC kinase signaling inhibitor 1
  Uniprot ID: Q9C0H9
  ENST ID: ENST00000617146
  CDS Start-End: 226-3777

SEQ ID NO: 186286 - DNA, 1431 bp, Homo sapiens; identical to SEQ ID NO: 186281
  Payload ID: 16683
  Gene Symbol: SRCIN1
  Gene Name: SRC kinase signaling inhibitor 1
  ENST ID: ENST00000632117
  CDS Start-End: 11-1431

SEQ ID NO: 186287 - DNA, 4644 bp, Homo sapiens; identical to SEQ ID NO: 186284
  Payload ID: 16683
  Gene Symbol: SRCIN1
  Gene Name: SRC kinase signaling inhibitor 1
  ENST ID: ENST00000631564
  CDS Start-End: 138-3791

SEQ ID NO: 186288 - DNA, 1150 bp, Homo sapiens
  Payload ID: 16683
  Gene Symbol: SRCIN1
  Gene Name: SRC kinase signaling inhibitor 1
  ENST ID: ENST00000631684
  CDS Start-End: 1-919
gtccgaggagctggaggtgcagaagccccaggtgaagctgcgccgggctgtgtctgaggtggcccgcccagcctccacaccacccatcatggcctcggccatcaaggacgaggatgacgaggatcgcatcatcgcagagctagaggtgtttgagagaagctcagtgtcttccctcccccccacgccccgccgccagctgatccccaccttgctgtccccccaggacctggggccccccgggggctcagccccaggccctacacggaaggctgccccaggtcccagggccttctgcgtcccaaggatcatcttgacagagtgtgcccccaaccctccctccccgccagaggccagacttgaggaactgggacccaggacagctcccaccccaagacctcagaccctggctgacagcacgaggggctgggatggcccacagtccccaccaggggtagtgggggagacttctgggccgaggagcagcttcatgccccggaaggagggggcagctctgaagagactgggtggaggaggcagcagcctagaggatggaggagccagagtacagtgtcctcagggaccagcccaggatgggactccagagacctctactgctgacacctacccagaggagatcctcaaggactctggacatgatgcccaaacctgcagtagggagcatcagggccaggctgctgccaactcaggccgcaccacgtggggcgccactgcccagcagatggacagcttggaggagacgctccgggagctggaagccaccctgagcaacatgggcacaggccctgccatggggtcccctggcagccccccacccctacccctccgcccccaggtggctgcccgcttttcatcctcctctgctgccttcctcctccatttccagagtcagacagagtagggggcagcagaaatgccaggccagccccctcctcccaccggccttctctcagctcttaccactctcctgggagcctggtgccagagcagggtttgcaggcagagtccgggggaggctgggaagccggcctacccaggggccggccaatccccagccttggcaagaaccagggcctcccgcttctgctctgtatctgtaaaccaacaaataaagttctctccccaccttcca

SEQ ID NO: 186289 - DNA, 4635 bp, Homo sapiens; identical to SEQ ID NO: 186282
  Payload ID: 16683
  Gene Symbol: SRCIN1
  Gene Name: SRC kinase signaling inhibitor 1
  ENST ID: ENST00000632724
  CDS Start-End: 1-2785

SEQ ID NO: 186290 - DNA, 3851 bp, Homo sapiens
  Payload ID: 16684
  Gene Symbol: SRC
  Gene Name: SRC proto-oncogene, non-receptor tyrosine kinase
  Uniprot ID: P12931
  ENST ID: ENST00000358208
  CDS Start-End: 188-1798
atccctgctttgcagatgaggacgctgaggcccagagagggaaagccacttgcctagggacacacagcggggagaggtggagcagggcctctatttcgagacccctgactccacacctggtgtttgtgccaagaccccaggctgcctcccaggtcctctgggacagcccctgccttctaccaggaccatgggtagcaacaagagcaagcccaaggatgccagccagcggcgccgcagcctggagcccgccgagaacgtgcacggcgctggcgggggcgctttccccgcctcgcagacccccagcaagccagcctcggccgacggccaccgcggccccagcgcggccttcgcccccgcggccgccgagcccaagctgttcggaggcttcaactcctcggacaccgtcacctccccgcagagggcgggcccgctggccggtggagtgaccacctttgtggccctctatgactatgagtctaggacggagacagacctgtccttcaagaaaggcgagcggctccagattgtcaacaacacagagggagactggtggctggcccactcgctcagcacaggacagacaggctacatccccagcaactacgtggcgccctccgactccatccaggctgaggagtggtattttggcaagatcaccagacgggagtcagagcggttactgctcaatgcagagaacccgagagggaccttcctcgtgcgagaaagtgagaccacgaaaggtgcctactgcctctcagtgtctgacttcgacaacgccaagggcctcaacgtgaagcactacaagatccgcaagctggacagcggcggcttctacatcacctcccgcacccagttcaacagcctgcagcagctggtggcctactactccaaacacgccgatggcctgtgccaccgcctcaccaccgtgtgccccacgtccaagccgcagactcagggcctggccaaggatgcctgggagatccctcgggagtcgctgcggctggaggtcaagctgggccagggctgctttggcgaggtgtggatggggacctggaacggtaccaccagggtggccatcaaaaccctgaagcctggcacgatgtctccagaggccttcctgcaggaggcccaggtcatgaagaagctgaggcatgagaagctggtgcagttgtatgctgtggtttcagaggagcccatttacatcgtcacggagtacatgagcaaggggagtttgctggactttctcaagggggagacaggcaagtacctgcggctgcctcagctggtggacatggctgctcagatcgcctcaggcatggcgtacgtggagcggatgaactacgtccaccgggaccttcgtgcagccaacatcctggtgggagagaacctggtgtgcaaagtggcggactttgggctggctcggctcattgaagacaatgagtacacggcgcggcaaggtgccaaattccccatcaagtggacggctccagaagctgccctctatggccgcttcaccatcaagtcggacgtgtggtccttcgggatcctgctgactgagctcaccacaaagggacgggtgccctaccctgggatggtgaaccgcgaggtgctggaccaggtggagcggggctaccggatgccctgcccgccggagtgtcccgagtccctgcacgacctcatgtgccagtgctggcggaaggagcctgaggagcggcccaccttcgagtacctgcaggccttcctggaggactacttcacgtccaccgagccccagtaccagcccggggagaacctctaggcacaggcgggcccagaccggcttctcggcttggatcctgggctgggtggcccctgtctcggggcttgccccactctgcctgcctgctgttggtcctctctctgtggggctgaattgccaggggcgaggcccttcctctttggtggcatggaaggggcttctggacctagggtggcctgagagggcggtgggtatgcgagaccagcacggtgactctgtccagctcccgctgtggccgcacgcctctccctgcactccctcctggagctctgtgggtctctggaagaggaaccaggagaagggctggggccggggctgagggtgcccttttccagcctcagcctactccgctcactgaactccttccccacttctgtgccacccccggtctatgtcgagagctggccaaagagcctttccaaagaggagcgatgggcccctggccccgcctgcctgccaccctgccccttgccatccattctggaaacacctgtaggcagaggctgccgagacagaccctctgccgctgcttccaggctgggcagcacaaggccttgcctggcctgatgatggtgggtgggtgggatgagtaccccctcaaaccctgccctccttagacctgagggacccttcgagatcatcacttccttgcccccatttcacccatggggagacagttgagagcggggatgtgacatgcccaaggccacggagcagttcagagtggaggcgggcttggaacccggtgctccctctgtcatcctcaggaaccaacaattcgtcggaggcatcatggaaagactgggacagcccaggaaacaaggggtctgaggatgcattcgagatggcagattcccactgccgctgcccgctcagcccagctgttgggaacagcatggaggcagatgtggggctgagctggggaatcagggtaaaaggtgcaggtgtggagagagaggcttcaatcggcttgtgggtgatgtttgaccttcagagccagccggctatgaaagggagcgagcccctcggctctggaggcaatcaagcagacatagaagagccaagagtccaggaggccctggtcctggcctccttccccgtactttgtcccgtggcatttcaattcctggccctgttctcctccccaagtcggcaccctttaactcatgaggagggaaaagagtgcctaagcgggggtgaaagaggacgtgttacccactgccatgcaccaggactggctgtgtaaccttgggtggcccctgctgtctctctgggctgcagagtctgccccacatgtggccatggcctctgcaactgctcagctctggtccaggccctgtggcaggacacacatggtgagcctagccctgggacatcaggagactgggctctggctctgttcggcctttgggtgtgtggtggattctccctgggcctcagtgtgcccatctgtaaaggggcagctgacagtttgtggcatcttgccaagggtccctgtgtgtgtgtatgtgtgtgcatgtgtgcgtgtctccatgtgcgtccatatttaacatgtaaaaatgtcccccccgctccgtcccccaaacatgttgtacatttcaccatggccccctcatcatagcaataacattcccactgccaggggttcttgagccagccaggccctgccagtggggaaggaggccaagcagtgcctgcctatgaaatttcaacttttcctttcatacgtctttattacccaagtcttctcccgtccattccagtcaaatctgggctcactcaccccagcgagctctcaaatccctctccaactgcctaaggccctttgtgtaaggtgtcttaatactgtcctttttttttttttaacagtgttttgtagatttcagatgactatgcagaggcctgggggacccctggctctgggccgggcctggggctccgaaattccaaggcccagacttgcggggggtgggggggtatccagaattggttgtaaatactttgcatattgtctgattaaacacaaacagacctcagaatctgatcaacagtt

SEQ ID NO: 186291 - DNA, 4304 bp, Homo sapiens
  Payload ID: 16684
  Gene Symbol: SRC
  Gene Name: SRC proto-oncogene, non-receptor tyrosine kinase
  Uniprot ID: P12931
  ENST ID: ENST00000373558
  CDS Start-End: 5-1633
gaccatgggtagcaacaagagcaagcccaaggatgccagccagcggcgccgcagcctggagcccgccgagaacgtgcacggcgctggcgggggcgctttccccgcctcgcagacccccagcaagccagcctcggccgacggccaccgcggccccagcgcggccttcgcccccgcggccgccgagcccaagctgttcggaggcttcaactcctcggacaccgtcacctccccgcagagggcgggcccgctggccggtggagtgaccacctttgtggccctctatgactatgagtctaggacggagacagacctgtccttcaagaaaggcgagcggctccagattgtcaacaacacgaggaaggtggatgtcagagagggagactggtggctggcccactcgctcagcacaggacagacaggctacatccccagcaactacgtggcgccctccgactccatccaggctgaggagtggtattttggcaagatcaccagacgggagtcagagcggttactgctcaatgcagagaacccgagagggaccttcctcgtgcgagaaagtgagaccacgaaaggtgcctactgcctctcagtgtctgacttcgacaacgccaagggcctcaacgtgaagcactacaagatccgcaagctggacagcggcggcttctacatcacctcccgcacccagttcaacagcctgcagcagctggtggcctactactccaaacacgccgatggcctgtgccaccgcctcaccaccgtgtgccccacgtccaagccgcagactcagggcctggccaaggatgcctgggagatccctcgggagtcgctgcggctggaggtcaagctgggccagggctgctttggcgaggtgtggatggggacctggaacggtaccaccagggtggccatcaaaaccctgaagcctggcacgatgtctccagaggccttcctgcaggaggcccaggtcatgaagaagctgaggcatgagaagctggtgcagttgtatgctgtggtttcagaggagcccatttacatcgtcacggagtacatgagcaaggggagtttgctggactttctcaagggggagacaggcaagtacctgcggctgcctcagctggtggacatggctgctcagatcgcctcaggcatggcgtacgtggagcggatgaactacgtccaccgggaccttcgtgcagccaacatcctggtgggagagaacctggtgtgcaaagtggcggactttgggctggctcggctcattgaagacaatgagtacacggcgcggcaaggtgccaaattccccatcaagtggacggctccagaagctgccctctatggccgcttcaccatcaagtcggacgtgtggtccttcgggatcctgctgactgagctcaccacaaagggacgggtgccctaccctgggatggtgaaccgcgaggtgctggaccaggtggagcggggctaccggatgccctgcccgccggagtgtcccgagtccctgcacgacctcatgtgccagtgctggcggaaggagcctgaggagcggcccaccttcgagtacctgcaggccttcctggaggactacttcacgtccaccgagccccagtaccagcccggggagaacctctaggcacaggcgggcccagaccggcttctcggcttggatcctgggctgggtggcccctgtctcggggcttgccccactctgcctgcctgctgttggtcctctctctgtggggctgaattgccaggggcgaggcccttcctctttggtggcatggaaggggcttctggacctagggtggcctgagagggcggtgggtatgcgagaccagcacggtgactctgtccagctcccgctgtggccgcacgcctctccctgcactccctcctggagctctgtgggtctctggaagaggaaccaggagaagggctggggccggggctgagggtgcccttttccagcctcagcctactccgctcactgaactccttccccacttctgtgccacccccggtctatgtcgagagctggccaaagagcctttccaaagaggagcgatgggcccctggccccgcctgcctgccaccctgccccttgccatccattctggaaacacctgtaggcagaggctgccgagacagaccctctgccgctgcttccaggctgggcagcacaaggccttgcctggcctgatgatggtgggtgggtgggatgagtaccccctcaaaccctgccctccttagacctgagggacccttcgagatcatcacttccttgcccccatttcacccatggggagacagttgagagcggggatgtgacatgcccaaggccacggagcagttcagagtggaggcgggcttggaacccggtgctccctctgtcatcctcaggaaccaacaattcgtcggaggcatcatggaaagactgggacagcccaggaaacaaggggtctgaggatgcattcgagatggcagattcccactgccgctgcccgctcagcccagctgttgggaacagcatggaggcagatgtggggctgagctggggaatcagggtaaaaggtgcaggtgtggagagagaggcttcaatcggcttgtgggtgatgtttgaccttcagagccagccggctatgaaagggagcgagcccctcggctctggaggcaatcaagcagacatagaagagccaagagtccaggaggccctggtcctggcctccttccccgtactttgtcccgtggcatttcaattcctggccctgttctcctccccaagtcggcaccctttaactcatgaggagggaaaagagtgcctaagcgggggtgaaagaggacgtgttacccactgccatgcaccaggactggctgtgtaaccttgggtggcccctgctgtctctctgggctgcagagtctgccccacatgtggccatggcctctgcaactgctcagctctggtccaggccctgtggcaggacacacatggtgagcctagccctgggacatcaggagactgggctctggctctgttcggcctttgggtgtgtggtggattctccctgggcctcagtgtgcccatctgtaaaggggcagctgacagtttgtggcatcttgccaagggtccctgtgtgtgtgtatgtgtgtgcatgtgtgcgtgtctccatgtgcgtccatatttaacatgtaaaaatgtcccccccgctccgtcccccaaacatgttgtacatttcaccatggccccctcatcatagcaataacattcccactgccaggggttcttgagccagccaggccctgccagtggggaaggaggccaagcagtgcctgcctatgaaatttcaacttttcctttcatacgtctttattacccaagtcttctcccgtccattccagtcaaatctgggctcactcaccccagcgagctctcaaatccctctccaactgcctaaggccctttgtgtaaggtgtcttaatactgtcctttttttttttttaacagtgttttgtagatttcagatgactatgcagaggcctgggggacccctggctctgggccgggcctggggctccgaaattccaaggcccagacttgcggggggtgggggggtatccagaattggttgtaaatactttgcatattgtctgattaaacacaaacagacctcagaatctgatcaacagtttattgaacatctactgtgtgctggaaagcgagatggggcggaatgcgagaacaaactaccccttgaggggtctttgggcagcactagtagctggagggcttcaggccaaggcaggggtgacatcagattggagacagctacggcagaatgtggctgtttgtgaacatctgcacctgtgttagggggtgagcacctgggagaaggacaaggcacatcacaggacttccctgagcatgacaagttcaggactcaaatgtccgtggtggatggtagcagtgacattggggagtgggtggggctgtcaagcctgcctagaggagatcacaaatacacgacgagaataccgttgtgtgtgctcttcgtgtgtttcctaggagtgcagggcaggggtgctgggtcgatccacaaaagtcctgaaaacgctgaagaaaaatccaaagacccttcccctcctccctccttccccaccaccgaagcacacagtcttgaaggttgatttgcaaccgtctatacaaacacatttattttacacaaatatacatcagatcacacacctgtgcaccggagtcaactctggccacgacattgcttaattaaaaacaaatttcaaaaactgga

SEQ ID NO: 186292 - DNA, 4321 bp, Homo sapiens
  Payload ID: 16684
  Gene Symbol: SRC
  Gene Name: SRC proto-oncogene, non-receptor tyrosine kinase
  Uniprot ID: P12931
  ENST ID: ENST00000373567
  CDS Start-End: 40-1650
catcgaggttttgagaggctaactctcccaaaaaggaccatgggtagcaacaagagcaagcccaaggatgccagccagcggcgccgcagcctggagcccgccgagaacgtgcacggcgctggcgggggcgctttccccgcctcgcagacccccagcaagccagcctcggccgacggccaccgcggccccagcgcggccttcgcccccgcggccgccgagcccaagctgttcggaggcttcaactcctcggacaccgtcacctccccgcagagggcgggcccgctggccggtggagtgaccacctttgtggccctctatgactatgagtctaggacggagacagacctgtccttcaagaaaggcgagcggctccagattgtcaacaacacagagggagactggtggctggcccactcgctcagcacaggacagacaggctacatccccagcaactacgtggcgccctccgactccatccaggctgaggagtggtattttggcaagatcaccagacgggagtcagagcggttactgctcaatgcagagaacccgagagggaccttcctcgtgcgagaaagtgagaccacgaaaggtgcctactgcctctcagtgtctgacttcgacaacgccaagggcctcaacgtgaagcactacaagatccgcaagctggacagcggcggcttctacatcacctcccgcacccagttcaacagcctgcagcagctggtggcctactactccaaacacgccgatggcctgtgccaccgcctcaccaccgtgtgccccacgtccaagccgcagactcagggcctggccaaggatgcctgggagatccctcgggagtcgctgcggctggaggtcaagctgggccagggctgctttggcgaggtgtggatggggacctggaacggtaccaccagggtggccatcaaaaccctgaagcctggcacgatgtctccagaggccttcctgcaggaggcccaggtcatgaagaagctgaggcatgagaagctggtgcagttgtatgctgtggtttcagaggagcccatttacatcgtcacggagtacatgagcaaggggagtttgctggactttctcaagggggagacaggcaagtacctgcggctgcctcagctggtggacatggctgctcagatcgcctcaggcatggcgtacgtggagcggatgaactacgtccaccgggaccttcgtgcagccaacatcctggtgggagagaacctggtgtgcaaagtggcggactttgggctggctcggctcattgaagacaatgagtacacggcgcggcaaggtgccaaattccccatcaagtggacggctccagaagctgccctctatggccgcttcaccatcaagtcggacgtgtggtccttcgggatcctgctgactgagctcaccacaaagggacgggtgccctaccctgggatggtgaaccgcgaggtgctggaccaggtggagcggggctaccggatgccctgcccgccggagtgtcccgagtccctgcacgacctcatgtgccagtgctggcggaaggagcctgaggagcggcccaccttcgagtacctgcaggccttcctggaggactacttcacgtccaccgagccccagtaccagcccggggagaacctctaggcacaggcgggcccagaccggcttctcggcttggatcctgggctgggtggcccctgtctcggggcttgccccactctgcctgcctgctgttggtcctctctctgtggggctgaattgccaggggcgaggcccttcctctttggtggcatggaaggggcttctggacctagggtggcctgagagggcggtgggtatgcgagaccagcacggtgactctgtccagctcccgctgtggccgcacgcctctccctgcactccctcctggagctctgtgggtctctggaagaggaaccaggagaagggctggggccggggctgagggtgcccttttccagcctcagcctactccgctcactgaactccttccccacttctgtgccacccccggtctatgtcgagagctggccaaagagcctttccaaagaggagcgatgggcccctggccccgcctgcctgccaccctgccccttgccatccattctggaaacacctgtaggcagaggctgccgagacagaccctctgccgctgcttccaggctgggcagcacaaggccttgcctggcctgatgatggtgggtgggtgggatgagtaccccctcaaaccctgccctccttagacctgagggacccttcgagatcatcacttccttgcccccatttcacccatggggagacagttgagagcggggatgtgacatgcccaaggccacggagcagttcagagtggaggcgggcttggaacccggtgctccctctgtcatcctcaggaaccaacaattcgtcggaggcatcatggaaagactgggacagcccaggaaacaaggggtctgaggatgcattcgagatggcagattcccactgccgctgcccgctcagcccagctgttgggaacagcatggaggcagatgtggggctgagctggggaatcagggtaaaaggtgcaggtgtggagagagaggcttcaatcggcttgtgggtgatgtttgaccttcagagccagccggctatgaaagggagcgagcccctcggctctggaggcaatcaagcagacatagaagagccaagagtccaggaggccctggtcctggcctccttccccgtactttgtcccgtggcatttcaattcctggccctgttctcctccccaagtcggcaccctttaactcatgaggagggaaaagagtgcctaagcgggggtgaaagaggacgtgttacccactgccatgcaccaggactggctgtgtaaccttgggtggcccctgctgtctctctgggctgcagagtctgccccacatgtggccatggcctctgcaactgctcagctctggtccaggccctgtggcaggacacacatggtgagcctagccctgggacatcaggagactgggctctggctctgttcggcctttgggtgtgtggtggattctccctgggcctcagtgtgcccatctgtaaaggggcagctgacagtttgtggcatcttgccaagggtccctgtgtgtgtgtatgtgtgtgcatgtgtgcgtgtctccatgtgcgtccatatttaacatgtaaaaatgtcccccccgctccgtcccccaaacatgttgtacatttcaccatggccccctcatcatagcaataacattcccactgccaggggttcttgagccagccaggccctgccagtggggaaggaggccaagcagtgcctgcctatgaaatttcaacttttcctttcatacgtctttattacccaagtcttctcccgtccattccagtcaaatctgggctcactcaccccagcgagctctcaaatccctctccaactgcctaaggccctttgtgtaaggtgtcttaatactgtcctttttttttttttaacagtgttttgtagatttcagatgactatgcagaggcctgggggacccctggctctgggccgggcctggggctccgaaattccaaggcccagacttgcggggggtgggggggtatccagaattggttgtaaatactttgcatattgtctgattaaacacaaacagacctcagaatctgatcaacagtttattgaacatctactgtgtgctggaaagcgagatggggcggaatgcgagaacaaactaccccttgaggggtctttgggcagcactagtagctggagggcttcaggccaaggcaggggtgacatcagattggagacagctacggcagaatgtggctgtttgtgaacatctgcacctgtgttagggggtgagcacctgggagaaggacaaggcacatcacaggacttccctgagcatgacaagttcaggactcaaatgtccgtggtggatggtagcagtgacattggggagtgggtggggctgtcaagcctgcctagaggagatcacaaatacacgacgagaataccgttgtgtgtgctcttcgtgtgtttcctaggagtgcagggcaggggtgctgggtcgatccacaaaagtcctgaaaacgctgaagaaaaatccaaagacccttcccctcctccctccttccccaccaccgaagcacacagtcttgaaggttgatttgcaaccgtctatacaaacacatttattttacacaaatatacatcagatcacacacctgtgcaccggagtcaactctggccacgacattgcttaattaaaaacaaatttcaaaaactgga

SEQ ID NO: 186293 - DNA, 4630 bp, Homo sapiens
  Payload ID: 16684
  Gene Symbol: SRC
  Gene Name: SRC proto-oncogene, non-receptor tyrosine kinase
  Uniprot ID: P12931
  ENST ID: ENST00000373578
  CDS Start-End: 349-1959
gccggagcggccaggccgccgtctgcccgtcccgctggacgtcccgcggtccgccctcccgtgcgtccgtctgccggtgagcccgcccgcccgccggcccagaacagagaacagaagctcagagaagtgaagcaacttgcccagctatgagagacagagccaggatttgaaaccagatgaggacgctgaggcccagagagggaaagccacttgcctagggacacacagcggggagaggtggagcagggcctctatttcgagacccctgactccacacctggtgtttgtgccaagaccccaggctgcctcccaggtcctctgggacagcccctgccttctaccaggaccatgggtagcaacaagagcaagcccaaggatgccagccagcggcgccgcagcctggagcccgccgagaacgtgcacggcgctggcgggggcgctttccccgcctcgcagacccccagcaagccagcctcggccgacggccaccgcggccccagcgcggccttcgcccccgcggccgccgagcccaagctgttcggaggcttcaactcctcggacaccgtcacctccccgcagagggcgggcccgctggccggtggagtgaccacctttgtggccctctatgactatgagtctaggacggagacagacctgtccttcaagaaaggcgagcggctccagattgtcaacaacacagagggagactggtggctggcccactcgctcagcacaggacagacaggctacatccccagcaactacgtggcgccctccgactccatccaggctgaggagtggtattttggcaagatcaccagacgggagtcagagcggttactgctcaatgcagagaacccgagagggaccttcctcgtgcgagaaagtgagaccacgaaaggtgcctactgcctctcagtgtctgacttcgacaacgccaagggcctcaacgtgaagcactacaagatccgcaagctggacagcggcggcttctacatcacctcccgcacccagttcaacagcctgcagcagctggtggcctactactccaaacacgccgatggcctgtgccaccgcctcaccaccgtgtgccccacgtccaagccgcagactcagggcctggccaaggatgcctgggagatccctcgggagtcgctgcggctggaggtcaagctgggccagggctgctttggcgaggtgtggatggggacctggaacggtaccaccagggtggccatcaaaaccctgaagcctggcacgatgtctccagaggccttcctgcaggaggcccaggtcatgaagaagctgaggcatgagaagctggtgcagttgtatgctgtggtttcagaggagcccatttacatcgtcacggagtacatgagcaaggggagtttgctggactttctcaagggggagacaggcaagtacctgcggctgcctcagctggtggacatggctgctcagatcgcctcaggcatggcgtacgtggagcggatgaactacgtccaccgggaccttcgtgcagccaacatcctggtgggagagaacctggtgtgcaaagtggcggactttgggctggctcggctcattgaagacaatgagtacacggcgcggcaaggtgccaaattccccatcaagtggacggctccagaagctgccctctatggccgcttcaccatcaagtcggacgtgtggtccttcgggatcctgctgactgagctcaccacaaagggacgggtgccctaccctgggatggtgaaccgcgaggtgctggaccaggtggagcggggctaccggatgccctgcccgccggagtgtcccgagtccctgcacgacctcatgtgccagtgctggcggaaggagcctgaggagcggcccaccttcgagtacctgcaggccttcctggaggactacttcacgtccaccgagccccagtaccagcccggggagaacctctaggcacaggcgggcccagaccggcttctcggcttggatcctgggctgggtggcccctgtctcggggcttgccccactctgcctgcctgctgttggtcctctctctgtggggctgaattgccaggggcgaggcccttcctctttggtggcatggaaggggcttctggacctagggtggcctgagagggcggtgggtatgcgagaccagcacggtgactctgtccagctcccgctgtggccgcacgcctctccctgcactccctcctggagctctgtgggtctctggaagaggaaccaggagaagggctggggccggggctgagggtgcccttttccagcctcagcctactccgctcactgaactccttccccacttctgtgccacccccggtctatgtcgagagctggccaaagagcctttccaaagaggagcgatgggcccctggccccgcctgcctgccaccctgccccttgccatccattctggaaacacctgtaggcagaggctgccgagacagaccctctgccgctgcttccaggctgggcagcacaaggccttgcctggcctgatgatggtgggtgggtgggatgagtaccccctcaaaccctgccctccttagacctgagggacccttcgagatcatcacttccttgcccccatttcacccatggggagacagttgagagcggggatgtgacatgcccaaggccacggagcagttcagagtggaggcgggcttggaacccggtgctccctctgtcatcctcaggaaccaacaattcgtcggaggcatcatggaaagactgggacagcccaggaaacaaggggtctgaggatgcattcgagatggcagattcccactgccgctgcccgctcagcccagctgttgggaacagcatggaggcagatgtggggctgagctggggaatcagggtaaaaggtgcaggtgtggagagagaggcttcaatcggcttgtgggtgatgtttgaccttcagagccagccggctatgaaagggagcgagcccctcggctctggaggcaatcaagcagacatagaagagccaagagtccaggaggccctggtcctggcctccttccccgtactttgtcccgtggcatttcaattcctggccctgttctcctccccaagtcggcaccctttaactcatgaggagggaaaagagtgcctaagcgggggtgaaagaggacgtgttacccactgccatgcaccaggactggctgtgtaaccttgggtggcccctgctgtctctctgggctgcagagtctgccccacatgtggccatggcctctgcaactgctcagctctggtccaggccctgtggcaggacacacatggtgagcctagccctgggacatcaggagactgggctctggctctgttcggcctttgggtgtgtggtggattctccctgggcctcagtgtgcccatctgtaaaggggcagctgacagtttgtggcatcttgccaagggtccctgtgtgtgtgtatgtgtgtgcatgtgtgcgtgtctccatgtgcgtccatatttaacatgtaaaaatgtcccccccgctccgtcccccaaacatgttgtacatttcaccatggccccctcatcatagcaataacattcccactgccaggggttcttgagccagccaggccctgccagtggggaaggaggccaagcagtgcctgcctatgaaatttcaacttttcctttcatacgtctttattacccaagtcttctcccgtccattccagtcaaatctgggctcactcaccccagcgagctctcaaatccctctccaactgcctaaggccctttgtgtaaggtgtcttaatactgtcctttttttttttttaacagtgttttgtagatttcagatgactatgcagaggcctgggggacccctggctctgggccgggcctggggctccgaaattccaaggcccagacttgcggggggtgggggggtatccagaattggttgtaaatactttgcatattgtctgattaaacacaaacagacctcagaatctgatcaacagtttattgaacatctactgtgtgctggaaagcgagatggggcggaatgcgagaacaaactaccccttgaggggtctttgggcagcactagtagctggagggcttcaggccaaggcaggggtgacatcagattggagacagctacggcagaatgtggctgtttgtgaacatctgcacctgtgttagggggtgagcacctgggagaaggacaaggcacatcacaggacttccctgagcatgacaagttcaggactcaaatgtccgtggtggatggtagcagtgacattggggagtgggtggggctgtcaagcctgcctagaggagatcacaaatacacgacgagaataccgttgtgtgtgctcttcgtgtgtttcctaggagtgcagggcaggggtgctgggtcgatccacaaaagtcctgaaaacgctgaagaaaaatccaaagacccttcccctcctccctccttccccaccaccgaagcacacagtcttgaaggttgatttgcaaccgtctatacaaacacatttattttacacaaatatacatcagatcacacacctgtgcaccggagtcaactctggccacgacattgcttaattaaaaacaaatttcaaaaactgga

SEQ ID NO: 186294 - DNA, 3451 bp, Homo sapiens
  Payload ID: 16685
  Gene Symbol: SLA
  Gene Name: Src-like-adaptor
  Uniprot ID: Q13239
  ENST ID: ENST00000338087
  CDS Start-End: 821-1651
cacacacacactggaaactcctgcatactcctcttactataatctgtcaccaaagactggatattcctgtgctggggctcgtgccagcgcctcgggctgccaggtgctgctttccaactcccacatgggctgccctccccctactgctacccacagggcccccactccacctgctcccagacgaggccaactcctggccaagcttaggggcacagcggaggcgctctgtttctgatttttctcgccttccttggagatgcctgtgcttggaagggaaggcagaacattgcatcttggaacaaatctgcttttgatcatgcaaatgaatgcctggataatgtaggcagactgtcaatttcaccagttagaaagaaagagaaaagggggagaaattccccatgacagcgactgatgaagaatttcaatagaaagctgctacttcagaaaataagatcatttgctgcgaatggagaacatctcaggcagccctgatgctccaccgtccttgcagagagaagcttgctcagagtggttactgaaaacaggaacctgcccttctgcaagccctgtgccttcctcgttcctagcagaggaagtatgcggccagtttagcaactgcagttcttctgtgtagcatgggctgcttctccacaaccgcgagaagcccggctgcctgtttattctggagcagcagcagttgacagacggagaggcagtgactctgcacccagcaatccctctgcagacagctcccacaggagtcatgcccagtgtgtgaaggctctgggcatcaccagcggccccagggaaaaagaaagaaatgggaaacagcatgaaatccacccctgcgcctgccgagaggcccctgcccaacccggagggactggatagcgacttccttgccgtgctaagtgactacccgtctcctgacatcagccccccgatattccgccgaggggagaaactgcgtgtgatttctgatgaagggggctggtggaaagctatttctcttagcactggtcgagagagttacatccctggaatatgtgtggccagagtttaccatggctggctgtttgagggcctgggcagagacaaggccgaggagctgctgcagctgccagacacaaaggtcggctccttcatgatcagagagagtgagaccaagaaagggttttactcactgtcggtgagacacaggcaggtaaagcattaccgcattttccgtctgcccaacaactggtactacatttccccgaggctcaccttccagtgcctggaggacctggtgaaccactattctgaggtggctgatggcctgtgctgtgtgctcaccacgccctgcctgacacaaagcacggctgccccagcagtgagggcctccagctcacctgtcaccttgcgtcagaagactgtggactggaggagagtgtccagactgcaggaggaccccgagggaacagagaacccgcttggggtagacgagtcccttttcagctatggccttcgagagagcattgcctcttacctgtccctgaccagtgaggacaacacctcctttgatcgaaagaagaaaagcatctccctgatgtatggtggcagcaagagaaagagctcattcttctcatcaccaccttactttgaggactagccaagaacagacacaatggttcatgcccaaaaggaacagaagttccaactattgcctgggatcttgcgaaaagcgaggttccctgatccctgggagcctcacgtattttagaagccaagagaagccacatggagactcaaattcgcatcttctctatccacatcatgaccaaaggaacccctccctggtgtctgatcagggctgtggcatcacgaaacattggatcatgacatgtcgggcgatgcttggaagagcccagcatgtatgtatgcacacattgtgtgtgtgggaaggacaaagccactctcacaagaaagggcaccaggactgctctccaaggaactggacctgtccagacagttacactccaaggtcattggagagaacttctgtatgggcaagcctgagagggagaggaaacaaaagctgtgtcctggcagaaggtctgggtttgcagatgggtgccctgaatggaactactttaactaatccatagggacttctggtatgctttcctctctttttaaaggaacttcgtgacactaaacattagcccaaaggacttcttagccttcaattgggagatacctttggtctgctcctgcaccaaagccatatgggtggaagtcagttggcctccctggttctgcagagggccagaagaatgagagagaggaagactgctggcagggaaatcgaggaggcgagactagaactgcaccagcttccctgatgtctgcagccatggctttgcagcgcagacagagcttctctgggatgctgggattcttgcctgtatgaatgcatcaagtattcatttattgcccgaataggcattgcattaagtcctctgtaaggtgtcaggcaagccaaaaaaaaaaaaaagatgcgtaagtcctaacccccaacagaggtgttcacagtgtagacagggaaaaaatgtataaacaaatgtgtaaaaagagaaatcagctcatggcttaggatggaattagagacaggtgagggacactcaggagctcattttccagctgctcttcagagtggaagggctggctggatcgggtaggtaagaatagctggattttttagaaaagaaatggatacagtctaaagaattaactcacccggtactttattctaagaagggtctggcatccatatgaggaaaaatgctcagctccaggaaagatggggagtccaagtggattaatgatgtcatgcataattttaagagacaagggagaaaacacaatgtatagccagagaaggagaagctcccatccaaatcctactaggaagagagtgggctgcagatgaatctgtgactcatgtttccctgtttcaaagggatcctggggaaggaggggaacatgcttgcagtatctctccctgtctgtctgctcacataagcattccgtccatctgagctcatcgtgctactggtatgtgtatgtgcagttacacagttttctgtatcatagattctagtgtgtttatacaaggagacatctgtggtttccccaaccgttccaaaaggctatttcaaaggaaccagccaacgtatgagaaatgaatgtaacactgtggacattgacttcccgcataaggcagggtgaccccctgaactccagatgtctgcacagtatcttatgtgttgttttccgttgtgacgaatgtgattggaacatttggggagcacccagagggatttctcagtgggaagcattacactttgctaaatcatgtatttattcctgattaaaacaaacctaataaatatttaacccttggcacaca

SEQ ID NO: 186295 - DNA, 2102 bp, Homo sapiens
  Payload ID: 16685
  Gene Symbol: SLA
  Gene Name: Src-like-adaptor
  Uniprot ID: Q13239
  ENST ID: ENST00000395352
  CDS Start-End: 350-1231
actgctacccacagggcccccactccacctgctcccagacgaggccaactcctggccaagcttaggggcacagcggaggcgctctgtttctgatttttctcgccttccttggagatgcctgtgcttggaagggaaggcagaacattgcatcttggaacaaatctgcttttgatcatgcaaatgaatgcctggataatgtaggcagactgtcaatttcaccagttagaaagaaagagaaaagggggagaaattccccatgacagcgactgatgaagaatttcaatagaaagctgctacttcagaaaataagatcatttgctgcgaatggagaacatctcaggcagccctgatgctccaccggctctgggcatcaccagcggccccagggaaaaagaaagaaatgggaaacagcatgaaatccacccctgcgcctgccgagaggcccctgcccaacccggagggactggatagcgacttccttgccgtgctaagtgactacccgtctcctgacatcagccccccgatattccgccgaggggagaaactgcgtgtgatttctgatgaagggggctggtggaaagctatttctcttagcactggtcgagagagttacatccctggaatatgtgtggccagagtttaccatggctggctgtttgagggcctgggcagagacaaggccgaggagctgctgcagctgccagacacaaaggtcggctccttcatgatcagagagagtgagaccaagaaagggttttactcactgtcggtgagacacaggcaggtaaagcattaccgcattttccgtctgcccaacaactggtactacatttccccgaggctcaccttccagtgcctggaggacctggtgaaccactattctgaggtggctgatggcctgtgctgtgtgctcaccacgccctgcctgacacaaagcacggctgccccagcagtgagggcctccagctcacctgtcaccttgcgtcagaagactgtggactggaggagagtgtccagactgcaggaggaccccgagggaacagagaacccgcttggggtagacgagtcccttttcagctatggccttcgagagagcattgcctcttacctgtccctgaccagtgaggacaacacctcctttgatcgaaagaagaaaagcatctccctgatgtatggtggcagcaagagaaagagctcattcttctcatcaccaccttactttgaggactagccaagaacagacacaatggttcatgcccaaaaggaacagaagttccaactattgcctgggatcttgcgaaaagcgaggttccctgatccctgggagcctcacgtattttagaagccaagagaagccacatggagactcaaattcgcatcttctctatccacatcatgaccaaaggaacccctccctggtgtctgatcagggctgtggcatcacgaaacattggatcatgacatgtcgggcgatgcttggaagagcccagcatgtatgtatgcacacattgtgtgtgtgggaaggacaaagccactctcacaagaaagggcaccaggactgctctccaaggaactggacctgtccagacagttacactccaaggtcattggagagaacttctgtatgggcaagcctgagagggagaggaaacaaaagctgtgtcctggcagaaggtctgggtttgcagatgggtgccctgaatggaactactttaactaatccatagggacttctggtatgctttcctctctttttaaaggaacttcgtgacactaaacattagcccaaaggacttcttagccttcaattgggagatacctttggtctgctcctgcaccaaagccatatgggtggaagtcagttggcctccctggttctgcagagggccagaagaatgagagagaggaagactgctggcagggaaatcgaggaggcgagactagaactgcaccagcttccctgatgtctgcagccatggctttgcagcgcagacagagcttctctgggatgctgggattcttgcctgtatgaatgcatcaagtattcatttattgcccgaataggcattgcattaagtcctctgtaaggtgtcaggcaagcc

SEQ ID NO: 186296 - DNA, 1914 bp, Homo sapiens
  Payload ID: 16685
  Gene Symbol: SLA
  Gene Name: Src-like-adaptor
  Uniprot ID: Q13239
  ENST ID: ENST00000427060
  CDS Start-End: 79-1029
aaccaatcttcaccaatctcatcttcacatataaacagccgcctttcaagaagcaagctgccagaaaaatgatgcacgatgctctctaaactgggtcattctccacttggagggctcagggcacggttgactttccccgtctgtctcctataccacaggctctgggcatcaccagcggccccagggaaaaagaaagaaatgggaaacagcatgaaatccacccctgcgcctgccgagaggcccctgcccaacccggagggactggatagcgacttccttgccgtgctaagtgactacccgtctcctgacatcagccccccgatattccgccgaggggagaaactgcgtgtgatttctgatgaagggggctggtggaaagctatttctcttagcactggtcgagagagttacatccctggaatatgtgtggccagagtttaccatggctggctgtttgagggcctgggcagagacaaggccgaggagctgctgcagctgccagacacaaaggtcggctccttcatgatcagagagagtgagaccaagaaagggttttactcactgtcggtgagacacaggcaggtaaagcattaccgcattttccgtctgcccaacaactggtactacatttccccgaggctcaccttccagtgcctggaggacctggtgaaccactattctgaggtggctgatggcctgtgctgtgtgctcaccacgccctgcctgacacaaagcacggctgccccagcagtgagggcctccagctcacctgtcaccttgcgtcagaagactgtggactggaggagagtgtccagactgcaggaggaccccgagggaacagagaacccgcttggggtagacgagtcccttttcagctatggccttcgagagagcattgcctcttacctgtccctgaccagtgaggacaacacctcctttgatcgaaagaagaaaagcatctccctgatgtatggtggcagcaagagaaagagctcattcttctcatcaccaccttactttgaggactagccaagaacagacacaatggttcatgcccaaaaggaacagaagttccaactattgcctgggatcttgcgaaaagcgaggttccctgatccctgggagcctcacgtattttagaagccaagagaagccacatggagactcaaattcgcatcttctctatccacatcatgaccaaaggaacccctccctggtgtctgatcagggctgtggcatcacgaaacattggatcatgacatgtcgggcgatgcttggaagagcccagcatgtatgtatgcacacattgtgtgtgtgggaaggacaaagccactctcacaagaaagggcaccaggactgctctccaaggaactggacctgtccagacagttacactccaaggtcattggagagaacttctgtatgggcaagcctgagagggagaggaaacaaaagctgtgtcctggcagaaggtctgggtttgcagatgggtgccctgaatggaactactttaactaatccatagggacttctggtatgctttcctctctttttaaaggaacttcgtgacactaaacattagcccaaaggacttcttagccttcaattgggagatacctttggtctgctcctgcaccaaagccatatgggtggaagtcagttggcctccctggttctgcagagggccagaagaatgagagagaggaagactgctggcagggaaatcgaggaggcgagactagaactgcaccagcttccctgatgtctgcagccatggctttgcagcgcagacagagcttctctgggatgctgggattcttgcctgtatgaatgcatcaagtattcatttattgcccgaataggcattgcattaagtcctctgtaaggtgtcaggcaagccaaaaaaaaaaaaaa

SEQ ID NO: 186297 - DNA, 1003 bp, Homo sapiens
  Payload ID: 16685
  Gene Symbol: SLA
  Gene Name: Src-like-adaptor
  Uniprot ID: Q13239
  ENST ID: ENST00000524345
  CDS Start-End: 340-846
agaaagctgctacttcagaaaataagatcatttgctgcgaatggagaacatctcaggcagccctgatgctccaccggactggatagcgacttccttgccgtgctaagtgactacccgtctcctgacatcagccccccgatattccgccgaggggagaaactgcgtgtgatttctgatgaagggggctggtggaaagctatttctcttagcactggtcgagagagttacatccctggaatatgtgtggccagagtttaccatggctggctgtttgagggcctgggcagagacaaggccgaggagctgctgcagctgccagacacaaaggtcggctccttcatgatcagagagagtgagaccaagaaagggttttactcactgtcggtgagacacaggcaggtaaagcattaccgcattttccgtctgcccaacaactggtactacatttccccgaggctcaccttccagtgcctggaggacctggtgaaccactattctgaggtggctgatggcctgtgctgtgtgctcaccacgccctgcctgacacaaagcacggctgccccagcagtgagggcctccagctcacctgtcaccttgcgtcagaagactgtggactggaggagagtgtccagactgcaggaggaccccgagggaacagagaacccgcttggggtagacgagtcccttttcagctatggccttcgagagagcattgcctcttacctgtccctgaccagtgaggacaacacctcctttgatcgaaagaagaaaagcatctccctgatgtatggtggcagcaagagaaagagctcattcttctcatcaccaccttactttgaggactagccaagaacagacacaatggttcatgcccaaaaggaacagaagttccaactattgcctgggatcttgcgaaaagcgaggttccctgatccctgggagcctcacgtattttagaagccaagagaagccacatggagactcaaattcgcatcttctctat

SEQ ID NO: 186298 - DNA, 582 bp, Homo sapiens
  Payload ID: 16685
  Gene Symbol: SLA
  Gene Name: Src-like-adaptor
  ENST ID: ENST00000523610
  CDS Start-End: 462-582
aactttgctgtcattgggaccccctgggtgggccataggtggcctggggtggtatgtgggggagggtcttcagagggacttgatggatcctgtacccaccctccgtctttggtctgaagaaaatgggtgggtctctgctggtgtccttgcagagagaagcttgctcagagtggttactgaaaacaggaacctgcccttctgcaagccctgtgccttcctcgttcctagcagaggaagtatgcggccagtttagcaactgcagttcttctgtgtagcatgggctgcttctccacaaccgcgagaagcccggctgcctgtttattctggagcagcagcagttgacagacggagaggcagtgactctgcacccagcaatccctctgcagacagctcccacaggagtcatgcccagtgtgtgaaggctctgggcatcaccagcggccccagggaaaaagaaagaaatgggaaacagcatgaaatccacccctgcgcctgccgagaggcccctgcccaacccggagggactggatagcgacttccttgccgtgctaagtgactacccgtctcctgacatcagccccc

SEQ ID NO: 186299 - DNA, 896 bp, Homo sapiens
  Payload ID: 16685
  Gene Symbol: SLA
  Gene Name: Src-like-adaptor
  Uniprot ID: Q13239
  ENST ID: ENST00000517648
  CDS Start-End: 50-799
agaaaataagatcatttgctgcgaatggagaacatctcaggcagccctgatgctccaccggctctgggcatcaccagcggccccagggaaaaagaaagaaatgggaaacagcatgaaatccacccctgcgcctgccgagaggcccctgcccaacccggagggactggatagcgacttccttgccgtgctaagtgactacccgtctcctgacatcagccccccgatattccgccgaggggagaaactgcgtgtgatttctgatgaagggggctggtggaaagctatttctcttagcactggtcgagagagttacatccctggaatatgtgtggccagagtttaccatggctggctgtttgagggcctgggcagagacaaggccgaggagctgctgcagctgccagacacaaaggtcggctccttcatgatcagagagagtgagaccaagaaagaggtggctgatggcctgtgctgtgtgctcaccacgccctgcctgacacaaagcacggctgccccagcagtgagggcctccagctcacctgtcaccttgcgtcagaagactgtggactggaggagagtgtccagactgcaggaggaccccgagggaacagagaacccgcttggggtagacgagtcccttttcagctatggccttcgagagagcattgcctcttacctgtccctgaccagtgaggacaacacctcctttgatcgaaagaagaaaagcatctccctgatgtatggtggcagcaagagaaagagctcattcttctcatcaccaccttactttgaggactagccaagaacagacacaatggttcatgcccaaaaggaacagaagttccaactattgcctgggatcttgcgaaaagcgaggttccctgatccctgggagc

SEQ ID NO: 186300 - DNA, 561 bp, Homo sapiens
  Payload ID: 16685
  Gene Symbol: SLA
  Gene Name: Src-like-adaptor
  ENST ID: ENST00000519747
  CDS Start-End: 477-561
aaaataagatcatttgctgcgaatggagaacatctcaggcagccctgatgctccaccgctaaatcccagtttgtggaatatgccttgctcaataaagttttactaaagaaatgacagggaataaattcagagcttcatctgtactagattctttcttgtccttgcagagagaagcttgctcagagtggttactgaaaacaggaacctgcccttctgcaagccctgtgccttcctcgttcctagcagaggaagtatgcggccagtttagcaactgcagttcttctgtgtagcatgggctgcttctccacaaccgcgagaagcccggctgcctgtttattctggagcagcagcagttgacagacggagaggcagtgactctgcacccagcaatccctctgcagacagctcccacaggagtcatgcccagtgtgtgaaggctctgggcatcaccagcggccccagggaaaaagaaagaaatgggaaacagcatgaaatccacccctgcgcctgccgagaggcccctgcccaacccggagggactggatagcgacttccttgccg

SEQ ID NO: 186301 - DNA, 563 bp, Homo sapiens
  Payload ID: 16685
  Gene Symbol: SLA
  Gene Name: Src-like-adaptor
  ENST ID: ENST00000519558
  CDS Start-End: 521-563
aagatcatttgctgcgaatggagaacatctcaggcagccctgatgctccaccgtccttgcagagagaagcttgctcagagtggttactgaaaacaggaacctgcccttctgcaagccctgtgccttcctcgttcctagcagaggaagtatgcggccagtttagcaactgcagttcttctgtgtagcatgggctgcttctccacaaccgcgagaagcccggctgcctgtttattctggagcagcagcagttgacagacggagaggcagtgactctgcacccagcaatccctctgcagacagctcccacaggagtcatgcccagtgtgtgaagcccggacacagcaccttctgtcacggagactgaactctgactggcaagacagaacgggtgggagtgcaagcaacagcagagaagactgttagcgtagaagaacccaggcctctaggactgactcaaactttctcatctcatgaccctgggctctgggcatcaccagcggccccagggaaaaagaaagaaatgggaaacagcatgaaatccacccctgcgcctgccgagaggc

SEQ ID NO: 186302 - DNA, 826 bp, Homo sapiens
  Payload ID: 16685
  Gene Symbol: SLA
  Gene Name: Src-like-adaptor
  ENST ID: ENST00000519341
  CDS Start-End: 553-826
attccccatgacagcgactgatgaagaatttcaatagaaagctgctacttcagaaaataagatcatttgctgcgaatggagaacatctcaggcagccctgatgctccaccgctggaggaggtcacgtgacattcacaggcatccagtcccagggtacctcctgctgcctggccccactgggtttatttgaatagtctgacttgatcaatccacagagccttctaacaattcaagtccttgcagagagaagcttgctcagagtggttactgaaaacaggaacctgcccttctgcaagccctgtgccttcctcgttcctagcagaggaagtatgcggccagtttagcaactgcagttcttctgtgtagcatgggctgcttctccacaaccgcgagaagcccggctgcctgtttattctggagcagcagcagttgacagacggagaggcagtgactctgcacccagcaatccctctgcagacagctcccacaggagtcatgcccagtgtgtgaaggctctgggcatcaccagcggccccagggaaaaagaaagaaatgggaaacagcatgaaatccacccctgcgcctgccgagaggcccctgcccaacccggagggactggatagcgacttccttgccgtgctaagtgactacccgtctcctgacatcagccccccgatattccgccgaggggagaaactgcgtgtgatttctgatgaagggggctggtggaaagctatttctcttagcactggtcgagagagttacatccctggaatatgtgtggccagagtttaccatggctggctgtttgagggcctgggcagag

SEQ ID NO: 186303 - DNA, 577 bp, Homo sapiens
  Payload ID: 16685
  Gene Symbol: SLA
  Gene Name: Src-like-adaptor
  ENST ID: ENST00000522432
  CDS Start-End: 224-391
atgcggccagtttagcaactgcagttcttctgtgtagcatgggctgcttctccacaaccgcgagaagcccggctgcctgtttattctggagcagcagcagttgacagacggagaggcagtgactctgcacccagcaatccctctgcagacagctcccacaggagtcatgcccagtgtgtgaaggctctgggcatcaccagcggccccagggaaaaagaaagaaatgggaaacagcatgaaatccacccctgcgcctgccgagaggcccctgcccaacccggagggggtgaccacacatggttcccagcagcccctgcagcaccgccctgggcggagttcactggcgcagatggctgccctgtctgccgagcctgacagggaagtggactgagccaggttcctgcgctgcctccaggactggatagcgacttccttgccgtgctaagtgactacccgtctcctgacatcagccccccgatattccgccgaggggagaaactgcgtgtgatttctgatgaagggggctggtggaaagctatttctcttagcactggtcgagagagttacatccctggaa

SEQ ID NO: 186304 - DNA, 586 bp, Homo sapiens
  Payload ID: 16685
  Gene Symbol: SLA
  Gene Name: Src-like-adaptor
  ENST ID: ENST00000521302
  CDS Start-End: 441-586
aagatcatttgctgcgaatggagaacatctcaggcagccctgatgctccaccgtccttgcagagagaagcttgctcagagtggttactgaaaacaggaacctgcccttctgcaagccctgtgccttcctcgttcctagcagaggaagtatgcggccagtttagcaactgcagttcttctgtgtagcatgggctgcttctccacaaccgcgagaagcccggctgcctgtttattctggagcagcagcagttgacagacggagaggcagtgactctgcacccagcaatccctctgcagacagctcccacaggagtcatgcccagtgtgtgaagaacaggaaaccaaggtccaagttcacacaaaggaaataacattggtccaaagaccggagggaaaataaggctctgggcatcaccagcggccccagggaaaaagaaagaaatgggaaacagcatgaaatccacccctgcgcctgccgagaggcccctgcccaacccggagggactggatagcgacttccttgccgtgctaagtgactacccgtctcctgacatcagccccccgatattccgccgaggggagaaact

SEQ ID NO: 186305 - DNA, 594 bp, Homo sapiens
  Payload ID: 16685
  Gene Symbol: SLA
  Gene Name: Src-like-adaptor
  ENST ID: ENST00000522119
  CDS Start-End: 119-594
gtcttcagagggacttgatggatcctgtacccaccctccgtctttggtctgaagaaaatgggtgggtctctgctggtggctctgggcatcaccagcggccccagggaaaaagaaagaaatgggaaacagcatgaaatccacccctgcgcctgccgagaggcccctgcccaacccggagggactggatagcgacttccttgccgtgctaagtgactacccgtctcctgacatcagccccccgatattccgccgaggggagaaactgcgtgtgatttctgatgaagggggctggtggaaagctatttctcttagcactggtcgagagagttacatccctggaatatgtgtggccagagtttaccatggctggctgtttgagggcctgggcagagacaaggccgaggagctgctgcagctgccagacacaaaggtcggctccttcatgatcagagagagtgagaccaagaaagggttttactcactgtcggtgagacacaggcaggtaaagcattaccgcattttccgtctgcccaacaactggtactacatttccccgaggctcaccttccagtgcctggaggacctggtgaacca

SEQ ID NO: 186306 - DNA, 2757 bp, Homo sapiens
  Payload ID: 16686
  Gene Symbol: SLA2
  Gene Name: Src-like-adaptor 2
  Uniprot ID: Q9H6Q3
  ENST ID: ENST00000262866
  CDS Start-End: 424-1209
gtgagaaccacagagtctgcagtcggagctagagctccaaggaccccacgcctgtgtctctgtgacagagctcaaagggccctgggccttccctccctggctcggctgtgcttgggagggttccccagtccagaatccctaaggagcatggggcagctgatccatccctggtgtacaaactgctgactgcagacagatgctgagctacccaaaccaacacctagcctctccctgaagatcctcccaggctgagagagttctgggtgtcctaggaccaaggacactggcagacttccagaagggcccccaaagccctaacctgtccagccagagcatgcgtctcagcagagctgtcttcccaagcctttgatgacaaaccaatttccctcgatgatgtgcttctgagtgctctgctgaggaacaatgggaagtctgcccagcagaagaaaatctctgccaagcccaagcttgagttcctctgtccaaggccagggacctgtgaccatggaagcagagagaagcaaggccacagccgtggccctgggcagtttcccggcaggtggcccggccgagctgtcgctgagactcggggagccattgaccatcgtctctgaggatggagactggtggacggtgctgtctgaagtctcaggcagagagtataacatccccagcgtccacgtggccaaagtctcccatgggtggctgtatgagggcctgagcagggagaaagcagaggaactgctgttgttacctgggaaccctggaggggccttcctcatccgggagagccagaccaggagaggctcttactctctgtcagtccgcctcagccgccctgcatcctgggaccggatcagacactacaggatccactgccttgacaatggctggctgtacatctcaccgcgcctcaccttcccctcactccaggccctggtggaccattactctgagctggcggatgacatctgctgcctactcaaggagccctgtgtcctgcagagggctggcccgctccctggcaaggatatacccctacctgtgactgtgcagaggacaccactcaactggaaagagctggacagctccctcctgttttctgaagctgccacaggggaggagtctcttctcagtgagggtctccgggagtccctcagcttctacatcagcctgaatgacgaggctgtctctttggatgatgcctaggcccaaaggagaggccaaaagggaaaccaaggctgcacacctagaaccccaattcagcctcctgggcaccccagaggcaaggctgtgcactcagggagggagggtgggacacagaggtgcatctagggtcccacctgtacccttgctctttcctctcttagcccttagaagtcacctacttccttccagtgccatgatcccacctgcgacctctagtgcgagtgcagagaaggtgggaccagggccagggttccaaaaagagaataagcctcctggggggtctgacctagttagttcttgagtttggggtttccagtaccatctggatgccctgcctgttgagccccattctacatccccaccattaaccaggccccacccacaaggtagaaacaacccctagagtcaacgagaaagtcattttcagaaaatctacaagtctcgttgagaccaccaccatacctcagaaggtaggactgtggcctagaagggaaaggaaagctgagatgatgtcttaccgtagcagcagatcttggatggtccaggctctatgtgacctccagagcaaagagaaagacttcggacagtctaggtcctcaaatgtcccccattgaggacaacagccccagctctttttcttttttttgagacggagtcttgccctgttgcccatgctggagtgcaatggcacgatctcagctcactgcaacctccatctcctggattcaaacaattctcctgcctcagcctccagaatagctgggattacaggcgtacaccaccatgcctggctaatttttttgtatttttagtagacatggggtttcaccacattggccaggctggtgtcgaactcctgacctcaggtgatccacccaccttggcctcccaaagtgctgggattacaggtgtgagccacggcacccagcctagctctcagatctctatttcattttgtggcttaccattccctagcacactggccttgccatcttgtggccgaataaaaaataacacctcttaagtctagcacactgcagtgaggccaggcacctcagtgctgggcaggggcatcagaaggtgctaagccctctctccacaatgccaagacggagaccacagcctacaccaaatccagcccttgatttccctgctgcctccataaacagaaagaggtctgctggatccgctaagggatcagggagaggaagaaagagggatggggtgggaggcaccccctccagtgctcctactggttcccaagctacaggtggggtgggaaaggctttatcaggtatcatcaacaggttctcaattaaagatttgatttattcaagtatgtgaaaacattctacaatggaaactcttattagatgctgcatgtactgtgctatggaccacgcacatacagccatgctgtttcagaagacttgaaatgccattgatagtttaaaaactctacacccgatggagaatcgaggaagacaatttaatgtttcatctgaatccagaggtgcatcaaattaaatgacagctccacttggcaaa

SEQ ID NO: 186307 - DNA, 2171 bp, Homo sapiens
  Payload ID: 16686
  Gene Symbol: SLA2
  Gene Name: Src-like-adaptor 2
  Uniprot ID: Q9H6Q3
  ENST ID: ENST00000360672
  CDS Start-End: 89-721
tgcgtctcagcagagctgtcttcccaagcctttgatgacaaaccaatttccctcgatgatgtgcttctgagtgctctgctgaggaacaatgggaagtctgcccagcagaagaaaatctctgccaagcccaagcttgagttcctctgtccaaggccagggacctgtgaccatggaagcagagagaagcaaggccacagccgtggccctgggcagtttcccggcaggtggcccggccgagctgtcgctgagactcggggagccattgaccatcgtctctgaggatggagactggtggacggtgctgtctgaagtctcaggcagagagtataacatccccagcgtccacgtggccaaagtctcccatgggtggctgtatgagggcctgagcagggagaaagcagaggaactgctgttgttacctgggaaccctggaggggccttcctcatccgggagagccagaccaggagaggctcttactctctgtcagtccgcctcagccgccctgcatcctgggaccggatcagacactacaggatccactgccttgacaatggctggctgtacatctcaccgcgcctcaccttcccctcactccaggccctggtggaccattactctgagggctggcccgctccctggcaaggatatacccctacctgtgactgtgcagaggacaccactcaactggaaagagctggacagctccctcctgttttctgaagctgccacaggggaggagtctcttctcagtgagggtctccgggagtccctcagcttctacatcagcctgaatgacgaggctgtctctttggatgatgcctaggcccaaaggagaggccaaaagggaaaccaaggctgcacacctagaaccccaattcagcctcctgggcaccccagaggcaaggctgtgcactcagggagggagggtgggacacagaggtgcatctagggtcccacctgtacccttgctctttcctctcttagcccttagaagtcacctacttccttccagtgccatgatcccacctgcgacctctagtgcgagtgcagagaaggtgggaccagggccagggttccaaaaagagaataagcctcctggggggtctgacctagttagttcttgagtttggggtttccagtaccatctggatgccctgcctgttgagccccattctacatccccaccattaaccaggccccacccacaaggtagaaacaacccctagagtcaacgagaaagtcattttcagaaaatctacaagtctcgttgagaccaccaccatacctcagaaggtaggactgtggcctagaagggaaaggaaagctgagatgatgtcttaccgtagcagcagatcttggatggtccaggctctatgtgacctccagagcaaagagaaagacttcggacagtctaggtcctcaaatgtcccccattgaggacaacagccccagctctttttcttttttttgagacggagtcttgccctgttgcccatgctggagtgcaatggcacgatctcagctcactgcaacctccatctcctggattcaaacaattctcctgcctcagcctccagaatagctgggattacaggcgtacaccaccatgcctggctaatttttttgtatttttagtagacatggggtttcaccacattggccaggctggtgtcgaactcctgacctcaggtgatccacccaccttggcctcccaaagtgctgggattacaggtgtgagccacggcacccagcctagctctcagatctctatttcattttgtggcttaccattccctagcacactggccttgccatcttgtggccgaataaaaaataacacctcttaagtctagcacactgcagtgaggccaggcacctcagtgctgggcaggggcatcagaaggtgctaagccctctctccacaatgccaagacggagaccacagcctacaccaaatccagcccttgatttccctgctgcctccataaacagaaagaggtctgctggatccgctaagggatcagggagaggaagaaagagggatggggtgggaggcaccccctccagtgctcctactggttcccaagctacaggtggggtgggaaaggctttatcaggtatcatcaacaggttctcaattaaagatttgatttattcaagtatgtgaaaa

SEQ ID NO: 186308 - DNA, 1516 bp, Homo sapiens
  Payload ID: 16687
  Gene Symbol: SRMS
  Gene Name: src-related kinase lacking C-terminal regulatory tyrosine and N-terminal myristylation sites
  Uniprot ID: Q9H3Y6
  ENST ID: ENST00000217188
  CDS Start-End: 42-1508
ggctcccatggccctcgggcccagcgtggtgaccccgggggatggagccgttcctcaggaggcggctggccttcctgtccttcttctgggacaagatctggccggcgggcggcgagccggaccatggcacccccgggtccctggaccccaacactgacccagtgcccacgctccccgccgagccttgcagccccttccctcagctcttccttgcgctctatgacttcacggcgcggtgtggcggggagctgagtgtccgccgcggggacaggctctgtgccctcgaagaggggggcggctacatcttcgcacgcaggctttcgggccagcccagcgccgggctcgtgcccatcacccacgtggccaaggcttctcctgagacgctctcagaccaaccctggtactttagcggggtcagtcggacccaggcacagcagctgctcctctccccacccaacgaaccaggggccttcctcatccggcccagcgagagcagcctcgggggctactcactgtcagtccgggcccaggccaaggtctgccactaccgggtctccatggcagctgatggcagcctctacctgcagaagggacggctctttcccggcctggaggagctgctcacctactacaaggccaactggaagctgatccagaaccccctgctgcagccctgcatgccccagaaggccccgaggcaggacgtgtgggagcggccacactccgaattcgcccttgggaggaagctgggtgaaggctactttggggaggtgtgggaaggcctgtggctgggctccctgcccgtggcgatcaaggtcatcaagtcagccaacatgaagctcactgacctcgccaaggagatccagacactgaagggcctgcggcacgagcggctcatccggctgcacgcagtgtgctcgggcggggagcctgtgtacatcgtcacggaactcatgcgcaaggggaacctgcaggccttcctgggcacccccgagggccgggccctgcgtctgccgccactcctgggctttgcctgccaggtggctgagggcatgagctacctggaggagcagcgcgttgtgcaccgggacttggccgcccggaacgtgctcgtggacgacggcctggcctgcaaggtggctgacttcggcctggcccggctgctcaaggacgacatctactccccgagcagcagctccaagatcccggtcaagtggacagcgcctgaggcggccaattatcgtgtcttctcccagaagtcagacgtctggtccttcggcgtcctgctgcacgaggttttcacctatggccagtgtccctatgaagggatgaccaaccacgagacgctgcagcagatcatgcgagggtaccggctgccgcgcccggctgcctgcccggcggaggtctacgtgctcatgctggagtgctggaggagcagccccgaggaacggccctccttcgccacgctgcgggagaagctgcacgccatccacagatgccacccctgagtcctcac

SEQ ID NO: 186309 - DNA, 4394 bp, Homo sapiens
  Payload ID: 16688
  Gene Symbol: SCAP
  Gene Name: SREBF chaperone
  Uniprot ID: Q12770
  ENST ID: ENST00000265565
  CDS Start-End: 414-4253
acgctccgcccggcccggcccggcccggccgtccatacttccctccggtgtccaccagagggcgaacgggagacgcgaatgtggttcgactacgcatgcgcacgccgctgggcgcacgtgcggagggcggcggggcgggagggtaaaggtaggaggtgagaggtgaaggggcgggcacccggcggccaggagagagagggagggcgccacgcaccggactgcgggccgagagcgcgcacgccgcgctccgcccctgctgccgcccccgtcgccgccgccgccgccgccgcagcttgggaggtgctgccaccacaggtacctgcacatgttgttctttgtcagtgctgtcaagtgtgtgccagggtgatccatggtcactttccgggatggcagcaaggtgacttcggctgaggatgaccctgactgaaaggctgcgtgagaagatatctcgggccttctacaaccatgggctcctctgtgcatcctatcccatccccatcatcctcttcacagggttctgcatcttagcctgctgctacccactgctgaaactccccttgccaggaacaggacctgtggaattcaccacccctgtgaaggattactcgcccccacctgtggactctgaccgcaaacaaggagagcctactgagcagcctgagtggtatgtgggtgccccggtggcttatgtccagcagatatttgtgaagtcctcagtgtttccctggcacaagaacctcctggcagtagatgtatttcgttcacctttgtcccgggcattccaactggtggaggagatccggaaccacgtgctgagagacagctctgggatcaggagcttggaggagttgtgtctgcaagtgaccgacctgctgccaggccttaggaagctcaggaacctactccctgagcatggatgcctgctgctgtcccctgggaacttctggcagaatgactgggaacgcttccatgctgatcctgacatcattgggaccatccaccagcacgagcctaaaaccctgcagacttcagccacactcaaagacttgttatttggtgttcctgggaagtacagcggggtgagcctctacaccaggaagaggatggtctcctacaccatcaccctggtcttccagcactaccatgccaagttcctgggcagcctgcgtgcccgcctgatgcttctgcaccccagccccaactgcagccttcgggcggagagcctggtccacgtgcacttcaaggaggagattggtgtcgctgagctcatcccccttgtgaccacctacatcatcttgtttgcctacatctacttctccacgcggaagatcgacatggtcaagtccaagtgggggctggccctggctgccgtggtcacagtgctcagctcgctgctcatgtctgtgggactctgcacactcttcggcctgacgcccaccctcaatggcggcgagattttcccctaccttgtggtggttattgggttagagaatgtgttggtgctcaccaagtctgtggtctcaaccccggtagacctggaggtgaagctgcggatcgcccaaggcctaagcagcgagagctggtccatcatgaagaacatggccacggagctgggcatcatcctcatcggctacttcaccctagtgcccgccatccaggagttctgtctctttgctgtcgtggggctggtgtctgacttcttccttcagatgctgtttttcaccactgtcctgtccattgacattcgccggatggagctagcagacctgaacaagcgactgccccctgaggcctgcctgccctcagccaagccagtgggacagccaacgcgctacgagcggcagctggctgtgaggccgtccacaccccacaccatcacgttgcagccgtcttccttccgaaacctgcggctccccaagaggctgcgtgttgtctacttcctggcccgcacccgcctggcacagcgcctcatcatggctggcaccgttgtctggattggcatcctggtatacacagacccagcagggctgcgcaactacctcgctgcccaggtgacggaacagagcccattgggtgagggagccctggctcccatgcccgtgcctagtggcatgctgccccccagccacccggaccctgccttctccatcttcccacctgatgcccctaagctacctgagaaccagacgtcgccaggcgagtcacctgagcgtggaggtccagcagaggttgtccatgacagcccagtcccagaggtaacctgggggcctgaggatgaggaactttggaggaaattgtccttccgccactggccgacgctcttcagctattacaacatcacactggccaagaggtacatcagcctgctgcccgtcatcccagtcacgctccgcctgaacccgagggaggctctggagggccggcaccctcaggacggccgcagtgcctggcccccaccggggcccatacctgctgggcactgggaagcaggacccaagggcccaggtggggtgcaggcccatggagacgtcacgctgtacaaggtggcggcgctgggcctggccaccggcatcgtcttggtgctgctgctgctctgcctctaccgcgtgctatgcccgcgcaactacgggcagctgggtggtgggcccgggcggcggaggcgcggggagctgccctgcgacgactacggctatgcgccacccgagacggagatcgtgccgcttgtgctgcgcggccacctcatggacatcgagtgcctggccagcgacggcatgctgctggtgagctgctgcctggcaggccacgtctgcgtgtgggacgcgcagaccggggattgcctaacgcgcattccgcgcccaggcaggcagcgccgggacagtggcgtgggcagcgggcttgaggctcaggagagctgggaacgactttcagatggtgggaaggctggtccagaggagcctggggacagccctcccctgagacaccgcccccggggccctccgccgccttccctcttcggggaccagcctgacctcacctgcttaattgacaccaacttttcagcgcagcctcggtcctcacagcccactcagcccgagccccggcaccgggcggtctgtggccgctctcgggactccccaggctatgacttcagctgcctggtgcagcgggtgtaccaggaggaggggctggcggccgtctgcacaccagccctgcgcccaccctcgcctgggccggtgctgtcccaggcccctgaggacgagggtggctcccccgagaaaggctccccttccctcgcctgggcccccagtgccgagggttccatctggagcttggagctgcagggcaacctcatcgtggtggggcggagcagcggccggctggaggtgtgggacgccattgaaggggtgctgtgctgcagcagcgaggaggtctcctcaggcattaccgctctggtgttcttggacaaaaggattgtggctgcacggctcaacggttcccttgatttcttctccttggagacccacactgccctcagccccctgcagtttagagggaccccagggcggggcagttcccctgcctctccagtgtacagcagcagcgacacagtggcctgtcacctgacccacacagtgccctgtgcacaccaaaaacccatcacagccctgaaagccgctgctgggcgcttggtgactgggagccaagaccacacactgagagtgttccgtctggaggactcgtgctgcctcttcacccttcagggccactcaggggccatcacgaccgtgtacattgaccagaccatggtgctggccagtggaggacaagatggggccatctgcctgtgggatgtactgactggcagccgggtcagccatgtgtttgctcaccgtggggatgtcacctcccttacctgtaccacctcctgtgtcatcagcagtggcctggatgacctcatcagcatctgggaccgcagcacaggcatcaagttctactccattcagcaggacctgggctgtggtgcaagcttgggtgtcatctcagacaacctgctggtgactggcggccagggctgtgtctccttttgggacctaaactacggggacctgttacagacagtctacctggggaagaacagtgaggcccagcctgcccgccagatcctggtgctggacaacgctgccattgtctgcaactttggcagtgagctcagcctggtgtatgtgccctctgtgctggagaagctggactgagcgcagggcctccttgcccaggcaggaggctggggtgctgtgtgggggccaatgcactgaacctggacttgggggaaagagccgagtatcttccagccgctgcctcctgactgtaataatattaaacttttttaaaaaacc

SEQ ID NO: 186310 - DNA, 3430 bp, Homo sapiens
  Payload ID: 16688
  Gene Symbol: SCAP
  Gene Name: SREBF chaperone
  ENST ID: ENST00000320017
  CDS Start-End: 238-735
acccggcggccaggagagagagggagggcgccacgcaccggactgcgggccgagagcgcgcacgccgcgctccgcccctgctgccgcccccgtcgccgccgccgccgccgccgcagcttgggaggtgctgccaccacaggtacctgcacatgttgttctttgtcagtgctgtcaagtgtgtgccagggtgatccatggtcactttccgggatggcagcaaggtgacttcggctgaggatgaccctgactgaaaggctgcgtgagaagatatctcgggccttctacaaccatgggctcctctgtgcatcctatcccatccccatcatcctcttcacagggttctgcatcttagcctgctgctacccactgctgaaactccccttgccaggaacaggacctgtggaattcaccacccctgtgaaggattactcgcccccacctgtggactctgaccgcaaacaaggagagcctactgagcagcctgagtggcgagattttcccctaccttgtggtggttattgggttagagaatgtgttggtgctcaccaagtctgtggtctcaaccccggtagacctggaggtgaagctgcggatcgcccaaggcctaagcagcgagagctggtccatcatgaagaacatggccacggagctgggcatcatcctcatcggctacttcaccctagtgcccgccatccaggagttctgtctctttgctgtcgtggggctggtgtctgacttcttccttcagatgctgtttttcaccactgtcctgtccattgacattcgccggatggagctagcagacctgaacaagcgactgccccctgaggcctgcctgccctcagccaagccagtgggacagccaacgcgctacgagcggcagctggctgtgaggccgtccacaccccacaccatcacgttgcagccgtcttccttccgaaacctgcggctccccaagaggctgcgtgttgtctacttcctggcccgcacccgcctggcacagcgcctcatcatggctggcaccgttgtctggattggcatcctggtatacacagacccagcagggctgcgcaactacctcgctgcccaggtgacggaacagagcccattgggtgagggagccctggctcccatgcccgtgcctagtggcatgctgccccccagccacccggaccctgccttctccatcttcccacctgatgcccctaagctacctgagaaccagacgtcgccaggcgagtcacctgagcgtggaggtccagcagaggttgtccatgacagcccagtcccagaggtaacctgggggcctgaggatgaggaactttggaggaaattgtccttccgccactggccgacgctcttcagctattacaacatcacactggccaagaggtacatcagcctgctgcccgtcatcccagtcacgctccgcctgaacccgagggaggctctggagggccggcaccctcaggacggccgcagtgcctggcccccaccggggcccatacctgctgggcactgggaagcaggacccaagggcccaggtggggtgcaggcccatggagacgtcacgctgtacaaggtggcggcgctgggcctggccaccggcatcgtcttggtgctgctgctgctctgcctctaccgcgtgctatgcccgcgcaactacgggcagctgggtggtgggcccgggcggcggaggcgcggggagctgccctgcgacgactacggctatgcgccacccgagacggagatcgtgccgcttgtgctgcgcggccacctcatggacatcgagtgcctggccagcgacggcatgctgctggtgagctgctgcctggcaggccacgtctgcgtgtgggacgcgcagaccggggattgcctaacgcgcattccgcgcccagggcagcgccgggacagtggcgtgggcagcgggcttgaggctcaggagagctgggaacgactttcagatggtgggaaggctggtccagaggagcctggggacagccctcccctgagacaccgcccccggggccctccgccgccttccctcttcggggaccagcctgacctcacctgcttaattgacaccaacttttcagcgcagcctcggtcctcacagcccactcagcccgagccccggcaccgggcggtctgtggccgctctcgggactccccaggctatgacttcagctgcctggtgcagcgggtgtaccaggaggaggggctggcggccgtctgcacaccagccctgcgcccaccctcgcctgggccggtgctgtcccaggcccctgaggacgagggtggctcccccgagaaaggctccccttccctcgcctgggcccccagtgccgagggttccatctggagcttggagctgcagggcaacctcatcgtggtggggcggagcagcggccggctggaggtgtgggacgccattgaaggggtgctgtgctgcagcagcgaggaggtctcctcaggcattaccgctctggtgttcttggacaaaaggattgtggctgcacggctcaacggttcccttgatttcttctccttggagacccacactgccctcagccccctgcagtttagagggaccccagggcggggcagttcccctgcctctccagtgtacagcagcagcgacacagtggcctgtcacctgacccacacagtgccctgtgcacaccaaaaacccatcacagccctgaaagccgctgctgggcgcttggtgactgggagccaagaccacacactgagagtgttccgtctggaggactcgtgctgcctcttcacccttcagggccactcaggggccatcacgaccgtgtacattgaccagaccatggtgctggccagtggaggacaagatggggccatctgcctgtgggatgtactgactggcagccgggtcagccatgtgtttgctcaccgtggggatgtcacctcccttacctgtaccacctcctgtgtcatcagcagtggcctggatgacctcatcagcatctgggaccgcagcacaggcatcaagttctactccattcagcaggacctgggctgtggtgcaagcttgggtgtcatctcagacaacctgctggtgactggcggccagggctgtgtctccttttgggacctaaactacggggacctgttacagacagtctacctggggaagaacagtgaggcccagcctgcccgccagatcctggtgctggacaacgctgccattgtctgcaactttggcagtgagctcagcctggtgtatgtgccctctgtgctggagaagctggactgagcgcagggcctccttgcccaggcaggaggctggggtgctgtgtgggggccaatgcactgaacctggacttgggggaaagagccgagtatcttccagccgctgcctcctgactgtaataatattaaacttttttaaaaaacc

SEQ ID NO: 186311 - DNA, 3749 bp, Homo sapiens
  Payload ID: 16688
  Gene Symbol: SCAP
  Gene Name: SREBF chaperone
  ENST ID: ENST00000428413
  CDS Start-End: 1177-2235
agaggtgaaggggcgggcacccggcggccaggagagagagggagggcgccacgcaccggactgcgggccgagagcgcgcacgccgcgctccgcccctgctgccgcccccgtcgccgccgccgccgccgccgcagcttgggaggtgctgccaccacaggtacctgcacatgttgttctttgtcagtgctgtcaagtgtgtgccagggtgatccatggtcactttccgggatggcagcaaggtgacttcggctgaggatgaccctgactgaaaggctgcgtgagaagatatctcgggccttctacaaccatgggctcctctgtgcatcctatcccatccccatcatcctcttcacagggttctgcatcttagcctgctgctacccactgctgaaactccccttgccaggaacaggacctgtggaattcaccacccctgtgaaggattactcgcccccacctgtggactctgaccgcaaacaaggagagcctactgagcagcctgagtggtatgtgggtgccccggtggcttatgtccagcagatatttgtgaagtcctcagtgtttccctggcacaagaacctcctggcagtagatgtatttcgttcacctttgtcccgggcattccaactggtggaggagatccggaaccacgtgctgagagacagctctgggatcaggagcttggaggagttgtgtctgcaagtgaccgacctgctgccaggccttaggaagctcaggaacctactccctgagcatggatgcctgctgctgtcccctgggaacttctggcagaatgactgggaacgcttccatgctgatcctgacatcattgggaccatccaccagcacgagcctaaaaccctgcagacttcagccacactcaaagacttgttatttggtgttcctgggaagtacagcggggtgagcctctacaccaggaagaggatggtctcctacaccatcaccctggtcttccagcactaccatgccaagttcctgggcagcctgcgtgcccgcctgatgcttctgcaccccagccccaactgcagccttcgggcggagagcctggtccacgtgcacttcaaggaggagattggtgtcgctgagctcatcccccttgtgaccacctacatcatcttgtttgcctacatctacttctccacgcggaagatcgacatggtcaagtccaagtgggggctggccctggctgccgtggtcacagtgctcagctcgctgctcatgtctgtgggactctgcacactcttcggcctgacgcccaccctcaatggcggcgagattttcccctaccttgtggtggttattgggttagagaatgtgttggtgctcaccaagtctgtggtctcaaccccggtagacctggaggtgaagctgcggatcgcccaaggcctaagcagcgagagctggtccatcatgaagaacatggccacggagctgggcatcatcctcatcggctacttcaccctagtgcccgccatccaggagttctgtctctttgctgtcgtggggctggtgtctgacttcttccttcagatgctgtttttcaccactgtcctgtccattgacattcgccggatggagctagcagacctgaacaagcgactgccccctgaggcctgcctgccctcagccaagccagtgggacagccaacgcgctacgagcggcagctggctgtgaggccgtccacaccccacaccatcacgttgcagccgtcttccttccgaaacctgcggctccccaagaggctgcgtgttgtctacttcctggcccccaccggggcccatacctgctgggcactgggaagcaggacccaagggcccaggtggggtgcaggcccatggagacgtcacgctgtacaaggtggcggcgctgggcctggccaccggcatcgtcttggtgctgctgctgctctgcctctaccgcgtgctatgcccgcgcaactacgggcagctgggtggtgggcccgggcggcggaggcgcggggagctgccctgcgacgactacggctatgcgccacccgagacggagatcgtgccgcttgtgctgcgcggccacctcatggacatcgagtgcctggccagcgacggcatgctgctggtgagctgctgcctggcaggccacgtctgcgtgtgggacgcgcagaccggggattgcctaacgcgcattccgcgcccaggcaggcagcgccgggacagtggcgtgggcagcgggcttgaggctcaggagagctgggaacgactttcagatggtgggaaggctggtccagaggagcctggggacagccctcccctgagacaccgcccccggggccctccgccgccttccctcttcggggaccagcctgacctcacctgcttaattgacaccaacttttcagcgcagcctcggtcctcacagcccactcagcccgagccccggcaccgggcggtctgtggccgctctcgggactccccaggctatgacttcagctgcctggtgcagcgggtgtaccaggaggaggggctggcggccgtctgcacaccagccctgcgcccaccctcgcctgggccggtgctgtcccaggcccctgaggacgagggtggctcccccgagaaaggctccccttccctcgcctgggcccccagtgccgagggttccatctggagcttggagctgcagggcaacctcatcgtggtggggcggagcagcggccggctggaggtgtgggacgccattgaaggggtgctgtgctgcagcagcgaggaggtctcctcaggcattaccgctctggtgttcttggacaaaaggattgtggctgcacggctcaacggttcccttgatttcttctccttggagacccacactgccctcagccccctgcagtttagagggaccccagggcggggcagttcccctgcctctccagtgtacagcagcagcgacacagtggcctgtcacctgacccacacagtgccctgtgcacaccaaaaacccatcacagccctgaaagccgctgctgggcgcttggtgactgggagccaagaccacacactgagagtgttccgtctggaggactcgtgctgcctcttcacccttcagggccactcaggggccatcacgaccgtgtacattgaccagaccatggtgctggccagtggaggacaagatggggccatctgcctgtgggatgtactgactggcagccgggtcagccatgtgtttgctcaccgtggggatgtcacctcccttacctgtaccacctcctgtgtcatcagcagtggcctggatgacctcatcagcatctgggaccgcagcacaggcatcaagttctactccattcagcaggacctgggctgtggtgcaagcttgggtgtcatctcagacaacctgctggtgactggcggccagggctgtgtctccttttgggacctaaactacggggacctgttacagacagtctacctggggaagaacagtgaggcccagcctgcccgccagatcctggtgctggacaacgctgccattgtctgcaactttggcagtgagctcagcctggtgtatgtgccctctgtgctggagaagctggactgagcgcagggcctccttgcccaggcaggaggctggggtgctgtgtgggggccaatgcactgaacctggacttgggggaaagagccgagtatcttccagccgctgcctcctgactgtaataatattaaacttttttaaaaaaccatatcatcatctgtcaggc

SEQ ID NO: 186312 - DNA, 683 bp, Homo sapiens
  Payload ID: 16688
  Gene Symbol: SCAP
  Gene Name: SREBF chaperone
  ENST ID: ENST00000416847
  CDS Start-End: 274-683
gtgtccctgcaccggccggcccctggagctccgcgtccccaccagacctccgcgggcccctggtgtgacggggggagatgcgcggcgtcgcatcccctggcctagttgctccgggaagctgttgtagaacctgctttggtgctgtttgggttttccggagtgcgggggagagcaggtacctgcacatgttgttctttgtcagtgctgtcaagtgtgtgccagggtgatccatggtcactttccgggatggcagcaaggtgacttcggctgaggatgaccctgactgaaaggctgcgtgagaagatatctcgggccttctacaaccatgggctcctctgtgcatcctatcccatccccatcatcctcttcacagggttctgcatcttagcctgctgctacccactgctgaaactccccttgccaggaacaggacctgtggaattcaccacccctgtgaaggattactcgcccccacctgtggactctgaccgcaaacaaggagagcctactgagcagcctgagtggtatgtgggtgccccggtggcttatgtccagcagatatttgtgaagtcctcagtgtttccctggcacaagaacctcctggcagtagatgtatttcgttcacctttgtcccgggcattccaactggtggaggagatccggaaccacgtgctgagagacag

SEQ ID NO: 186313 - DNA, 1222 bp, Homo sapiens
  Payload ID: 16688
  Gene Symbol: SCAP
  Gene Name: SREBF chaperone
  ENST ID: ENST00000416208
  CDS Start-End: 238-495
acccggcggccaggagagagagggagggcgccacgcaccggactgcgggccgagagcgcgcacgccgcgctccgcccctgctgccgcccccgtcgccgccgccgccgccgccgcagcttgggaggtgctgccaccacaggtacctgcacatgttgttctttgtcagtgctgtcaagtgtgtgccagggtgatccatggtcactttccgggatggcagcaaggtgacttcggctgaggatgaccctgactgaaaggctgcgtgagaagatatctcgggccttctacaaccatgggctcctctgtgcatcctatcccatccccatcatcctcttcacagggttctgcatcttagcctgctgctacccactgctgaaactccccttgccaggaacaggacctgtggaattcaccacccctgtgaaggattactcgcccccacctgtggactctgaccgcaaacaaggagagcctactgagcagcctgagtgggcctaagcagcgagagctggtccatcatgaagaacatggccacggagctgggcatcatcctcatcggctacttcaccctagtgcccgccatccaggagttctgtctctttgctgtcgtggggctggtgtctgacttcttccttcagatgctgtttttcaccactgtcctgtccattgacattcgccggatggagctagcagacctgaacaagcgactgccccctgaggcctgcctgccctcagccaagccagtgggacagccaacgcgctacgagcggcagctggctgtgaggccgtccacaccccacaccatcacgttgcagccgtcttccttccgaaacctgcggctccccaagaggctgcgtgttgtctacttcctggcccgcacccgcctggcacagcgcctcatcatggctggcaccgttgtctggattggcatcctggtatacacagacccagcagggctgcgcaactacctcgctgcccaggtgacggaacagagcccattgggtgagggagccctggctcccatgcccgtgcctagtggcatgctgccccccagccacccggaccctgccttctccatcttcccacctgatgcccctaagctacctgagaaccagacgtcgccaggcgagtcacctgagcgtggaggtccagcagaggttgtccatgacagcccagtcccagaggtaacctgggggcctgaggatgaggaactttggaggaaatt

SEQ ID NO: 186314 - DNA, 550 bp, Homo sapiens
  Payload ID: 16688
  Gene Symbol: SCAP
  Gene Name: SREBF chaperone
  ENST ID: ENST00000448217
  CDS Start-End: 287-550
agagtccggtgggaactgggttttaggaggaggtatctgaagaatgtgtagtgggtcgggggctggtgcggtcagaagggccacctctaatttctgccttgcattggtgactagatctgcactttctggaactcccagagaagtttgctggtgcctttgagggcaggtacagggcctgccttatccaggtacctgcacatgttgttctttgtcagtgctgtcaagtgtgtgccagggtgatccatggtcactttccgggatggcagcaaggtgacttcggctgaggatgaccctgactgaaaggctgcgtgagaagatatctcgggccttctacaaccatgggctcctctgtgcatcctatcccatccccatcatcctcttcacagggttctgcatcttagcctgctgctacccactgctgaaactccccttgccaggaacaggacctgtggaattcaccacccctgtgaaggattactcgcccccacctgtggactctgaccgcaaacaaggagagcctactgagcagcctgagtgggtgggtactcgt

SEQ ID NO: 186315 - DNA, 3748 bp, Homo sapiens
  Payload ID: 16688
  Gene Symbol: SCAP
  Gene Name: SREBF chaperone
  ENST ID: ENST00000441517
  CDS Start-End: 256-621
agaggtgaaggggcgggcacccggcggccaggagagagagggagggcgccacgcaccggactgcgggccgagagcgcgcacgccgcgctccgcccctgctgccgcccccgtcgccgccgccgccgccgccgcagcttgggaggtgctgccaccacaggtacctgcacatgttgttctttgtcagtgctgtcaagtgtgtgccagggtgatccatggtcactttccgggatggcagcaaggtgacttcggctgaggatgaccctgactgaaaggctgcgtgagaagatatctcgggccttctacaaccatgggctcctctgtgcatcctatcccatccccatcatcctcttcacagggttctgcatcttagcctgctgctacccactgctgaaactccccttgccaggaacaggacctgtggaattcaccacccctgtgaaggattactcgcccccacctgtggactctgaccgcaaacaaggagagcctactgagcagcctgagtgggttcctgggcagcctgcgtgcccgcctgatgcttctgcaccccagccccaactgcagccttcgggcggagagcctggtccacgtgcacttcaaggaggagattggtgtcgctgagctcatcccccttgtgaccacctacatcatcttgtttgcctacatctacttctccacgcggaagatcgacatggtcaagtccaagtgggggctggccctggctgccgtggtcacagtgctcagctcgctgctcatgtctgtgggactctgcacactcttcggcctgacgcccaccctcaatggcggcgagattttcccctaccttgtggtggttattgggttagagaatgtgttggtgctcaccaagtctgtggtctcaaccccggtagacctggaggtgaagctgcggatcgcccaaggcctaagcagcgagagctggtccatcatgaagaacatggccacggagctgggcatcatcctcatcggctacttcaccctagtgcccgccatccaggagttctgtctctttgctgtcgtggggctggtgtctgacttcttccttcagatgctgtttttcaccactgtcctgtccattgacattcgccggatggagctagcagacctgaacaagcgactgccccctgaggcctgcctgccctcagccaagccagtgggacagccaacgcgctacgagcggcagctggctgtgaggccgtccacaccccacaccatcacgttgcagccgtcttccttccgaaacctgcggctccccaagaggctgcgtgttgtctacttcctggcccgcacccgcctggcacagcgcctcatcatggctggcaccgttgtctggattggcatcctggtatacacagacccagcagggctgcgcaactacctcgctgcccaggtgacggaacagagcccattgggtgagggagccctggctcccatgcccgtgcctagtggcatgctgccccccagccacccggaccctgccttctccatcttcccacctgatgcccctaagctacctgagaaccagacgtcgccaggcgagtcacctgagcgtggaggtccagcagaggttgtccatgacagcccagtcccagaggtaacctgggggcctgaggatgaggaactttggaggaaattgtccttccgccactggccgacgctcttcagctattacaacatcacactggccaagaggtacatcagcctgctgcccgtcatcccagtcacgctccgcctgaacccgagggaggctctggagggccggcaccctcaggacggccgcagtgcctggcccccaccggggcccatacctgctgggcactgggaagcaggacccaagggcccaggtggggtgcaggcccatggagacgtcacgctgtacaaggtggcggcgctgggcctggccaccggcatcgtcttggtgctgctgctgctctgcctctaccgcgtgctatgcccgcgcaactacgggcagctgggtggtgggcccgggcggcggaggcgcggggagctgccctgcgacgactacggctatgcgccacccgagacggagatcgtgccgcttgtgctgcgcggccacctcatggacatcgagtgcctggccagcgacggcatgctgctggtgagctgctgcctggcaggccacgtctgcgtgtgggacgcgcagaccggggattgcctaacgcgcattccgcgcccagggcagcgccgggacagtggcgtgggcagcgggcttgaggctcaggagagctgggaacgactttcagatggtgggaaggctggtccagaggagcctggggacagccctcccctgagacaccgcccccggggccctccgccgccttccctcttcggggaccagcctgacctcacctgcttaattgacaccaacttttcagcgcagcctcggtcctcacagcccactcagcccgagccccggcaccgggcggtctgtggccgctctcgggactccccaggctatgacttcagctgcctggtgcagcgggtgtaccaggaggaggggctggcggccgtctgcacaccagccctgcgcccaccctcgcctgggccggtgctgtcccaggcccctgaggacgagggtggctcccccgagaaaggctccccttccctcgcctgggcccccagtgccgagggttccatctggagcttggagctgcagggcaacctcatcgtggtggggcggagcagcggccggctggaggtgtgggacgccattgaaggggtgctgtgctgcagcagcgaggaggtctcctcaggcattaccgctctggtgttcttggacaaaaggattgtggctgcacggctcaacggttcccttgatttcttctccttggagacccacactgccctcagccccctgcagtttagagggaccccagggcggggcagttcccctgcctctccagtgtacagcagcagcgacacagtggcctgtcacctgacccacacagtgccctgtgcacaccaaaaacccatcacagccctgaaagccgctgctgggcgcttggtgactgggagccaagaccacacactgagagtgttccgtctggaggactcgtgctgcctcttcacccttcagggccactcaggggccatcacgaccgtgtacattgaccagaccatggtgctggccagtggaggacaagatggggccatctgcctgtgggatgtactgactggcagccgggtcagccatgtgtttgctcaccgtggggatgtcacctcccttacctgtaccacctcctgtgtcatcagcagtggcctggatgacctcatcagcatctgggaccgcagcacaggcatcaagttctactccattcagcaggacctgggctgtggtgcaagcttgggtgtcatctcagacaacctgctggtgactggcggccagggctgtgtctccttttgggacctaaactacggggacctgttacagacagtctacctggggaagaacagtgaggcccagcctgcccgccagatcctggtgctggacaacgctgccattgtctgcaactttggcagtgagctcagcctggtgtatgtgccctctgtgctggagaagctggactgagcgcagggcctccttgcccaggcaggaggctggggtgctgtgtgggggccaatgcactgaacctggacttgggggaaagagccgagtatcttccagccgctgcctcctgactgtaataatattaaacttttttaaaaaacc

SEQ ID NO: 186316 - DNA, 706 bp, Homo sapiens
  Payload ID: 16688
  Gene Symbol: SCAP
  Gene Name: SREBF chaperone
  ENST ID: ENST00000495603
  CDS Start-End: 310-706
agagagagagagagagagagagagagtgtgtgtgtgtgtgtgtgtgtgtgtgtgtgtgtgtgtgtgtgtattttgggattgaggtcactagaccttgcatataggcattctgaaaccattccccagccacataactatcgcctccctccagcagccctagtgtgcagagccaagtactctttgttaactggcttttctcccttcttaccaggtacctgcacatgttgttctttgtcagtgctgtcaagtgtgtgccagggtgatccatggtcactttccgggatggcagcaaggtgacttcggctgaggatgaccctgactgaaaggctgcgtgagaagatatctcgggccttctacaaccatgggctcctctgtgcatcctatcccatccccatcatcctcttcacagggttctgcatcttagcctgctgctacccactgctgaaactccccttgccaggaacaggacctgtggaattcaccacccctgtgaaggattactcgcccccacctgtggactctgaccgcaaacaaggagagcctactgagcagcctgagtggtatgtgggtgccccggtggcttatgtccagcagatatttgtgaagtcctcagtgtttccctggcacaagaacctcctggcagtagatgtatttcgttcacctttgtcccgggcattccaactggtggaggagatccggaaccacg

SEQ ID NO: 186317 - DNA, 2950 bp, Homo sapiens
  Payload ID: 16688
  Gene Symbol: SCAP
  Gene Name: SREBF chaperone
  ENST ID: ENST00000545718
  CDS Start-End: 100-2817
ggtacctgcacatgttgttctttgtcagtgctgtcaagtgtgtgccagggtgatccatggtcactttccgggatggcagcaaggtgacttcggctgaggatgaccctgactgaaaggctgcgtgagaagatatctcgggccttctacaaccatgggctcctctgtgcatcctatcccatccccatcatcctcttcggctacttcaccctagtgcccgccatccaggagttctgtctctttgctgtcgtggggctggtgtctgacttcttccttcagatgctgtttttcaccactgtcctgtccattgacattcgccggatggagctagcagacctgaacaagcgactgccccctgaggcctgcctgccctcagccaagccagtgggacagccaacgcgctacgagcggcagctggctgtgaggccgtccacaccccacaccatcacgttgcagccgtcttccttccgaaacctgcggctccccaagaggctgcgtgttgtctacttcctggcccgcacccgcctggcacagcgcctcatcatggctggcaccgttgtctggattggcatcctggtatacacagacccagcagggctgcgcaactacctcgctgcccaggtgacggaacagagcccattgggtgagggagccctggctcccatgcccgtgcctagtggcatgctgccccccagccacccggaccctgccttctccatcttcccacctgatgcccctaagctacctgagaaccagacgtcgccaggcgagtcacctgagcgtggaggtccagcagaggttgtccatgacagcccagtcccagaggtaacctgggggcctgaggatgaggaactttggaggaaattgtccttccgccactggccgacgctcttcagctattacaacatcacactggccaagaggtacatcagcctgctgcccgtcatcccagtcacgctccgcctgaacccgagggaggctctggagggccggcaccctcaggacggccgcagtgcctggcccccaccggggcccatacctgctgggcactgggaagcaggacccaagggcccaggtggggtgcaggcccatggagacgtcacgctgtacaaggtggcggcgctgggcctggccaccggcatcgtcttggtgctgctgctgctctgcctctaccgcgtgctatgcccgcgcaactacgggcagctgggtggtgggcccgggcggcggaggcgcggggagctgccctgcgacgactacggctatgcgccacccgagacggagatcgtgccgcttgtgctgcgcggccacctcatggacatcgagtgcctggccagcgacggcatgctgctggtgagctgctgcctggcaggccacgtctgcgtgtgggacgcgcagaccggggattgcctaacgcgcattccgcgcccagggcagcgccgggacagtggcgtgggcagcgggcttgaggctcaggagagctgggaacgactttcagatggtgggaaggctggtccagaggagcctggggacagccctcccctgagacaccgcccccggggccctccgccgccttccctcttcggggaccagcctgacctcacctgcttaattgacaccaacttttcagcgcagcctcggtcctcacagcccactcagcccgagccccggcaccgggcggtctgtggccgctctcgggactccccaggctatgacttcagctgcctggtgcagcgggtgtaccaggaggaggggctggcggccgtctgcacaccagccctgcgcccaccctcgcctgggccggtgctgtcccaggcccctgaggacgagggtggctcccccgagaaaggctccccttccctcgcctgggcccccagtgccgagggttccatctggagcttggagctgcagggcaacctcatcgtggtggggcggagcagcggccggctggaggtgtgggacgccattgaaggggtgctgtgctgcagcagcgaggaggtctcctcaggcattaccgctctggtgttcttggacaaaaggattgtggctgcacggctcaacggttcccttgatttcttctccttggagacccacactgccctcagccccctgcagtttagagggaccccagggcggggcagttcccctgcctctccagtgtacagcagcagcgacacagtggcctgtcacctgacccacacagtgccctgtgcacaccaaaaacccatcacagccctgaaagccgctgctgggcgcttggtgactgggagccaagaccacacactgagagtgttccgtctggaggactcgtgctgcctcttcacccttcagggccactcaggggccatcacgaccgtgtacattgaccagaccatggtgctggccagtggaggacaagatggggccatctgcctgtgggatgtactgactggcagccgggtcagccatgtgtttgctcaccgtggggatgtcacctcccttacctgtaccacctcctgtgtcatcagcagtggcctggatgacctcatcagcatctgggaccgcagcacaggcatcaagttctactccattcagcaggacctgggctgtggtgcaagcttgggtgtcatctcagacaacctgctggtgactggcggccagggctgtgtctccttttgggacctaaactacggggacctgttacagacagtctacctggggaagaacagtgaggcccagcctgcccgccagatcctggtgctggacaacgctgccattgtctgcaactttggcagtgagctcagcctggtgtatgtgccctctgtgctggagaagctggactgagcgcagggcctccttgcccaggcaggaggctggggtgctgtgtgggggccaatgcactgaacctggacttgggggaaagagccgagtatcttccagccgctgcctcctgactgtaataatattaaactttttt

SEQ ID NO: 186318 - DNA, 6876 bp, Homo sapiens
  Payload ID: 16689
  Gene Symbol: SREK1IP1
  Gene Name: SREK1-interacting protein 1
  Uniprot ID: Q8N9Q2
  ENST ID: ENST00000513458
  CDS Start-End: 169-636
tggttctgccgtcgctagaggcgtacaggcccttcccgaccgtagcgagggtgctgctgcgctgggggaaggaaaacgccgctttgactgtgccttgttctcacagctggcgggaagcaagcgccttttcgaaagccagaggctcgagttacccctcttaccaccgtcatggcagtcccaggttgcaacaaggacagtgtcagagcaggctgtaaaaaatgtggctaccctggtcacctgacttttgaatgccgcaattttctccgagtagaccctaaaagggacatagttttggatgtcagcagtacaagtagtgaagatagcgatgaagagaatgaagaactgaataaattgcaggcattacaggaaaaaagaataaatgaagaagaggaaaagaagaaagaaaaaagcaaagaaaaaatcaaattgaaaaaaaaaaggaaaaggtcttactcatccagttccactgaagaggacacttcaaaacaaaagaaacaaaaatatcagaagaaagaaaagaaaaaagaaaaaaagagtaaatcaaaaaaagggaaacatcacaaaaaggaaaaaaagaagagaaaaaaggaaaagcattcttctacacctaatagttctgaattctccagaaagtaactgagactttggcttaagccgttaaatttaaaaatttgtttttaaaacgtgtttgcccttccttggaatttgctatatattatgctttgcaataaatcacagccttttccatatagacatttttcgtatttgggaccattatccctctggcaatatatttttaatgtgctgtaactgtaaagtattaaatcagtcttgttacttgatagccatgccccaagtatagctatttgtgtatactaaacacatcatttttggtatttgtgtctctgtgtgtttggctagtgttactacttcataagttcattgtaaaatggctttactgccatcaacatgggtcatctacctagcagttaatgagtattgctggatcaggtgtccaccttccaatgatgaagcaaggtaaggggtaatgttttgctcttgacacagagaaatttaatagctttatgtactaaaatataatatcttttaaagatagtgaaattcttcagttttttaaatctctagggattttttttcaatgttgtagaagatgcagctgcttaatggtcttgactaggactttttaaatgaatggtgtctgcaggtagatgatcatgaaaatatctctaacaaagttttactcttctatgaaatgcagaatttctagtacctgcctcctttgtttttgtaataattaaaatacttcttgtataaagagattagttcagcctgttagtaagtctgcagagatgatgctgagttggttgtgatttttagaatagactcctgggttgttttacaaatgtgccatattggcatgtcttacagtgatacctcaaacacagaaatttttatttaggaagatagctaaatctttattagaactgatttttattgtattcagtataaattttatgaagcttgtttctatgagtactgtggaaaattttataaatgtgagcatatatatttattttgtctgacataatttgtagttttaaagcaagtttcacactgaacttaacgttttcataaatgaccagtttgggatgtttctctcttttactttagtggcaaactcaagagtaaaaagtgtcaaaaaaagaattgagaattttattctgtactttttaaaatttaagagccagggagttgcatcatgaaagcctttgtataataatggaaattttatatgggtaagcattttcaaacacatattagtagatacgttttttaaatttctattttcacattgatcagtgttactttgcttaatacttaggtagcccttatgtccactaaagtaaatgcttatgttgtagaagcatcgaacatcaaccaatgtcatggcacagcaccaaagattgcaaatacctcactatggtgcgcttagaaattttcaaattgataacctatagatacggctgcaggtgaattcatgatagtgaaatcagctaagtatacttaacctcacaggctagaaaggtttactgattcttgtttcacctggcacccaatgtggataccctcagtaagactcagggagccttataactcctcttaacatatgcttacccatgcttaaattctagggaagctgtatccacagccctctgcattgcagccatgagagctctcacgctttcaacccttccataacctaatttagtcatttgggcctctcaaaaggaaatgcttttgtttaaataggtcagtcagttactgggagaaaaaatacagagccagtaggtttttagggatttgttttgcctttgctgctagttttttgaaaatattcttcgattatcaagattttaaaaatcggtttttaatataaagcttttttaaaaacgaggctggcacaagtgcagtggtgtttctttactcccactgcttgacttgactagccttgaaaaaataacagtaaaataaaatattaaaaaataattagaaaatgctacaaaggcaatgaccttattccattgagtaagatagttaaaaatgatagtaattgtagtgaaatagttaattacttgtaagttttattactgttaattgtagagattataaattggctcattaggtttctgaatggtgacacaataatgactgagaagagcaaaagtcagtcctcgttaactaatgtagtatgcaaattaaaatattttaatgatcagtaattttccccccagaaatgatgttggcatttctaagtaaatttcccataattttagcatagtttatgaaattgaataaaaatttattttcactgaagtaattttcttctaatatgatattattattgagattggatgcaaatctcatgaatatgttttagaagaaaattaatgaaattccctcccaggcagtatgtaccagaaggaaaactgaatttagcagtaaaacagtcctggtcattctaactacctgtatgatcttgaacaaagtcacttagtttccctgggccttggtgtctttcgtctataaaatattgtaccagattatctctgaaatcacttcaaggtttaatatatataattatcaatattttaaaattcaagcaatattcactttagaaattattataacattctataatagtaaaggttgaatttattaatataataaacacgttcaacttcttcaagcagataattgatatttggttcatattcttacaacctaatgcatgtcattttcaccaaatgcaggcagaatttatatttaggtttgcatctggaactagattatctggcactttatggccattatttttgggttgatggaccttctcaccacacaatttcccccttttttttttttgcatatcatatgttggttgatatttctcagaggtatccctatttcttcatacttaatatacatctccatttacatctttgactctctgaggtcaaaacaacaataaatgagaagtaaaacaactatatgtgtttgtatttacaactgtatctaaaattatataaccctagtttaccttcagagtaaactaggctgaagagttgttaataatgttgataaaaatgccattgaatcctttcttcaacaaatatttattgagtacctaacgtggcaaacgctgtgctaagtactggggatacagagataagtaagacacatttgcctccctgaaggacttcacagtgtagttggtaggagaaacaccagagcatacaccgttatataattagtgcagtaattgacatgaacatgagtttatagaaactcggggttacctaaagtagtctggataaattagaagaggctacctagagaaagtagtgactgaattgcaatttgattaaggataagaatgagggttatggcagttcctgacagagtgggtactgtgaacaaacaccagaggtagaacaagctgtgttatgtgtttgtcaagaattacaagcaatctggtgttgctggtgtatcataggcgaggcaggaagtggtaagaattgagactaccattttaagttcttaggaacaggaggaaggagtcgtgtgttccgtgtttgggagcttgaactgtaatgtgtaagcaatgagacaccattaaagagtttcaaggggggccgggcacagtggctcacgcctgtaatcccagcactttgggaggctgaggcgggcggatcacctgaggtcaggagttcaagaccagcctggccaacttggcgaaaccctgtctctactaaaaatagaaaaattagccggacgtggtgacaggcacctgtattcccagctactctggagtctggggcaggagaatcgctcaaacccaggaggtggaagttgcagtaagctgagatcacaccactgtactccagcctgggcgacagagcgagactctatctcaaaaaaaaaaaaagattttaaggaaggaaatgacttttattagggtttggttttatcaatttcataatccgattaatcccaccatttttaaaagatgaaattgctttcattagaaggctacataaaatataatttgattattttaggctctattattagactcacatttctttctacagtctcattattatttccaaaaattacacagtaacctaaatcatctaaaaacacataaagctactgtattctttattagatccatccccagagttatatgtacatgtacatactttgagatgtgttttgttcttaattgtattttaggttatttttgactgacttaaattctatcactattttaatatttgttaggtccgaataaaccatttagaatatttttcagtgtacaaaatgtgctgtaatttaataaggccccttgcttttaaaatttggcttaacctgtgaagcacaactgcttcagagttacagagaaacataccagttggtccactggatgagccctgtggttctacctcaggtaacctagtgataagctagctcagcagggagtgcttcaaggactccagctgatcctagtgctgagaccaaaacttcctggacattgggtgcccaagaacagtaggtttcttataccagtgtgacaataatcccagttgcgaaggccagtcttctgatctcagtatctcctcccaactcctctaaaaataggtagagtggcagagaattggggtgcctcttctatagcacaacccatgatgcatccagtcatgcctgaccccactatgcctttcccacaaattgggaggagttggggcagtgagcattttgctagctctgtctgtttcttgcttcttgtgccatttatagtccttggccatgagcaacaaaagtagaatggtgccagtgccttaactaaatttttctcaacctagattttcacctgagacaatatggtaatattattaaattactgtaaagatagcaaattttctgggatactttaaaatcaaagttgtatcaaagatcaagaagcacccataaaagctttataaactttcacaaaaaataagtgaaaattctttgtttttatggccgtgtaaaatgtcatttttataatggaaatgtcttaattttcaaacttaacatatactttaagcaattttagtatttaaacctttgcaaaattgtatttttgaatgtgaagttcaactttggcagtaggttgttgcaatagtgatctggcactatggtgccagtatagccacatagggttatttaaattaattaaataaatgaaaaattttattttttcagttgcattagccacatcttaagtgttcagtagccacatgtgactggtggctaccatattagtgcagatatagaaagaacatttccatcatcacagaaacttctcttaattctggtctagaagataaccttagtacttggtagaaattttgacaggctaatgacgaaaagtttgtaaccctgagctttgcatgcccaagaaaaataaggtattcttttttatatatcagaccagagaagctgtattcagcacattttgaaatgctagtttttggctatggccataccaccctaaatgtgccagatcttgtctgaaatgctagtttctgactacaaaaactacaggacatagtagatatgctcagtagagctgcttaaaataattccctttttttttctgttgaattctgttacaaaaccaggtctgtgttataatagaaaacacacttatgaataaaaatctttaaaaattataatttgcagaaattagttttatttctagatttctaggtggtattaatgtgatagcattaggtgggaccagagaactcatttgttttgtagctttcattatacagattatttaggaaatatatcagcaaaggattttttgttatgcttatctcttgaaacaaaatatttattgtacagattatacattgtgatttttttgttactgagtatattgtttgtgcccagaaaaatctaaaaagatgtgggttgacttctaagagatttaagaacaagtcacctctagtttttaagacagttcccttgatatttacctatccagtaccatctcataagaataactgcctgtaagtatcagaaagttgagaaatgctggtaatgtgacataaacttctcactgttcttcactgagataggactgcttatcttgttattgataaattatttaatttctcctgaataattagcataatctcatgtgatacagaaacatcttaattagcaaataaatttatacaaaggaaaaccaataaaaccttaatgtgcgtttaataaagtaactgaatgatcaaaaatgca

SEQ ID NO: 186319 - DNA, 1617 bp, Homo sapiens
  Payload ID: 16689
  Gene Symbol: SREK1IP1
  Gene Name: SREK1-interacting protein 1
  ENST ID: ENST00000622404
  CDS Start-End: 83-379
actgtgccttgttctcacagctggcgggaagcaagcgccttttcgaaagccagaggctcgagttacccctcttaccaccgtcatggcagtcccaggttgcaacaaggacagtgtcagagcaggctgtaaaaaatgtggctaccctggtcacctgacttttgaatgccgcaattttctccgagtagaccctaaaagggacatagttttggatgtcagcagtacaagtagtgaagatagcgatgaagagaatgaagaactgaataaattgcaggcattacaggaaaaaagaataaatgaagaagaggaaaagaagaaaaagcaaagaaaaaatcaaattgaaaaaaaaaaggaaaaggtcttactcatccagttccactgaagaggacacttcaaaacaaaagaaacaaaaatatcagaagaaagaaaagaaaaaagaaaaaaagagtaaatcaaaaaaagggaaacatcacaaaaaggaaaaaaagaagagaaaaaaggaaaagcattcttctacacctaatagttctgaattctccagaaagtaactgagactttggcttaagccgttaaatttaaaaatttgtttttaaaacgtgtttgcccttccttggaatttgctatatattatgctttgcaataaatcacagccttttccatatagacatttttcgtatttgggaccattatccctctggcaatatatttttaatgtgctgtaactgtaaagtattaaatcagtcttgttacttgatagccatgccccaagtatagctatttgtgtatactaaacacatcatttttggtatttgtgtctctgtgtgtttggctagtgttactacttcataagttcattgtaaaatggctttactgccatcaacatgggtcatctacctagcagttaatgagtattgctggatcaggtgtccaccttccaatgatgaagcaaggtaaggggtaatgttttgctcttgacacagagaaatttaatagctttatgtactaaaatataatatcttttaaagatagtgaaattcttcagttttttaaatctctagggattttttttcaatgttgtagaagatgcagctgcttaatggtcttgactaggactttttaaatgaatggtgtctgcaggtagatgatcatgaaaatatctctaacaaagttttactcttctatgaaatgcagaatttctagtacctgcctcctttgtttttgtaataattaaaatacttcttgtataaagagattagttcagcctgttagtaagtctgcagagatgatgctgagttggttgtgatttttagaatagactcctgggttgttttacaaatgtgccatattggcatgtcttacagtgatacctcaaacacagaaatttttatttaggaagatagctaaatctttattagaactgatttttattgtattcagtataaattttatgaagcttgtttctatgagtactgtggaaaattttataaatgtgagcatatatatttattttgtctgacataatttgtagttttaaagcaagtttcacactgaacttaacgttttcataaatgaccagtttgggatgtttctctcttttactttagtggcaaactcaagagt

SEQ ID NO: 186320 - DNA, 4020 bp, Homo sapiens
  Payload ID: 16690
  Gene Symbol: SRRD
  Gene Name: SRR1 domain containing
  Uniprot ID: Q9UH36
  ENST ID: ENST00000215917
  CDS Start-End: 15-1034
gacgtcagagaccaatggctgcggccgcagctgcggcgctggaatcctggcaggcggcggctccgcggaagaggcgctccgcggctcgacggccgcggcggagggaggcggcgccccgggggagagaggcggcgccccgggggagagaggcggcgccccggggccccgaggcggagttcgagtctgacagcggagtcgtgcttcgtcgcatctgggaggctgagaaggacctgtttatctctgatttctggagttcagcactagaaaccatcaatagatgtctcacaaaacatctggaacaactgaaggcccctgtggggactctttcagacatctttggaaacctgcatcttgactcattgccagaggagtcagatgtggccactgattctatcccaagagagatcttggtcacaggaacctgccatttgaagtgtgtgtgttacggcattgggaactttgccacctgcatcgtagctagaaaccagctaacgtttttgctgcttttgttggaaaagtgccagattcccagaagtcactgttgggtatatgaccctctgtttagccaacttgaaattgaagtccttaacacccttggtgtgactgttctcagtgagaacgaggaagggaaacggagtattcgcggggagcctaccatcttttacatgctccattgtgggacggccttgtacaacaatcttttatggagtaactggtcagtagatgccctttctaagatggtcatcattgggaacagtttcaaaggacttgaggagaggttgttggcaaggattctgcagaaaaattatccctacattgcaaagattttaaaaggactggaggagcttgagtttcctcagacttcacaatacatggacatatttaatgatacctctgtccactggttccctgtgcaaaagctagaacagctctccatagatatttgggagtttcgggaagaaccagattatcaggactgtgaggaccttgaaatcatcaggaacaagagagaagatccttctgctactgactgaactcgttgtgaggtactcagtgttggctgaggtagaagctgccaccagagactaaagggaaggctgctatggaggaactacagagaactcctttgccaggaaagaacatcaacttggctgtcctgttttgaggacgataccccacatgaggacttggtataaagattcctgccctacgtggcattgtcccattttacatccttccctcatgacctggcctgatgtggagtagctcctgagtaaagaagttacccttttgaaggtgatctaaaaatactgtttatttacagtacatccctcttaggggcaagtctctgactggttctggacctgccacagttcacttggccatgtcgatcaggctctgcagtgaggtgggcacccacgtcttctcgccctggacaaagaccactccccggtcgatgtagatcacaatgcggccaaaggtgtagagctgcttcccttcgtgtcgcttcccaatgacgggcatgaagacaatgttgtgctcctcagccttggtctcaatgaggtccttaaagttcatgggcacagagctagcggccacgccaatgcccctctgagccatgttctcagcctcccgcctctcctgcatggcctcgtactggaagtccttcctccgctccgtgtgggtgagataggcaatgttctcccgtgctcctggctgcatgtaggcacctaagatacaggaggacagggcggtgaggagaggtgtttccaggtgtatggaagttgacactgtggcttggcccaggtcttgggtgtgccagagtgcttgtgactcactgaagggcagctctgcctcaaagatacaactttggaggaagtttagacgactggccagtatcacataaaaactgttcagaaggttcctggctagtatctagtaaccagattattaatattcaacattttaaaatgaagtatctgcaagggatttcttccttcagagctggaaacattaacagagagtcctcagccactcttctgttcccaccttgctctgtagagtttccatttcccaccaccaaagaggcagcttttagtaccttgaaaacatagggcccatactggctttatttttaacctacccacacagggcccccatcctgaaagaagttcacatatatttagggagctgaaatgagtgtttaaaggataataccaagaccataaatgctaagtgctaattgaggggtatattcagggaacagttttggaaacatgaggccaagggtagctaaggaagagtttttagaaaaaacttgataattacagaagcagagaagtatatttgccttattacttaatctctgttttcacagaataggctatttttctttttttttttttgagaccgagtctcgctcttgtcacctaggctggagtgcagtgcttgcaatctcggctcactacaacctctgcctcccaggtttaagcgattcttctgcctcagcctcctaagtagctggcattacaggcatgtgccaccgcgcccggctaatttttgcatttttagtagagacggggtttcaccatgttggtcaggctggtctcgaactcctgacctcgtgatctacccgcctcggcctcccaaagtgctaggattacaggcgtgagccaccgtgcctggcctaggctattaaataacaagaattaaagactcaggaaatagaaattccagttctaactgccaccctttaactatgtgaccttgaacaggctctcagcctcgctgggcttatctgtaaaacacagactagacgatcccatttcaatgctgcgaatcggctaatgagcaacactggagcacaggactggttgaaataggctcccaaatgtagaaacataaatatactctcacttacttatgatctaggcagaatgacttacctagaacttgggaacagatatagtacacgaacagtgaactgcctgtttttgacaacacagacaccacctattgaaggctatacacaagcatgaactcactctcccttttagcctataaagtagatcttactgtttaacaggtaaaatggggctgattaaggctgagcaatcaccaagtgtcagaccgcgtgccaaactccacactgtaagatgcgtcacctaagcagcatgctcaggcatgaatgagccttaaaaggccacacagcacagtggttaagagggcggggcctggggttagactgacatcatctgaatccagcttaagtcagtctccactcagggaagatgcccctctcagtcatggtagacctgggcagtgggtgccagctgaccatgtaccccagtcagcagggtgagagtctgttgctatgtgcaaaagtgtgacctaaggtttaggctgcctacaggaaccagaaaactctgattctgtgtcatttacatgtgtaaaatctgaaacttggggccaggacatccaaaatgggaatcctcacttaccaacgttggaggacaccgcccggttcatgatatcaagtgcctcattaaatttgtccttgacagatggatgtgccagcacttggtctgagaacatcgacttccaacccaggtaccacttggtgatctcctcataatttgggctgttactgagccaagagcacagcacctgccaaaaagaaaaattacttgcatccatcgtggcaacaaatgaaggcaagatttctgaagtggccatttgttttgttttgatcctggtcctacaggctagtgacactactttacagggatttatagtagctaaacagtctagcacttatgaatatggattttggagtcagcctggtagctaaagtgcccttgcatgtaaactctctgagcctcagcttccatgtctacacaacagggataccatatcccctaccccatagggttgctgagaggagctgagataaagcaaataaagtgcttggaacagcttctgatacatggcaaatgtccaataaatggtgcccactatgaa

SEQ ID NO: 186321 - DNA, 1278 bp, Homo sapiens
  Payload ID: 16690
  Gene Symbol: SRRD
  Gene Name: SRR1 domain containing
  ENST ID: ENST00000613968
  CDS Start-End: 12-1019
gtcagagaccaatggctgcggccgcagctgcggcgctggaatcctggcaggcggcggctccgcggaagaggcgcggctcgacggccgcggcgaggcggccccgggggagagaggcggcgccccgggggagagaggcggcgccccggggccccgaggcggagttcgagtctgacagcggagtcgtgcttcgtcgcatctgggaggctgagaaggacctgtttatctctgatttctggagttcagcactagaaaccatcaatagatgtctcacaaaacatctggaacaactgaaggcccctgtggggactctttcagacatctttggaaacctgcatcttgactcattgccagaggagtcagatgtggccactgattctatcccaagagagatcttggtcacaggaacctgccatttgaagtgtgtgtgttacggcattgggaactttgccacctgcatcgtagctagaaaccagctaacgtttttgctgcttttgttggaaaagtgccagattcccagaagtcactgttgggtatatgaccctctgtttagccaacttgaaattgaagtccttaacacccttggtgtgactgttctcagtgagaacgaggaagggaaacggagtattcgcggggagcctaccatcttttacatgctccattgtgggacggccttgtacaacaatcttttatggagtaactggtcagtagatgccctttctaagatggtcatcattgggaacagtttcaaaggacttgaggagaggttgttggcaaggattctgcagaaaaattatccctacattgcaaagattttaaaaggactggaggagcttgagtttcctcagacttcacaatacatggacatatttaatgatacctctgtccactggttccctgtgcaaaagctagaacagctctccatagatatttgggagtttcgggaagaaccagattatcaggactgtgaggaccttgaaatcatcaggaacaagagagaagatccttctgctactgactgaactcgttgtgaggtactcagtgttggctgaggtagaagctgccaccagagactaaagggaaggctgctatggaggaactacagagaactcctttgccaggaaagaacatcaacttggctgtcctgttttgaggacgataccccacatgaggacttggtataaagattcctgccctacgtggcattgtcccattttacatccttccctcatgacctggcctgatgtggagtagctcctgagtaaagaagttacccttttg

SEQ ID NO: 186322 - DNA, 4306 bp, Homo sapiens
  Payload ID: 16691
  Gene Symbol: SCAF1
  Gene Name: SR-related CTD-associated factor 1
  Uniprot ID: Q9H7N4
  ENST ID: ENST00000360565
  CDS Start-End: 125-4063
tgaaatcccggcaagctcggcggcgctttagctccgcctctctcctcctttgctcacgaaccccgccccagcccgccccgccccgcgccggggccggagccgcagcccgagcggcggggtgaccatggaggaagaagatgagtctcgagggaagacagaggagtcgggggaggatcggggcgatggtccgccagacagagaccccacgctttctccttctgcctttatcctgcgagccatccagcaggctgtgggaagctccctgcagggggacctgcccaatgataaagatggctctcggtgtcatggccttcgatggcggcgctgccggagtccacggtcagagccccgttcccaggaatcagggggcactgacacggctactgtgttggacatggccacggacagcttcctcgcagggctggtgagtgtcctggatcccccggatacctgggttcccagccgcctggacctgcggcctggcgaaagtgaggacatgctggagctggtggctgaggtccgaatcggggacagagatcccatccctctgcctgtgcccagcctgctgccccgtctcagggcctggaggacgggcaaaacggtttctccacagtcgaactcctctaggcccacctgtgcccgtcacctcaccttgggcacgggagacgggggccctgccccaccccctgccccctcctctgcatcctcctccccttccccttctccctcatcttcctccccttcccctcccccacccccaccgccccctgcacccccagccccacctgccccccgattcgatatctatgaccccttccaccccaccgacgaggcctactctccaccgcctgctccggagcaaaagtacgacccttttgagcccaccggctccaaccccagctcatcagcggggaccccctcacctgaggaggaagaggaggaggaagaggaagaagaagaggaagaggaagacgaggaggaggaggaaggcctgtcccagagcatcagccgcatctcggagaccctggcgggcatctacgatgacaacagcctgagccaggacttcccaggtgacgagagcccccgcccggacgcgcagcccacacagccgactcccgcccctggaacgccgccccaggtggactccacccgggctgatggagccatgcgccggcgggtcttcgtggtggggaccgaggcagaggcttgtcgggaaggcaaggtctcggtggaggtggtgaccgctggtggagccgccctcccgccgcccctgctgccgcccggcgactcggagatcgaggaaggggagatcgtccagccggaggaggagcccaggctggcgctgtccctcttccgccccggcggccgggccgcccggcctacaccggccgcctcggccacccccacggcccagccccttcctcagcctcccgctccgcgggcccccgagggggacgacttcttgtccctgcatgcggagtcggacggcgagggcgccctgcaggtggacctaggggagccggctcccgcgccgcccgccgccgactcgcgctggggcggcctggacctgcgccgcaagatcctgacccaacggcgggagcgctaccgccagcgctcgccctccccggcgcccgcgcccgccccggccgccgctgctggtccgcccacgcgcaagaagtccaggcgggaacgcaagcgcagcggcgaggccaaggaggccgcctcgtcctcgtcgggcacccagccagcgccgcccgccccggcctcgccctgggactccaagaagcaccgctcgcgggaccgcaagcccggctcccacgcctcgtcgtccgcccgccgccgctcccgctcccgctcccgctcccgctccacccgccgccgctcgcgcagcaccgaccgccgccgcgggggcagccgcaggtcgcggtcccgggagaagcggcgacggcggcggcgctccgcctccccgcccccggccacttcctcatcgtcgtcctcgaggcgcgagcggcaccgcgggaaacaccgggacggtggcggcagcaagaagaagaagaagcggtcgcggtcccggggtgagaagcggtctggggatggcagcgagaaggccccggcgcccgccccgccgccctctggctccacctcgtgtggtgaccgcgacagccgccgccggggggccgtgccaccctccatccaggacctcacggaccacgacctcttcgccatcaagcggaccatcacggtgggccggcttgacaagtccgacccccgaggaccctctcctgctccggcctcctcacctaagcgggaggtcctgtacgactccgagggactgagcggcgaggagcggggcggcaagagcagccagaaggatcggcgccgctcgggggccgcctcctcctcctcctcttcccgggagaaggggtctcgtcggaaggcgctggacgggggtgaccgggatcgggacagggacagagatagggacagggacaggtcatccaagaaggcccggccccccaaggagtcggcgccttcctcagggcccccgccaaagccaccagtcagcagcggctcaggctcttcatcctcgtcgtcctcctgttcttcccggaaggtgaagctgcagtccaaggtggcggtgctgatccgcgagggtgtcagcagcaccaccccggccaaggatgccgcgtcagccggcctgggctccattggcgtcaaattcagccgtgaccgcgagagtcgctcccccttcctcaaacctgacgagcgggcccccactgagatggccaaagcagctccgggcagcaccaagcccaaaaagaccaaggtcaaggccaaggcaggggccaagaaaaccaaggggaccaagggaaagaccaagccatccaagaccaggaaaaaggtccgcagtggaggtggcagcgggggcagtggtggccaggtgtcgctgaagaagtccaaggcggatagctgcagccaggcggcaggcaccaagggggcggaggagacttcctggtccggggaggagcgggcagccaaggttcctagcaccccgccccccaaggcagccccaccaccccctgccctcactccggactcgcagaccgtggacagcagctgcaagacacctgaggtctccttcctgcccgaggaggccactgaggaggctggggtccgaggtggggcggaggaggaggaggaggaagaagaagaggaggaggaagaggaagaggaggaggagcagcagcctgctaccaccacggccaccagcactgctgcagccgccccaagcactgcccccagcgcggggtccacagccggtgactcgggggcggaggacgggccagcttcccgtgtctcccagctgcccacgttgcccccgcccatgccctggaatctgccagctggtgtggactgcaccaccagcggcgtcctggccttgactgcacttctcttcaagatggaagaagccaacctggcgagccgagcgaaggcccaggagctgatccaggccaccaaccagatcctcagccacagaaagccaccctcaagtctggggatgaccccagctcctgtgcccacctctttgggtctgccccctggcccctccagctacctgcttcctggcagcctccctctggggggctgcggttcgaccccccccacccccaccgggctggctgccacgtctgacaagagagagggcagcagcagctctgagggccgtggggacacagataagtatctgaagaagctgcacacgcaggagcgggcggtggaggaggtgaagctggccatcaagccatactatcagaagaaggacatcaccaaggaggagtacaaggacatcctgaggaaggccgtccacaagatctgccacagcaaaagtggggaaatcaacccagtgaaggtgagcaacctggtgcgggcctacgtccagcgctaccgctacttccgcaagcacggtcgcaagccaggggaccccccagggcccccacggccgcccaaggagccagggcccccagacaagggtggcccgggcctgcccctgccccctctctgagagccctggccagctcttcgcccctcacctctttgaaactctggacgtatttatggctccacctccccacctccctcccccgtcagtgggatgactgggggagggttgctgcagggaagaggagagccccctgccctgccctgccccgtgtccacctcccttgcccccaagcctgtccccagtgcccctcccttctgtttgtgcccctctccccaatttcattaaagatttcatgaaacatta

SEQ ID NO: 186323 - DNA, 463 bp, Homo sapiens
  Payload ID: 16691
  Gene Symbol: SCAF1
  Gene Name: SR-related CTD-associated factor 1
  ENST ID: ENST00000595242
  CDS Start-End: 105-463
ggagatagtgtggggcccttgaggtcttcatgtctatcctctacttccatcctttctcccgggacctccactccaaactctcccccctggacccccaggtgaccatggaggaagaagatgagtctcgagggaagacagaggagtcgggggaggatcggggcgatggtccgccagacagagaccccacgctttctccttctgcctttatcctgcgagccatccagcaggctgtgggaagctccctgcagggggacctgcccaatgataaagatggctctcggtgtcatggccttcgatggcggcgctgccggagtccacggtcagagccccgttcccaggaatcagggggcactgacacggctactgtgagtgttggacatggccacggacagcttcctcgcagggctggtgagtgtcctggatcccccggatacctgggttcccagccgcctggacctgcggc

SEQ ID NO: 186324 - DNA, 491 bp, Homo sapiens
  Payload ID: 16691
  Gene Symbol: SCAF1
  Gene Name: SR-related CTD-associated factor 1
  ENST ID: ENST00000601038
  CDS Start-End: 198-491
ctggggtgtctgtgctgggtccagcgcccacccaagcacagggtggagtgggaggaggtggaggagaggaggggtgccagaggggatgctgagggagatagtgtggggcccttgaggtcttcatgtctatcctctacttccatcctttctcccgggacctccactccaaactctcccccctggacccccaggtgaccatggaggaagaagatgagtctcgagggaagacagaggagtcgggggaggatcggggcgatggtccgccagacagagaccccacgctttctccttctgcctttatcctgcgagccatccagcaggctgtgggaagctccctgcagggggacctgcccaatgataaagatggctctcggtgtcatggccttcgatggcggcgctgccggagtccacggtcagagccccgttcccaggaatcagggggcactgacacggctactgtgttggacatggccacggacagcttcctcgca

SEQ ID NO: 186325 - DNA, 662 bp, Homo sapiens
  Payload ID: 16691
  Gene Symbol: SCAF1
  Gene Name: SR-related CTD-associated factor 1
  ENST ID: ENST00000598359
  CDS Start-End: 54-662
gtctgcaagacctgaagagtatcttcagagccatctagaggcctggggtgaccatggaggaagaagatgagtctcgagggaagacagaggagtcgggggaggatcggggcgatggtccgccagacagagaccccacgctttctccttctgcctttatcctgcgagccatccagcaggctgtgggaagctccctgcagggggacctgcccaatgataaagatggctctcggtgtcatggccttcgatggcggcgctgccggagtccacggtcagagccccgttcccaggaatcagggggcactgacacggctactgtgttggacatggccacggacagcttcctcgcagggctggtgagtgtcctggatcccccggatacctgggttcccagccgcctggacctgcggcctggcgaaagtgaggacatgctggagctggtggctgaggtccgaatcggggacagagatcccatccctctgcctgtgcccagcctgctgccccgtctcagggcctggaggacgggcaaaacggtttctccacagtcgaactcctctaggcccacctgtgcccgtcacctcaccttgggcacgggagacgggggccctgccccaccccctgccccctcctctgcatcctcctccccttccccttctccctcatct

SEQ ID NO: 186326 - DNA, 2084 bp, Homo sapiens
  Payload ID: 16692
  Gene Symbol: SCAF11
  Gene Name: SR-related CTD-associated factor 11
  ENST ID: ENST00000266589
  CDS Start-End: 1732-2084
tggcttaagccgcgcggagcagcgcaacctgggtcgctccctgcttcgccgccgcctccggaccgagccagcggagtcagtgtcctagagaccctgtaacaccacaaagcggacgaaggagtccatgttggggaacttggcagcggagtgactgggacctgggaacctactgtggggccgcggccggaccgagcgcctcgacctcggtctgagtattgaaattagaccaaacagccttgtcactgatatgaagaaagtttgcctgatctgggtagaaggtcaaaccagtcgtaacattctcttaactcaaagcctaatccagagcgcgtctctaacgctcttcaagccagtgaagtctgagagggataaggaagctgcagaagaaaagtttgaagctagcagaggttggttcatgaagtttaaggaaagaagccatctccataacataaaagtgcaaggcgaagcagcaagtggtgatgcggaagctgcatcaggttatccagaagacctagctaacatcattgatgaaagtggctatactaaacaaaagatttttaatgcagatgagccagccttctattgaaagtagatgccatccaggactttcataagtagagaggagaagtcaatgcctggcttcaaagcttccaaggacaggctgactgtcttgttaggggctaatgcagctggtgactataaatttataaaccagtgctcactgaccgttctgaaaattccaggactcttaagaattatactgaatctactctgtgctctataaatggaacaacaaagcttggatgacagcacatccgtttacagcatggtttactgaatattttgagctcactgttgagaccaaatgctcagataaaaagattcctttcaacatagtacttacttattgacagtgcacgtagccatccaagaactctgatggaaatacacggagataaatgttgccatgcctgctaacacaacatccatttttcaacccagtgatcaagaagtaattttgactgttaagtcttattctgttagaaatacatttcataaggctacagctgcttcagacagtgatttcttggatggatatgggcaaagtaatggaaaggattcaccattctagatgccataaagaacattcgtaattcatagaaggaggttaaaatatgaacaggattgtgaagaagttgattccaaccctcatggatgacttttagggattcaaaacttgtgtggaggaagtaactattacaggtgtggtataaacagcaggagaactattatagaattagaagtggagcctgaagacatgactgaattgctgcaattttatgataaattttgaatgaagagttgtttcttagggatgaacaaagaatgtggtttcttgagatggaatgtgctcttgctgaagatgtgaacattgttaaaatagtatataaacttagttgataacacagtggcagagtttgagaggattaactccaattttgaaagacattctgctgtggataaaatgctgtcaaatagcatcttgtacacagagaaattttttgtgaaaggagtgtcagtgtggcatacttgaatgttatctcattttaaggaattgccacagccaaccctgcccttcagcaactaccatcctgtgattagtcagcaaccatcaacatcaaagcaagaccctccaccatcaaaaagattatgacttgctgaagccttgctgagatgattgttagcatttttagcaataaggaaacccttttccaaagagaaatgaagaagaaaactgtatgtaccctaaatatgggagataagaagtatgaagacatggaaggtgaagaaaacggagataatactatttccactggtctgttgtacagtgaggctgacagatgcccaatatgtcttaattgtctattagaaaaggaagttggttttccagaaagctgtaatcatgtcttctgtatgacttgtattcttaaatgggcagagacactggcttcatgtcctattgaccgtaaaccttttcaggcagtgtttaaattcagtgcattggaaggttatgttaaggttcaagt

SEQ ID NO: 186327 - DNA, 7543 bp, Homo sapiens
  Payload ID: 16692
  Gene Symbol: SCAF11
  Gene Name: SR-related CTD-associated factor 11
  Uniprot ID: Q99590
  ENST ID: ENST00000369367
  CDS Start-End: 235-4626
tggcttaagccgcgcggagcagcgcaacctgggtcgctccctgcttcgccgccgcctccggaccgagccagcggagtcagtgtcctagagaccctgtaacaccacaaagcggacgaaggagtccatgttggggaacttggcagcggagtgactgggacctgggaacctactgtggggccgcggccggaccgagcgcctcgacctcggtctgaggaaacccttttccaaagagaaatgaagaagaaaactgtatgtaccctaaatatgggagataagaagtatgaagacatggaaggtgaagaaaacggagataatactatttccactggtctgttgtacagtgaggctgacagatgcccaatatgtcttaattgtctattagaaaaggaagttggttttccagaaagctgtaatcatgtcttctgtatgacttgtattcttaaatgggcagagacactggcttcatgtcctattgaccgtaaaccttttcaggcagtgtttaaattcagtgcattggaaggttatgttaaggttcaagtaaaaaaacagctgagagaaacaaaagacaagaaaaatgaaaactcatttgagaaacaggtctcctgtcatgaaaattctaaaagctgtataagaagaaaagccatcgtaagagaagatctattaagtgcaaaagtttgtgacttgaagtggatacatagaaactctttatacagtgaaacaggaggaaagaaaaatgcagcaataaagataaataagcctcagagatcaaattggagtacaaatcagtgcttcagaaattttttctccaatatgttttcttctgttagccactctggagaatcttcctttacctatagagcttattgtacagaatttatagaagccagtgaaatcagtgcattgattaggcagaagagacatgaactggaattgtcatggtttcctgatacattacctggaattggaagaattggttttataccctggaatgttgaaacagaagtccttcctctcatttcttctgtgttgccaagaactatttttccaacaagtaccatatctttcgaacattttggtacttcttgcaagggatatgcattagcacatactcaagaaggggaagaaaagaagcaaacttctggtacatcaaataccagaggatcaagacgaaaacctgcaatgacaactcctacaaggaggtctacacgtaacacaagagctgaaacagccagtcagtctcagagatccccaatatcagacaattctgggtgtgatgccccaggtaacagtaatccatctttaagtgttccctcttcagctgagtcagaaaagcaaacaagacaggctccaaaacggaagtctgtaagaagaggaagaaaaccacctttactgaaaaagaaacttcggagctctgtagctgcccctgaaaaatcatcttccaatgattcagtagatgaagaaacagcagaatctgacacatcacctgtgttagaaaaagagcaccaaccagatgtagacagtagtaacatttgtactgtgcagactcatgtagaaaaccagtctgctaattgcttgaaaagttgcaatgagcaaatagaagaaagtgagaagcatactgcaaattatgatacagaggaaagagtaggatcttcatcttctgagtcttgtgctcaagatcttcctgtgctagttggtgaggaaggggaagttaaaaaactcgagaatacaggtatagaggctaatgttttgtgtttggaaagtgagatttctgaaaatattcttgaaaaaggaggtgatccattggaaaagcaagaccagatatctggactttcacaatcagaggtaaagacagatgtatgtacagttcatcttccaaatgattttcctacatgtttaacatctgaaagcaaagtgtaccaacctgtatcttgtcccctaagtgacttatctgagaatgtagagtcagtggttaatgaagaaaaaataacagagagttccctagtagaaattactgaacataaagattttacactaaaaacagaggagcttatagagagccccaagttagaatcttctgagggtgaaattatacagacagtggacagacaatctgttaagagcccagaggttcaattgcttgggcatgttgaaactgaagatgtagaaataattgcaacatgtgatacttttgggaatgaagatttcaataatattcaagactctgaaaataacttactaaaaaataatcttctgaacaccaaattggaaaaatctttagaagaaaagaatgaatcgctgaccgaacatcctagatctacagagttgcctaaaacacacattgaacagattcagaagcattttagtgaggacaacaatgaaatgatacctatggagtgtgattcattttgcagtgaccaaaatgaatctgaagttgaaccatctgtaaatgctgatcttaaacaaatgaatgaaaattctgtgacacactgttctgaaaataatatgccgtcttctgatcttgcggatgaaaaggttgaaactgtttctcaaccatctgaaagcccaaaagataccatagataaaaccaaaaagcctcgtactcgaagatctagatttcattctccatctacaacttggtcacccaacaaagacactccacaagaaaagaagcggccccagtctccatctcccagaagagaaactgggaaagaaagcaggaagtctcaatcaccatctcctaagaatgagtcagccagaggccggaaaaaatcccgttctcagtccccaaaaaaggatattgcaagagaaaggaggcaatctcagtctcggtctccaaaaagggatactactagggaaagcagaagatctgaatcactgtccccaagaagagaaacttctagagagaacaaaagatctcagccaagagtgaaagattcttccccaggagaaaaatccaggtcccagagcagagaacgagaaagtgatagagatgggcagaggagagagagagaaaggagaaccagaaagtggtctaggtccagatctcattctaggtccccctcaagatgtagaacaaaaagtaagagttcatcatttggtagaattgacagagatagttactctccccggtggaagggaagatgggcaaatgatggttggagatgtccacgaggaaatgatcggtacagaaagaatgacccagagaaacagaatgaaaatacaagaaaagaaaaaaatgacatccatctagatgctgatgatccaaattctgctgacaaacatagaaatgactgtcccaattggataacagaaaaaataaactctgggcctgatccaagaaccagaaatccagaaaagttgaaagagtctcattgggaagaaaatagaaatgaaaattcaggaaattcttggaataaaaactttggttctggttgggtatctaaccgtggtagaggcagaggcaaccgtggcagaggcacttacagaagtagttttgcctataaagatcagaatgaaaatcggtggcaaaatcgaaaacccctctcagggaattcaaacagttcagggagtgaatctttcaagtttgtggaacagcaatcctataagcgaaaaagtgaacaggagttctcatttgatacaccagcagatagatctggatggacatctgcatccagctgggccgtgagaaagactttgccagcagatgtacaaaactactactcacgacgaggcagaaattcttcaggtccacagtctggatggatgaaacaagaggaggaaacatctggacaggattctagcctaaaagaccaaacaaaccagcaagttgatggttctcagctacctataaatatgatgcaaccgcaaatgaatgtaatgcagcaacaaatgaatgcacaacaccagcctatgaatatcttcccatatccagtgggtgttcatgctcctttgatgaacatccaacgcaatccatttaacattcatcctcagctacccttgcatctccacacaggagtgcccctcatgcaggtagccactcctaccagtgtatctcagggactaccaccaccaccaccccctcccccaccatcccaacaagtcaactacattgcttcacaaccagatggaaagcaattgcagggtattcctagttcttctcatgtaagtaataacatgagtacaccagttttgcctgctccgacagcagccccaggaaatacgggaatggttcagggaccaagttctggtaatacttcgtcatcaagtcacagcaaagcctctaatgctgctgtaaaattggcagaaagcaaagtaagtgttgcagtggaagccagcgcagatagctcgaagacagacaagaaattgcaaattcaagaaaaagcagcacaagaggtaaaattggccatcaagccattttaccaaaataaagatatcaccaaggaagaatataaagaaattgtacggaaagcagtagataaagtttgtcatagtaagagtggagaagtaaattctactaaagtggcaaatctggttaaagcctatgtagacaaatacaaatattcacggaaggggagccaaaagaaaactctggaagaacctgtgtctactgaaaaaaacataggctgaaatggggaacgctgtcaaggacattatcaggatatctgcaaagtgcaatttcaacatgtaccattaactgaaaatcatacataactgtgattgaaatttggttttgataaaattatttttttaacataggatatgatgttttgttctaaataaatataggtctgcactgcaacttctgtatccttccttcccctccaccctcccccacaaaattcaagggaaagtaaagggtttaaaggaatgtgcatctttactaggactgtgttatagtgtggatactggaaaatgtatagctttttgattagggcaatggagtgcataaattagaaacttctaagtgcactggttttcaaagagatatatataatgcatttattctgtcaggttaaaatgtaaagtatgatctttatgattttttccctctaattatagaaagttaaataatgtattaccatgaaaaatgtttctaatattaaatagaacatatcagttgcaaagttcctaatgtgtatttttaaagcacatatctgaataaattgcctagatagaaaaaaaattatcacgagtaaaatttagtgttcaaaacattgagacactcttcacctattgtatgaccaaataaaggttatgctgcttgtttttcttttgtgcctttgtttacccctaattgagataagcagtttgacttactagattacaactttggcagttcaaagtctttgttgaagactttgaggaaaaagatttggaaaaattgttgactttcggccgggcatgatggctcacgcctgtaatcccagcactttgggaggccgaggtggcggatcacctgaggtcaggagttcgagaccagcctggccaacatggtgaaatcccgtctctactaaaaatacaaaaattagccaggcgtggtggtgggcgcctgtaatcccagctatgcgagaggctgaggcaggagaatcagttgaacccgggaggcggggattgcagtgagccgagaccatgccattgcactccagcctgggcaacaggagcaaatctccgtctcaaaaaaaagaaaaaaaaaagtgttgactttgtagaaattatgttctttcatagtatcttcttctacccgttgcagacgataaattatttgtgccaattcgagaattgctgttaggctgttatcctcccttccttggggctaagaattacaagactcatggcactggcgtaaagttgttgtttatctaatcactgatgaaatattttcacacttgaaaatccccaaatgctttacaatgaatgaagtgttaatttggtgaccaggtggtagccattagccatgttgcaaaattctagacagtaaaacctgtgttttagaaacagaggggaaatttaaataatggagtcctggttagcctttcagggattagggatttgggtttttttttttttctctttttaatactagaatatctcagtttttataaaaggtaagtttaaaatgtttattgtgccattattttaactggcatcttgaaagaacagtaggttttctccatgataaactgattccagtaagaattttcagtacataccaagtacctggaaagttcttcagataagttaatagatccaaggagatacatgcctcagtgagataaactgacctttttactagctaaactatttagccagagcaatactctgtagaactgtgcttttctaaagtaaagattatctgtttctcaattttatgtgcataatacttttcctggtgctagctttgataggcaaaatattttgaaatgttggtcccataatgattgtgctagttcataagctttgttgttatgagtgtaatcataaaaatatttccaagcagtttttgacctttattctacatttctgggcatttgtaatatggtattctactggtatatatttttaaagtttgcgtttagattatggtaaagaaatttcaagcatatttcttctaataaagtattaagacagtgtttcagaatatcaaggcacacctccttagttgttttagattagaactctagaaacaattttgtgaacattgaaagtattttgagttaagcctaagctgattaatcacacaatacatacttttcctgcattttctttcagtgacatttgagaattgggtgacattttaaaatgtgttttataccatttagcttttgcaaacaagttctaaagttttggagaaaaagtgatgtggtcaagagttgaagtctcatatatctttagtagcactcccatgaattatttccgtgacagtaacaagtgtgtgttccatgtctgatttggggcactggttagactgcattaatagctacttgattagaattcgaacttttaaaattttgaaatgtttaagaatgtattagaaaatgcatgctttatgttgaaaaaatacattgctttaatattcctcattcttgagttaagaaatttatgttaattttgcatgggcacaaacttaatcagaaacattttgtggagttacatttcctcttattatttatcaaggttcagtattgatctttgaaaccttggtcccgttaacttactagtcacattgaccaatgttttatagaaatgcctagaattttgagactaatagtagttatccattaacattccaaaagttttgtgctttttaaaatttgttttggtaattatcacatttttttctcttaccttcctttaaatggccacagtgtgtactgctggaatgttccatccaaaagatgtagcttcagaagcacagtgattgccccagggtccatgagatattgtttgtattatgaagttggagtgctgtctactgaaattatactcttaaataaatatgtatgtagtgtgtaatattttctaataaattcttttgataaactaa

SEQ ID NO: 186328 - DNA, 1336 bp, Homo sapiens
  Payload ID: 16692
  Gene Symbol: SCAF11
  Gene Name: SR-related CTD-associated factor 11
  ENST ID: ENST00000395453
  CDS Start-End: 250-483
aagggggagtagcggtggcttaagccgcgcggagcagcgcaacctgggtcgctccctgcttcgccgccgcctccggaccgagccagcggagtcagtgtcctagagaccctgtaacaccacaaagcggacgaaggagtccatgttggggaacttggcagcggagtgactgggacctgggaacctactgtggggccgcggccggaccgagcgcctcgacctcggtctgaggaaacccttttccaaagagaaatgaagaagaaaactgtatgtaccctaaatatgggagataagaagtatgaagacatggaaggtgaagaaaacggagataatactatttccactggtctgttgtacagtgaggctgacagatgcccaatatgtcttaattgtctattagaaaaggaagttggttttccagaaagctgtaatcatgtcttctgtatgacttgtattcttaaatgggcagagggacttttcacataggttatttgatttcttctttatatcagccttgtggaataaccagagcagatacgatagtgtccttccattttacagatgaggaaacttggattttatgttctatgacttggtcaagatctcatagtttaagaggcagaagtgaatttagaactgattttctaattcctgtttttaatttagtgtggactaatttcagagtctgaattagagatattaccgtcatagacagtgaataagaaacaagacattcgtgacttttaatgtattatgttgactcaatttgggccaaatactttgaagtaaatattaatttaatataagccttattgttatgaaatgttaagtaaaaaattattgttcatattatgctatattttctaagttaatatttgtcagtctgtaaaaattagtaaagaagataatatcttaaaaatattttaacattagctgcattccaattgttaatgttcttaaatatgttggaattaattgcatattacataattggggttttcaaagcgctatgttttgcttaaattttcattaatagtgtggaaaggagaatgtaactgtatagtgactctggctgagttctcaaaagaaggaagagaagatttgttatacaaattgaattaataatagtatacatataaactattttaatttagtaaaacctaaactggtctttaacaagaagtgacaggataggtgaaaatgtattttggggaaaagtattttgagttttgctgaattaatatggttggtaaatctctctctgtgtaggatcactgtttaatgaaataatgcatattttttttctgccacccaaataaagatttttatctgtgttgaa

SEQ ID NO: 186329 - DNA, 1931 bp, Homo sapiens
  Payload ID: 16692
  Gene Symbol: SCAF11
  Gene Name: SR-related CTD-associated factor 11
  ENST ID: ENST00000395454
  CDS Start-End: 254-487
ggggaagggggagtagcggtggcttaagccgcgcggagcagcgcaacctgggtcgctccctgcttcgccgccgcctccggaccgagccagcggagtcagtgtcctagagaccctgtaacaccacaaagcggacgaaggagtccatgttggggaacttggcagcggagtgactgggacctgggaacctactgtggggccgcggccggaccgagcgcctcgacctcggtctgaggaaacccttttccaaagagaaatgaagaagaaaactgtatgtaccctaaatatgggagataagaagtatgaagacatggaaggtgaagaaaacggagataatactatttccactggtctgttgtacagtgaggctgacagatgcccaatatgtcttaattgtctattagaaaaggaagttggttttccagaaagctgtaatcatgtcttctgtatgacttgtattcttaaatgggcagagaggagctatctataagcagcctatgtgattgaggatagagcagcaggaggaagcgagaaattagaaatcgaggatcctgaattcccaaataaggaaggtttcttgttcttacatttaaatgtgggtttgtctgagctgagaatttataatgcttcagaatagtagggtgtgttttactgaaatcattaggaagattatttttttctatcaaaattgccttcttaactgatacaacaaccttagtacagagcattcacagtaaaacatatgctctgtttaatacacattacactgtaaagcagtgagcaaattccattaattttgtagctgtatcataaagccaatgatgttattagactacttggttatgaaactgaattagatactttaaaaattattgaaatgaaagtcagtaattcaaacaagtgagtcattgaaggatattttgttgtatataaggaatcaaaatggtaaataattgaaggatatttttattgtatttaaggcaacaaaatttgagataattttcttcaaaattaaaataacttaaaaatagagtaagtattagttaaaatttctttacattagtttaaaatgtgaacttttaaaacctcacaacttggaaatttaattgtaaattttactctgaaaactaaaaacatctttgagacctttctggatagatatctgctggatataagagtgaggcatccttgggagttccttaaaattaggccagtctgggccgggtgtggtggctcacgcttgtaatcccaacactttgggaggccggggtgggccaatcgctttgagctcaggagttcgagaccagcctgggcaacatggcaaaacccgatctctacaaaaaattagctgggcatggtggtgcgtgcctgtagtcccaactacttgggaaactgaggtgaggccatcgcttgaacctaggaggttgaggttgcagtgagccgtgatgccgctgcactacagcctgggcaagagggtgagaccctgtttaaaaaaaaaattatgatggctgagtctgtgtcaaagaaaattaacttattttttggtgttaactaaattatctttaggtaattacattttatatagattgtgatgatatatggcagtagttttcctattactactacttttttttcttgtttttcctttgtgtttttgtaataccagtggagccttttcttaaaatgaaactaggcaaacctaagacaattatgcttaaggaaaaaaaagggggggaatcttactcagaactgttttttgaaacggatcaaatggaatggctcagagcaggtgtgatggctcctcctgtaatcccaacactttgggaggctgaggtaggaggatcgtttgagcacaggagttcaagatgaagcctgagcaacatagtgagaccctgtctctatgaaaaaagttaaaaaaaaaaaaaaaaaaaaaa

SEQ ID NO: 186330 - DNA, 3271 bp, Homo sapiens
  Payload ID: 16692
  Gene Symbol: SCAF11
  Gene Name: SR-related CTD-associated factor 11
  ENST ID: ENST00000547018
  CDS Start-End: 467-3271
gaaagtgccagaaaagcgacgtcctcagggcgggagcaggggacgccgcaacgtagtctgcgagaatgcaggaaggcggcagtgaagcggtcggtcggcggggccgcggcaaagtggggaggaaactcatcccgggcaggcgtcagggtggctggagagcgcagcacgcgcgaacagaacgggggcaggcgacaggaaaacgtgtgagcgcgcggctgaaagcgactgggacctgggaaacccttttccaaagagaaatgaagaagaaaactgtatgtaccctaaatatgggagataagaagtatgaagacatggaaggtgaagaaaacggagataatactatttccactggtctgttgtacagtgaggctgacagatgcccaatatgtcttaattgtctattagaaaaggaagttggttttccagaaagctgtaatcatgtcttctgtatgacttgtattcttaaatgggcagaggtaaatataatttgttaatcacttttcagacactggcttcatgtcctattgaccgtaaaccttttcaggcagtgtttaaattcagtgcattggaaggttatgttaaggttcaagtaaaaaaacagctgagagaaacaaaagacaagaaaaatgaaaactcatttgagaaacaggtctcctgtcatgaaaattctaaaagctgtataagaagaaaagccatcgtaagagaagatctattaagtgcaaaagtttgtgacttgaagtggatacatagaaactctttatacagtgaaacaggaggaaagaaaaatgcagcaataaagataaataagcctcagagatcaaattggagtacaaatcagtgcttcagaaattttttctccaatatgttttcttctgttagccactctggagaatcttcctttacctatagagcttattgtacagaatttatagaagccagtgaaatcagtgcattgattaggcagaagagacatgaactggaattgtcatggtttcctgatacattacctggaattggaagaattggttttataccctggaatgttgaaacagaagtccttcctctcatttcttctgtgttgccaagaactatttttccaacaagtaccatatctttcgaacattttggtacttcttgcaagggatatgcattagcacatactcaagaaggggaagaaaagaagcaaacttctggtacatcaaataccagaggatcaagacgaaaacctgcaatgacaactcctacaaggaggtctacacgtaacacaagagctgaaacagccagtcagtctcagagatccccaatatcagacaattctgggtgtgatgccccaggtaacagtaatccatctttaagtgttccctcttcagctgagtcagaaaagcaaacaagacaggctccaaaacggaagtctgtaagaagaggaagaaaaccacctttactgaaaaagaaacttcggagctctgtagctgcccctgaaaaatcatcttccaatgattcagtagatgaagaaacagcagaatctgacacatcacctgtgttagaaaaagagcaccaaccagatgtagacagtagtaacatttgtactgtgcagactcatgtagaaaaccagtctgctaattgcttgaaaagttgcaatgagcaaatagaagaaagtgagaagcatactgcaaattatgatacagaggaaagagtaggatcttcatcttctgagtcttgtgctcaagatcttcctgtgctagttggtgaggaaggggaagttaaaaaactcgagaatacaggtatagaggctaatgttttgtgtttggaaagtgagatttctgaaaatattcttgaaaaaggaggtgatccattggaaaagcaagaccagatatctggactttcacaatcagaggtaaagacagatgtatgtacagttcatcttccaaatgattttcctacatgtttaacatctgaaagcaaagtgtaccaacctgtatcttgtcccctaagtgacttatctgagaatgtagagtcagtggttaatgaagaaaaaataacagagagttccctagtagaaattactgaacataaagattttacactaaaaacagaggagcttatagagagccccaagttagaatcttctgagggtgaaattatacagacagtggacagacaatctgttaagagcccagaggttcaattgcttgggcatgttgaaactgaagatgtagaaataattgcaacatgtgatacttttgggaatgaagatttcaataatattcaagactctgaaaataacttactaaaaaataatcttctgaacaccaaattggaaaaatctttagaagaaaagaatgaatcgctgaccgaacatcctagatctacagagttgcctaaaacacacattgaacagattcagaagcattttagtgaggacaacaatgaaatgatacctatggagtgtgattcattttgcagtgaccaaaatgaatctgaagttgaaccatctgtaaatgctgatcttaaacaaatgaatgaaaattctgtgacacactgttctgaaaataatatgccgtcttctgatcttgcggatgaaaaggttgaaactgtttctcaaccatctgaaagcccaaaagataccatagataaaaccaaaaagcctcgtactcgaagatctagatttcattctccatctacaacttggtcacccaacaaagacactccacaagaaaagaagcggccccagtctccatctcccagaagagaaactgggaaagaaagcaggaagtctcaatcaccatctcctaagaatgagtcagccagaggccggaaaaaatcccgttctcagtccccaaaaaaggatattgcaagagaaaggaggcaatctcagtctcggtctccaaaaagggatactactagggaaagcagaagatctgaatcactgtccccaagaagagaaacttctagagagaacaaaagatctcagccaagagtgaaagattcttccccaggagaaaaatccaggtcccagagcagagaacgagaaagtgatagagatgggcagaggagagagagagaaaggagaaccagaaagtggtctaggtccagatctcattctaggtccccctcaagatgtagaacaaaaagtaagagttcatcatttggtagaattgacagagatagttactctccccggtggaagggaagatgggcaaatgatggttggagatgtccacgaggaaatgatcggtacagaaagaatgacccagagaaacagaatgaaaat

SEQ ID NO: 186331 - DNA, 3934 bp, Homo sapiens
  Payload ID: 16692
  Gene Symbol: SCAF11
  Gene Name: SR-related CTD-associated factor 11
  ENST ID: ENST00000549162
  CDS Start-End: 119-3934
tacaggaaactctttatacagtgaaacaggaggaaagaaaaatgcagcaataaagataaataagcctcagagatcaaattggagtacaaatcagtgcttcagaaattttttctccaatatgttttcttctgttagccactctggagaatcttcctttacctatagagcttattgtacagaatttatagaagccagtgaaatcagtgcattgattaggcagaagagacatgaactggaattgtcatggtttcctgatacattacctggaattggaagaattggttttataccctggaatgttgaaacagaagtccttcctctcatttcttctgtgttgccaagaactatttttccaacaagtaccatatctttcgaacattttggtacttcttgcaagggatatgcattagcacatactcaagaaggggaagaaaagaagcaaacttctggtacatcaaataccagaggatcaagacgaaaacctgcaatgacaactcctacaaggaggtctacacgtaacacaagagctgaaacagccagtcagtctcagagatccccaatatcagacaattctgggtgtgatgccccaggtaacagtaatccatctttaagtgttccctcttcagctgagtcagaaaagcaaacaagacaggctccaaaacggaagtctgtaagaagaggaagaaaaccacctttactgaaaaagaaacttcggagctctgtagctgcccctgaaaaatcatcttccaatgattcagtagatgaagaaacagcagaatctgacacatcacctgtgttagaaaaagagcaccaaccagatgtagacagtagtaacatttgtactgtgcagactcatgtagaaaaccagtctgctaattgcttgaaaagttgcaatgagcaaatagaagaaagtgagaagcatactgcaaattatgatacagaggaaagagtaggatcttcatcttctgagtcttgtgctcaagatcttcctgtgctagttggtgaggaaggggaagttaaaaaactcgagaatacaggtatagaggctaatgttttgtgtttggaaagtgagatttctgaaaatattcttgaaaaaggaggtgatccattggaaaagcaagaccagatatctggactttcacaatcagaggtaaagacagatgtatgtacagttcatcttccaaatgattttcctacatgtttaacatctgaaagcaaagtgtaccaacctgtatcttgtcccctaagtgacttatctgagaatgtagagtcagtggttaatgaagaaaaaataacagagagttccctagtagaaattactgaacataaagattttacactaaaaacagaggagcttatagagagccccaagttagaatcttctgagggtgaaattatacagacagtggacagacaatctgttaagagcccagaggttcaattgcttgggcatgttgaaactgaagatgtagaaataattgcaacatgtgatacttttgggaatgaagatttcaataatattcaagactctgaaaataacttactaaaaaataatcttctgaacaccaaattggaaaaatctttagaagaaaagaatgaatcgctgaccgaacatcctagatctacagagttgcctaaaacacacattgaacagattcagaagcattttagtgaggacaacaatgaaatgatacctatggagtgtgattcattttgcagtgaccaaaatgaatctgaagttgaaccatctgtaaatgctgatcttaaacaaatgaatgaaaattctgtgacacactgttctgaaaataatatgccgtcttctgatcttgcggatgaaaaggttgaaactgtttctcaaccatctgaaagcccaaaagataccatagataaaaccaaaaagcctcgtactcgaagatctagatttcattctccatctacaacttggtcacccaacaaagacactccacaagaaaagaagcggccccagtctccatctcccagaagagaaactgggaaagaaagcaggaagtctcaatcaccatctcctaagaatgagtcagccagaggccggaaaaaatcccgttctcagtccccaaaaaaggatattgcaagagaaaggaggcaatctcagtctcggtctccaaaaagggatactactagggaaagcagaagatctgaatcactgtccccaagaagagaaacttctagagagaacaaaagatctcagccaagagtgaaagattcttccccaggagaaaaatccaggtcccagagcagagaacgagaaagtgatagagatgggcagaggagagagagagaaaggagaaccagaaagtggtctaggtccagatctcattctaggtccccctcaagatgtagaacaaaaagtaagagttcatcatttggtagaattgacagagatagttactctccccggtggaagggaagatgggcaaatgatggttggagatgtccacgaggaaatgatcggtacagaaagaatgacccagagaaacagaatgaaaatacaagaaaagaaaaaaatgacatccatctagatgctgatgatccaaattctgctgacaaacatagaaatgactgtcccaattggataacagaaaaaataaactctgggcctgatccaagaaccagaaatccagaaaagttgaaagagtctcattgggaagaaaatagaaatgaaaattcaggaaattcttggaataaaaactttggttctggttgggtatctaaccgtggtagaggcagaggcaaccgtggcagaggcacttacagaagtagttttgcctataaagatcagaatgaaaatcggtggcaaaatcgaaaacccctctcagggaattcaaacagttcagggagtgaatctttcaagtttgtggaacagcaatcctataagcgaaaaagtgaacaggagttctcatttgatacaccagcagatagatctggatggacatctgcatccagctgggccgtgagaaagactttgccagcagatgtacaaaactactactcacgacgaggcagaaattcttcaggtccacagtctggatggatgaaacaagaggaggaaacatctggacaggattctagcctaaaagaccaaacaaaccagcaagttgatggttctcagctacctataaatatgatgcaaccgcaaatgaatgtaatgcagcaacaaatgaatgcacaacaccagcctatgaatatcttcccatatccagtgggtgttcatgctcctttgatgaacatccaacgcaatccatttaacattcatcctcagctacccttgcatctccacacaggagtgcccctcatgcaggtagccactcctaccagtgtatctcagggactaccaccaccaccaccccctcccccaccatcccaacaagtcaactacattgcttcacaaccagatggaaagcaattgcagggtattcctagttcttctcatgtaagtaataacatgagtacaccagttttgcctgctccgacagcagccccaggaaatacgggaatggttcagggaccaagttctggtaatacttcgtcatcaagtcacagcaaagcctctaatgctgctgtaaaattggcagaaagcaaagtaagtgttgcagtggaagccagcgcagatagctcgaagacagacaagaaattgcaaattcaagaaaaagcagcacaagaggtaaaattggccatcaagccattttaccaaaataaagatatcaccaaggaagaatataaagaaattgtacggaaagcagtagataaagtttgtcatagtaagagtggagaagtaaattctactaaagtggcaaatctggttaaagcctatgtagacaaatacaaatattcacggaaggggagccaaaagaaaactctggaagaacctgtgtctactgaaaaaaacataggctga

SEQ ID NO: 186332 - DNA, 5296 bp, Homo sapiens
  Payload ID: 16692
  Gene Symbol: SCAF11
  Gene Name: SR-related CTD-associated factor 11
  Uniprot ID: Q99590
  ENST ID: ENST00000465950
  CDS Start-End: 1211-4657
gaataacagttaagttttggggagtaaaaactgtttcaatttttgactgtgttgggggttggtgctcctaatccctgtgttgttaaagggtcgactatattgtatttttgaaaattgctagagagtggacgtaaagtgttctcactaaacaaattataactatgtgaggtagtgcatatattaagtagctagatttggtcattccacaatgtatatgtacttcaaaacatcatgttgtacatgagaaacacagttttatctgttagtcagttttaaaaataaaaaatattccaactagaaactctgttgtagtttttgaaattacaacttggaggctttgaggaactgattagaagtctcctttctgtttcaggctttcatatccaaaccatagatctttagaagtaacatctgttaattaattattaataaatagtttgagtctttattaattcatggataacttgaccattttctctctccttttgcttagataatcccagatcatggccgggcacagtagctcacgcctgtattcccagcagtttgggaggccgaggcaggcagatcacttgaactcaggagtttgagaccagcttgggcaacatggcaaaaccctgtctctattaaaaatacaaaaattagctgggcatggtagtgcatgcctgtagtcccagctacctgggaggctgaggtgggaggatcgcttgagcctgggaggttgaggcttctgtgcgcgatgattgctccagtgatcacgccattgcactccagcctgggtgacagagtgagaccctgtctccaaaaaaaaaaaaaattaagcaagtagcagttacaagaccaaaagttattttcctttttttttttctctataaaattgcccatttggaccaaatctagttataacttatttcagtgtcattaagaaagttgatgaataagtcatattactcagatgttagtagctatgcatttattaatagttttatttataagtatttagtttcactctgttgcagactattttatgctaaaattagctaaagccaaattactatttcttaaaacatattttttactttttttttttttttaaatattattaggtacttcttgcaagggatatgcattagcacatactcaagaaggggaagaaaagaagcaaacttctggtacatcaaataccagaggatcaagacgaaaacctgcaatgacaactcctacaaggaggtctacacgtaacacaagagctgaaacagccagtcagtctcagagatccccaatatcagacaattctgggtgtgatgccccaggtaacagtaatccatctttaagtgttccctcttcagctgagtcagaaaagcaaacaagacaggctccaaaacggaagtctgtaagaagaggaagaaaaccacctttactgaaaaagaaacttcggagctctgtagctgcccctgaaaaatcatcttccaatgattcagtagatgaagaaacagcagaatctgacacatcacctgtgttagaaaaagagcaccaaccagatgtagacagtagtaacatttgtactgtgcagactcatgtagaaaaccagtctgctaattgcttgaaaagttgcaatgagcaaatagaagaaagtgagaagcatactgcaaattatgatacagaggaaagagtaggatcttcatcttctgagtcttgtgctcaagatcttcctgtgctagttggtgaggaaggggaagttaaaaaactcgagaatacaggtatagaggctaatgttttgtgtttggaaagtgagatttctgaaaatattcttgaaaaaggaggtgatccattggaaaagcaagaccagatatctggactttcacaatcagaggtaaagacagatgtatgtacagttcatcttccaaatgattttcctacatgtttaacatctgaaagcaaagtgtaccaacctgtatcttgtcccctaagtgacttatctgagaatgtagagtcagtggttaatgaagaaaaaataacagagagttccctagtagaaattactgaacataaagattttacactaaaaacagaggagcttatagagagccccaagttagaatcttctgagggtgaaattatacagacagtggacagacaatctgttaagagcccagaggttcaattgcttgggcatgttgaaactgaagatgtagaaataattgcaacatgtgatacttttgggaatgaagatttcaataatattcaagactctgaaaataacttactaaaaaataatcttctgaacaccaaattggaaaaatctttagaagaaaagaatgaatcgctgaccgaacatcctagatctacagagttgcctaaaacacacattgaacagattcagaagcattttagtgaggacaacaatgaaatgatacctatggagtgtgattcattttgcagtgaccaaaatgaatctgaagttgaaccatctgtaaatgctgatcttaaacaaatgaatgaaaattctgtgacacactgttctgaaaataatatgccgtcttctgatcttgcggatgaaaaggttgaaactgtttctcaaccatctgaaagcccaaaagataccatagataaaaccaaaaagcctcgtactcgaagatctagatttcattctccatctacaacttggtcacccaacaaagacactccacaagaaaagaagcggccccagtctccatctcccagaagagaaactgggaaagaaagcaggaagtctcaatcaccatctcctaagaatgagtcagccagaggccggaaaaaatcccgttctcagtccccaaaaaaggatattgcaagagaaaggaggcaatctcagtctcggtctccaaaaagggatactactagggaaagcagaagatctgaatcactgtccccaagaagagaaacttctagagagaacaaaagatctcagccaagagtgaaagattcttccccaggagaaaaatccaggtcccagagcagagaacgagaaagtgatagagatgggcagaggagagagagagaaaggagaaccagaaagtggtctaggtccagatctcattctaggtccccctcaagatgtagaacaaaaagtaagagttcatcatttggtagaattgacagagatagttactctccccggtggaagggaagatgggcaaatgatggttggagatgtccacgaggaaatgatcggtacagaaagaatgacccagagaaacagaatgaaaatacaagaaaagaaaaaaatgacatccatctagatgctgatgatccaaattctgctgacaaacatagaaatgactgtcccaattggataacagaaaaaataaactctgggcctgatccaagaaccagaaatccagaaaagttgaaagagtctcattgggaagaaaatagaaatgaaaattcaggaaattcttggaataaaaactttggttctggttgggtatctaaccgtggtagaggcagaggcaaccgtggcagaggcacttacagaagtagttttgcctataaagatcagaatgaaaatcggtggcaaaatcgaaaacccctctcagggaattcaaacagttcagggagtgaatctttcaagtttgtggaacagcaatcctataagcgaaaaagtgaacaggagttctcatttgatacaccagcagatagatctggatggacatctgcatccagctgggccgtgagaaagactttgccagcagatgtacaaaactactactcacgacgaggcagaaattcttcaggtccacagtctggatggatgaaacaagaggaggaaacatctggacaggattctagcctaaaagaccaaacaaaccagcaagttgatggttctcagctacctataaatatgatgcaaccgcaaatgaatgtaatgcagcaacaaatgaatgcacaacaccagcctatgaatatcttcccatatccagtgggtgttcatgctcctttgatgaacatccaacgcaatccatttaacattcatcctcagctacccttgcatctccacacaggagtgcccctcatgcaggtagccactcctaccagtgtatctcagggactaccaccaccaccaccccctcccccaccatcccaacaagtcaactacattgcttcacaaccagatggaaagcaattgcagggtattcctagttcttctcatgtaagtaataacatgagtacaccagttttgcctgctccgacagcagccccaggaaatacgggaatggttcagggaccaagttctggtaatacttcgtcatcaagtcacagcaaagcctctaatgctgctgtaaaattggcagaaagcaaagtaagtgttgcagtggaagccagcgcagatagctcgaagacagacaagaaattgcaaattcaagaaaaagcagcacaagaggtaaaattggccatcaagccattttaccaaaataaagatatcaccaaggaagaatataaagaaattgtacggaaagcagtagataaagtttgtcatagtaagagtggagaagtaaattctactaaagtggcaaatctggttaaagcctatgtagacaaatacaaatattcacggaaggggagccaaaagaaaactctggaagaacctgtgtctactgaaaaaaacataggctgaaatggggaacgctgtcaaggacattatcaggatatctgcaaagtgcaatttcaacatgtaccattaactgaaaatcatacataactgtgattgaaatttggttttgataaaattatttttttaacataggatatgatgttttgttctaaataaatataggtctgcactgcaacttctgtatccttccttcccctccaccctcccccacaaaattcaagggaaagtaaagggtttaaaggaatgtgcatctttactaggactgtgttatagtgtggatactggaaaatgtatagctttttgattagggcaatggagtgcataaattagaaacttctaagtgcactggttttcaaagagatatatataatgcatttattctgtcaggttaaaatgtaaagtatgatctttatgattttttccctctaattatagaaagttaaataatgtattaccatgaaaaatgtttctaatattaaatagaacatatcagttgcaaagttcctaatgtgtatttttaaagcacatatctgaataaattgcctagatagaaaaaaaattatcacgagtaaaatttagtgttcaaaacattgagacactcttcacctattgtatgaccaaataaaggttatgctgcttgtt

SEQ ID NO: 186333 - DNA, 507 bp, Homo sapiens
  Payload ID: 16692
  Gene Symbol: SCAF11
  Gene Name: SR-related CTD-associated factor 11
  ENST ID: ENST00000550893
  CDS Start-End: 1-457
tcccccaccatcccaacaagtcaactacattgcttcacaaccagatggaaagcaattgcagggtattcctagttcttctcatgtaagtaataacatgagtacaccagttttgcctgctccgacagcagccccaggaaatacgggaatggttcagggaccaagttctggtaatacttcgtcatcaagtcacagcaaagcctctaatgctgctgtaaaattggcagaaagcaaagtaagtgttgcagtggaagccagcgcagatagctcgaagacagacaagaaattgcaaattcaagaaaaagcagcacaagaggtaaaattggccatcaagccattttaccaaaataaagatatcaccaaggaagaatataaagaaattgtacggaaagcagtagataaagtaagttatggctttagtggagtatgtgcacgttgttttgaaccacctctgttttaataaatgaatgctgaagtttaattaaaataataaaagctagctcctactaa

SEQ ID NO: 186334 - DNA, 324 bp, Homo sapiens
  Payload ID: 16692
  Gene Symbol: SCAF11
  Gene Name: SR-related CTD-associated factor 11
  ENST ID: ENST00000551391
  CDS Start-End: 1-215
taaaaaaacagctgagagaaacaaaagacaagaaaaatgaaaactcatttgagaaacaggtctcctgtcatgaaaattctaaaagctgtataagaagaaaagccatcgtaagagaagatctattaagtgcaaaagtttgtgacttgaagtggatacatagtaagttactttttgcttgtggattctacctttttttttgttgttttttaatttaatggttgtgtcagagttctcatcagtaacacttcaggctggaaaatagtcctcagaactctgtacattgtgttaaatcctacataaattttgttttcatggagcaattta

SEQ ID NO: 186335 - DNA, 4193 bp, Homo sapiens
  Payload ID: 16693
  Gene Symbol: SCAF4
  Gene Name: SR-related CTD-associated factor 4
  Uniprot ID: O95104
  ENST ID: ENST00000286835
  CDS Start-End: 384-3827
cgctggagagagggagagagaggcccgcccgctcgccggccgggccagtgtgagccagtgcgtgagggcgcggggggccgtgtcagcgagacgcagagcgcagccgccaccaccaaacggacatgttgaagaccagcgctgccgccgcctccttttcctcatcctgcgaacgggactgagagggggcccgccacctctccgcctctgcctcggccgcccgcctcgccgcttcgggcgcagcctcttcctgcccgggcctcggactccgccgctcgtcgcctccccccggccaccaggcccggctggtttcccagccccgctccgccgcggcgcgaggtctatgtgaccggcgggcccggagcagccgccgccgcagcgcgaacatggacgccgtcaacgccttcaaccaggagctcttttcgcttatggatatgaaacctcccatctctagagccaagatgattctcatcactaaagctgctattaaagctattaagctttataagcatgtagttcaaatagtagaaaagttcatcaaaaagtgtaaaccagaatacaaggttccgggattatatgtaattgactcaattgtgcgacagtctcgtcatcagtttggaactgataaagatgtttttgggccaagattctctaaaaacataactgccacattccaatatttatatctttgtccatctgaagataagagtaaaatagttcgtgtgctgaacctttggcaaaaaaatggagtgttcaaaattgaaattattcaacctcttttggacatggcagcgggaaccagtaatgcagccccagtagcagaaaatgttaccaataatgaaggctcacctccacctccagtaaaagtttcttctgaacctcccacacaagccactccaaactccgtcccagctgtaccacagttgcccagctctgatgcttttgctgctgtggctcagctgtttcagacaactcaaggccaacagcttcagcagatccttcagacttttcaacagcctccaaaaccacagtctcctgcccttgacaatgctgtgatggctcaggttcaggctatcacagctcagttaaagacaactcctacacaaccatctgaacaaaaagctgctttccccccacctgaacagaaaactgcatttgacaagaagttgcttgatagatttgactatgatgatgagccagaagctgtggaagaatcaaagaaagaggataccactgccgtcaccacgacagcacctgctgccgcagtaccccctgcacccaccgccaccgtgcctgctgctgctgcacccgctgctgcctctcctcctcctccacaggcaccatttggctttcctggagatggcatgcagcagccagcatacacacagcatcaaaatatggatcagtttcagccacgaatgatgggaatacaacaggatccaatgcaccatcaggttccacttcctcctaatggacaaatgccaggatttggacttcttcctacacctccatttcctcccatggctcagcctgtgattcctccaactccaccagtgcagcagcctttccaagcttcttttcaggcacaaaatgaaccacttacacagaagccgcatcagcaggaaatggaagtagaacaaccttgtattcaagaggttaagcgacatatgtctgataacagaaagtcaagatctaggtcagcatccaggtcaccaaaaaggaggcgatctagatctggttctagatctcgaaggtctcggcatcgacgttctcgatctcggtccagggatagacgccgacattctccccgatctcgatctcaagaaagacgggatcgagaaaaagagagagaacgtcgacaaaaaggcctccctcaagtgaaaccggaaactgcaagtgtttgcagtactaccctctgggtggggcagctggacaaaagaactactcagcaggatgttgccagtctcttggaagagtttggtccaattgaatcaattaatatgattcctcccaggggttgtgcctatattgttatggttcataggcaagatgcctatcgtgccctgcagaaactgagccgaggaaactataaagtgaaccagaaatccataaagattgcctgggccttaaacaaaggaataaaggcagattataagcagtattgggatgtagaacttggtgttacttatattccatgggacaaagtcaagcctgaggaactggagagtttttgtgaaggaggaatgttggacagtgacacacttaacccagattggaaaggaattcctaagaagcctgaaaatgaagttgctcaaaatggaggtgctgaaacctcacacacagaaccagtatcacccatacctaaaccattacctgtgcctgtccctcctattcctgttcctgcacctataacagtgccacctccacaggtcccaccacatcaaccgggtccacctgtagttggtgctctccagccgcctgctttcacgcctcctctgggaataccgcctccaggctttggtcctggtgttcctcctccccctcctcctccaccatttttgcgcccaggattcaacccaatgcatttaccaccaggttttctgcctcctggacccccacctcctataactccaccagtatccattcctcctcctcacactccaccaataagcatcccaaactctactatcgctggtataaatgaagacactacaaaagacttatctattggaaatcccattccaacagtggtgtctggggctagaggaaacgccgagtctggtgacagcgtgaaaatgtatggctctgccgtgccacctgctgcacccacgaatctgcccacccctcctgtaacccagcctgtttcacttcttggcactcaaggagttgcccctggtcctgtaattggacttcaggcaccatctactggtcttcttggcgcccggcccggtctcatcccactccagcgccctccaggaatgcccccacctcacttacagcggttccctttgatgccgccccgtcccatgccaccgcacatgatgcacagaggcccaccgccaggaccagggggctttgcgatgcctccacctcatggaatgaaaggtcccttcccaccgcatggcccctttgttaggcctggtggaatgccagggctcgggggcccagggccaggcccagggggtcctgaagacagagacggaaggcaacagccgccgcagcagccacagcagcagccacagccgcaggcgccccagcaaccacagcagcagcagcagcagcagccaccaccatcacaacagcctccaccaacacagcagcagccacagcagtttagaaatgataacaggcagcagttcaattcaggtagagaccaagaaaggtttggaagaagatcttttggaaatagggtggaaaatgaccgggaacggtatgggaaccgtaatgatgatagagataatagtaaccgtgacaggagagagtggggaaggaggagccctgaccgggacaggcacagagacttggaagagagaaatagacgctctagtgggcatcgagacagagagagagattctagagatagagagtctcgtagagagaaggaagaagcccgaggaaaggaaaagcctgaggtgacagacagggcaggtggtaacaaaaccgttgaacctcccattagccaagtgggaaatgtagacactgcttcagaacttgagaagggggtgtctgaggctgcagtcctaaagccttctgaagagttacctgctgaggctacctcatccgttgaacccgaaaaggattctggctcagcagcagaggctcctcgttagagactggaatttgtgaaaatgtgacagtgacacttcctggagtgtagagcttgaggtgtacagatgctgtattatatccgctcccgctgtactgcagccccgcgccagctggtggggaactgtaagcaatttgattgcttcccttctatttaaaaatagccacaaaataacaaaaaatactgaaaatatgaataaatattaccctttttgctgtaactttttaaaagttttgactttaaaaagtttacaaatcgtaattagaagtgctctctatttttttttttttttttaatttaagacaaggtaacggtgaaagctcctcaaaacaatagggatgtttttaataaactctattttcgtaacaaa

SEQ ID NO: 186336 - DNA, 4127 bp, Homo sapiens
  Payload ID: 16693
  Gene Symbol: SCAF4
  Gene Name: SR-related CTD-associated factor 4
  Uniprot ID: O95104
  ENST ID: ENST00000399804
  CDS Start-End: 384-3761
cgctggagagagggagagagaggcccgcccgctcgccggccgggccagtgtgagccagtgcgtgagggcgcggggggccgtgtcagcgagacgcagagcgcagccgccaccaccaaacggacatgttgaagaccagcgctgccgccgcctccttttcctcatcctgcgaacgggactgagagggggcccgccacctctccgcctctgcctcggccgcccgcctcgccgcttcgggcgcagcctcttcctgcccgggcctcggactccgccgctcgtcgcctccccccggccaccaggcccggctggtttcccagccccgctccgccgcggcgcgaggtctatgtgaccggcgggcccggagcagccgccgccgcagcgcgaacatggacgccgtcaacgccttcaaccaggagctcttttcgcttatggatatgaaacctcccatctctagagccaagatgattctcatcactaaagctgctattaaagctattaagctttataagcatgtagttcaaatagtagaaaagttcatcaaaaagtgtaaaccagaatacaaggttccgggattatatgtaattgactcaattgtgcgacagtctcgtcatcagtttggaactgataaagatgtttttgggccaagattctctaaaaacataactgccacattccaatatttatatctttgtccatctgaagataagagtaaaatagttcgtgtgctgaacctttggcaaaaaaatggagtgttcaaaattgaaattattcaacctcttttggacatggcagcgggaaccagtaatgcagccccagtagcagaaaatgttaccaataatgaaggctcacctccacctccagtaaaagtttcttctgaacctcccacacaagccactccaaactccgtcccagctgtaccacagttgcccagctctgatgcttttgctgctgtggctcagctgtttcagacaactcaaggccaacagcttcagcagatccttcagacttttcaacagcctccaaaaccacagtctcctgcccttgacaatgctgtgatggctcaggttcaggctatcacagctcagttaaagacaactcctacacaaccatctgaacaaaaagctgctttccccccacctgaacagaaaactgcatttgacaagaagttgcttgatagatttgactatgatgatgagccagaagctgtggaagaatcaaagaaagaggataccactgccgtcaccacgacagcacctgctgccgcagtaccccctgcacccaccgccaccgtgcctgctgctgctgcacccgctgctgcctctcctcctcctccacaggcaccatttggctttcctggagatggcatgcagcagccagcatacacacagcatcaaaatatggatcagtttcagccacgaatgatgggaatacaacaggatccaatgcaccatcaggttccacttcctcctaatggacaaatgccaggatttggacttcttcctacacctccatttcctcccatggctcagcctgtgattcctccaactccaccagtgcagcagcctttccaagcttcttttcaggcacaaaatgaaccacttacacagaagccgcatcagcaggaaatggaagtagaacaaccttgtattcaagaggttaagcgacatatgtctgataacagaaagtcaagatctaggtcagcatccaggtcaccaaaaaggaggcgatctagatctggttctagatctcgaaggtctcggcatcgacgttctcgatctcggtccagggatagacgccgacattctccccgatctcgatctcaagaaagacgggatcgagaaaaagagagagaacgtcgacaaaaaggcctccctcaagtgaaaccggaaactgcaagtgtttgcagtactaccctctgggtggggcagctggacaaaagaactactcagcaggatgttgccagtctcttggaagagtttggtccaattgaatcaattaatatgattcctcccaggggttgtgcctatattgttatggttcataggcaagatgcctatcgtgccctgcagaaactgagccgaggaaactataaagtgaaccagaaatccataaagattgcctgggccttaaacaaaggaataaaggcagattataagcagtattgggatgtagaacttggtgttacttatattccatgggacaaagtcaagcctgaggaactggagagtttttgtgaaggaggaatgttggacagtgacacacttaacccagattggaaaggaattcctaagaagcctgaaaatgaagttgctcaaaatggaggtgctgaaacctcacacacagaaccagtatcacccatacctaaaccattacctgtgcctgtccctcctattcctgttcctgcacctataacagtgccacctccacaggtcccaccacatcaaccgggtccacctgtagttggtgctctccagccgcctgctttcacgcctcctctgggaataccgcctccaggctttggtcctggtgttcctcctccccctcctcctccaccatttttgcgcccaggattcaacccaatgcatttaccaccaggttttctgcctcctggacccccacctcctataactccaccagtatccattcctcctcctcacactccaccaataagcatcccaaacttggtgtctggggctagaggaaacgccgagtctggtgacagcgtgaaaatgtatggctctgccgtgccacctgctgcacccacgaatctgcccacccctcctgtaacccagcctgtttcacttcttggcactcaaggagttgcccctggtcctgtaattggacttcaggcaccatctactggtcttcttggcgcccggcccggtctcatcccactccagcgccctccaggaatgcccccacctcacttacagcggttccctttgatgccgccccgtcccatgccaccgcacatgatgcacagaggcccaccgccaggaccagggggctttgcgatgcctccacctcatggaatgaaaggtcccttcccaccgcatggcccctttgttaggcctggtggaatgccagggctcgggggcccagggccaggcccagggggtcctgaagacagagacggaaggcaacagccgccgcagcagccacagcagcagccacagccgcaggcgccccagcaaccacagcagcagcagcagcagcagccaccaccatcacaacagcctccaccaacacagcagcagccacagcagtttagaaatgataacaggcagcagttcaattcaggtagagaccaagaaaggtttggaagaagatcttttggaaatagggtggaaaatgaccgggaacggtatgggaaccgtaatgatgatagagataatagtaaccgtgacaggagagagtggggaaggaggagccctgaccgggacaggcacagagacttggaagagagaaatagacgctctagtgggcatcgagacagagagagagattctagagatagagagtctcgtagagagaaggaagaagcccgaggaaaggaaaagcctgaggtgacagacagggcaggtggtaacaaaaccgttgaacctcccattagccaagtgggaaatgtagacactgcttcagaacttgagaagggggtgtctgaggctgcagtcctaaagccttctgaagagttacctgctgaggctacctcatccgttgaacccgaaaaggattctggctcagcagcagaggctcctcgttagagactggaatttgtgaaaatgtgacagtgacacttcctggagtgtagagcttgaggtgtacagatgctgtattatatccgctcccgctgtactgcagccccgcgccagctggtggggaactgtaagcaatttgattgcttcccttctatttaaaaatagccacaaaataacaaaaaatactgaaaatatgaataaatattaccctttttgctgtaactttttaaaagttttgactttaaaaagtttacaaatcgtaattagaagtgctctctatttttttttttttttttaatttaagacaaggtaacggtgaaagctcctcaaaacaatagggatgtttttaataaactctattttcgtaacaaa

SEQ ID NO: 186337 - DNA, 3846 bp, Homo sapiens
  Payload ID: 16693
  Gene Symbol: SCAF4
  Gene Name: SR-related CTD-associated factor 4
  Uniprot ID: O95104
  ENST ID: ENST00000434667
  CDS Start-End: 277-3675
caccaccaaacggacatgttgaagaccagcgctgccgccgcctccttttcctcatcctgcgaacgggactgagagggggcccgccacctctccgcctctgcctcggccgcccgcctcgccgcttcgggcgcagcctcttcctgcccgggcctcggactccgccgctcgtcgcctccccccggccaccaggcccggctggtttcccagccccgctccgccgcggcgcgaggtctatgtgaccggcgggcccggagcagccgccgccgcagcgcgaacatggacgccgtcaacgccttcaaccaggagctcttttcgcttatggatatgaaacctcccatctctagagccaagatgattctcatcactaaagctgctattaaagctattaagtgtaaaccagaatacaaggttccgggattatatgtaattgactcaattgtgcgacagtctcgtcatcagtttggaactgataaagatgtttttgggccaagattctctaaaaacataactgccacattccaatatttatatctttgtccatctgaagataagagtaaaatagttcgtgtgctgaacctttggcaaaaaaatggagtgttcaaaattgaaattattcaacctcttttggacatggcagcgggaaccagtaatgcagccccagtagcagaaaatgttaccaataatgaaggctcacctccacctccagtaaaagtttcttctgaacctcccacacaagccactccaaactccgtcccagctgtaccacagttgcccagctctgatgcttttgctgctgtggctcagctgtttcagacaactcaaggccaacagcttcagcagatccttcagacttttcaacagcctccaaaaccacagtctcctgcccttgacaatgctgtgatggctcaggttcaggctatcacagctcagttaaagacaactcctacacaaccatctgaacaaaaagctgctttccccccacctgaacagaaaactgcatttgacaagaagttgcttgatagatttgactatgatgatgagccagaagctgtggaagaatcaaagaaagaggataccactgccgtcaccacgacagcacctgctgccgcagtaccccctgcacccaccgccaccgtgcctgctgctgctgcacccgctgctgcctctcctcctcctccacaggcaccatttggctttcctggagatggcatgcagcagccagcatacacacagcatcaaaatatggatcagtttcagccacgaatgatgggaatacaacaggatccaatgcaccatcaggttccacttcctcctaatggacaaatgccaggatttggacttcttcctacacctccatttcctcccatggctcagcctgtgattcctccaactccaccagtgcagcagcctttccaagcttcttttcaggcacaaaatgaaccacttacacagaagccgcatcagcaggaaatggaagtagaacaaccttgtattcaagaggttaagcgacatatgtctgataacagaaagtcaagatctaggtcagcatccaggtcaccaaaaaggaggcgatctagatctggttctagatctcgaaggtctcggcatcgacgttctcgatctcggtccagggatagacgccgacattctccccgatctcgatctcaagaaagacgggatcgagaaaaagagagagaacgtcgacaaaaaggcctccctcaagtgaaaccggaaactgcaagtgtttgcagtactaccctctgggtggggcagctggacaaaagaactactcagcaggatgttgccagtctcttggaagagtttggtccaattgaatcaattaatatgattcctcccaggggttgtgcctatattgttatggttcataggcaagatgcctatcgtgccctgcagaaactgagccgaggaaactataaagtgaaccagaaatccataaagattgcctgggccttaaacaaaggaataaaggcagattataagcagtattgggatgtagaacttggtgttacttatattccatgggacaaagtcaagcctgaggaactggagagtttttgtgaaggaggaatgttggacagtgacacacttaacccagattggaaaggaattcctaagaagcctgaaaatgaagttgctcaaaatggaggtgctgaaacctcacacacagaaccagtatcacccatacctaaaccattacctgtgcctgtccctcctattcctgttcctgcacctataacagtgccacctccacaggtcccaccacatcaaccgggtccacctgtagttggtgctctccagccgcctgctttcacgcctcctctgggaataccgcctccaggctttggtcctggtgttcctcctccccctcctcctccaccatttttgcgcccaggattcaacccaatgcatttaccaccaggttttctgcctcctggacccccacctcctataactccaccagtatccattcctcctcctcacactccaccaataagcatcccaaactctactatcgctggtataaatgaagacactacaaaagacttatctattggaaatcccattccaacagtggtgtctggggctagaggaaacgccgagtctggtgacagcgtgaaaatgtatggctctgccgtgccacctgctgcacccacgaatctgcccacccctcctgtaacccagcctgtttcacttcttggcactcaaggagttgcccctggtcctgtaattggacttcaggcaccatctactggtcttcttggcgcccggcccggtctcatcccactccagcgccctccaggaatgcccccacctcacttacagcggttccctttgatgccgccccgtcccatgccaccgcacatgatgcacagaggcccaccgccaggaccagggggctttgcgatgcctccacctcatggaatgaaaggtcccttcccaccgcatggcccctttgttaggcctggtggaatgccagggctcgggggcccagggccaggcccagggggtcctgaagacagagacggaaggcaacagccgccgcagcagccacagcagcagccacagccgcaggcgccccagcaaccacagcagcagcagcagcagcagccaccaccatcacaacagcctccaccaacacagcagcagccacagcagtttagaaatgataacaggcagcagttcaattcaggtagagaccaagaaaggtttggaagaagatcttttggaaatagggtggaaaatgaccgggaacggtatgggaaccgtaatgatgatagagataatagtaaccgtgacaggagagagtggggaaggaggagccctgaccgggacaggcacagagacttggaagagagaaatagacgctctagtgggcatcgagacagagagagagattctagagatagagagtctcgtagagagaaggaagaagcccgaggaaaggaaaagcctgaggtgacagacagggcaggtggtaacaaaaccgttgaacctcccattagccaagtgggaaatgtagacactgcttcagaacttgagaagggggtgtctgaggctgcagtcctaaagccttctgaagagttacctgctgaggctacctcatccgttgaacccgaaaaggattctggctcagcagcagaggctcctcgttagagactggaatttgtgaaaatgtgacagtgacacttcctggagtgtagagcttgaggtgtacagatgctgtattatatccgctcccgctgtactgcagccccgcgccagctggtggggaactgtaagcaatttgattgcttcccttctatttaaaaatagccacaaaataac

SEQ ID NO: 186338 - DNA, 5057 bp, Homo sapiens
  Payload ID: 16694
  Gene Symbol: SCAF8
  Gene Name: SR-related CTD-associated factor 8
  Uniprot ID: Q9UPN6
  ENST ID: ENST00000367178
  CDS Start-End: 577-4392
cggccgccggggctcgcacggtccagtcgccagggggcgcgctagccggcgccgcggatccccgaactgcgcggcccgactcgagtccgccatattggatgccgcagccgctgctgccagcgcttcctcctctgtcttcgccgagcggggctggttcctgcggcccgagcggcggggaggtgaaacaggagcccgtcggaggaaggggcagaagggagtggagagtgtaggggaaggggctagagggagggggaccgaaacggagcggggcagagaagagaaggcgccgcggcccagcccctcccccgcccgccgccgacccgccccggcagcgcctctgttccctagaacggcgctccccccgccctagcggccatgccggtgccgctctgccgctgagggagcccttccccgccagcgcgtgcccttccactccgccccgaggtcgcagcggcccgctctcccgccagcgccccctcctcgcggccacgcagcagcccgcgtctcgctctccccacccagtgcagtggccgccgcctcttccgccgccgggctcggggcctccgcagcgacaacatggaggccgtgaagaccttcaatagcgagttgtattccctgaatgactataaaccacccatttcgaaagcgaaaatgacccaaattactaaggcagccatcaaagctattaagttctataaacatgtggtacagagtgttgagaagtttattcagaaatgtaaaccagaatacaaagtacctggactttatgttattgactccattgtgcgacaatcccgacatcagtttggtcaagaaaaggatgtgtttgcacccagatttagtaataacatcattagcactttccagaatttatatcgttgccctggggatgacaagagtaaaatagtgagagtactaaacttatggcagaagaataatgtatttaagagtgagattattcagccccttttggatatggcagccgggattccgcctccagttgtcacacctgttttggccagcactaccactgctatgagcaatactccaggaactcctgtgacacctgttactccggccaatgtggtccaaggcttacctgatccgtgggtatctcagataacaaatacagatacacttgcggctgtagctcagatcttgcaaagtcctcaaggccagcagcttcaacaattaatacaaaccttacagatacaacaacagaagccccagccttccattctgcaggccctagatgctggtcttgttgttcagttgcaagctcttacggcacaacttacagctgcagctgcagctgccaacactcttactcccttagaacagggagtctcctttaacaagaagttgatggataggtttgattttggggaagactctgagcatagtgaagaacccaaaaaggaaattccagcttcacaactttctcacgtttcagaatctgtgaacaattccatttttcatcagatagcagaacaactacaacagcaaaacctagaacatctcagacagcagctcttggagcagcaacagcctcaaaaggccactcctcaggatagtcaggaaggaacctttgggtcagagcattcagcgtcaccatcacaagggagtagtcagcagcattttcttgaacctgaagtcaatttggatgattccatagatattcagcaacaggatatggatatagatgaagggcaagatggagtggaagaggaggtctttgaacaagaagctaagaaagtggcggttcgctcaagatcaagaacacattcacgatctcgttcaagatcaccaagaaaacgaaggtctaggtcacggtctggctctagaaagcgtaaacacagaaagcgatcacgctcccgctcaagagaaagaaagaggaaatcatcacggtcgtattcaagtgaaaggagagccagagaaagggagaaagaacgacagaaaaagggattacctccaattagatctaaaacactaagtgtatgtagtactactctctgggttgggcaagtggacaagaaggcaacacagcaagacttaaccaacctgtttgaagagtttggacagattgaatccattaatatgattcctccccggggctgtgcttatgtctgcatggttcatcgacaagatgcatttcgagctcttcagaaactcagttctggatcatataaaattgggtccaaggtcattaagatcgcttgggctttaaacaaaggtgtaaaaacagaatacaaacaattctgggatgtggatcttggagttacatatataccatgggaaaaagttaaagtggatgacttggaaggttttgcagaaggaggcatgattgatcaggagactgtaaatactgagtgggaaactgtgaaaagctcagaacctgttaaagagacggtccagacaactcagagcccaactccagttgaaaaggagacagtggtcacaacccaggcagaggttttccctcctcctgttgctatgttgcagattccagtggcgccagccgtgcctacagttagtttagtcccaccagcatttcctgtgtcgatgccggttcctcctcctggattcagtccaatccctccacctccttttttaagagcaagttttaacccttcacaaccaccacctggtttcatgccgcctccagttcccccacctgttgtgccaccccctacgattccaccagtagtaccaacatctttagtgcagccgtcattatccatgacaccggaaactgtgaaagatgttggatttggtagccttgttataccaggcggttctgttgccagcaatcttgctacttccgctctgccagctggaaatgtttttaatgctccaactaaacaggcagagcctgaagaaaaagtacctcatcttatagaccaccagatttcttctggtgaaaacaccagatcagtgattccaaatgatatttcaagtaatgctgcaattttaggaggacagccgccaaatgtgacaagcaattctggaattctgggagtccaaagaccaaatgtatcaagtaattctgaaattcttggggtccggccatctaatgtttccagtagttctgggattattgcagcccaaccaccaaatattctaaataactctggaatattgggaatacagccacccagtgtgtcaaatagttctggacttttgggagtgctacccccaaatatacctaacaattctggacttgtaggagtacagccaccaaatgttccaaatactcctggacttctgggaacacagccaccagctggacctcaaaacttaccccctttaagtatccctaatcaaaggatgcccacaatgccaatgttagacattcgtccgggactaataccacaggcacctgggccaagattccctttaatacagcctggaattccaccccaacggggaatcccacccccatcggtacttgattcagctcttcatccaccaccccgtggaccttttcctccaggagatatttttagtcaaccagaaagaccttttttagctcctggaagacaaagcgtagacaatgttactaacccagaaaaaaggataccacttgggaatgataacattcaacaggaaggagatagagattaccggtttcctcctatagaaaccagggaaagcattagtagacctccccctgtggatgttagagatgtggttgggcggcctatagatccaagagaaggtcctggacggcctccactagatggtagggatcattttggaagacctcctgtagatataagagagaatcttgtgaggccaggtatagatcatcttggtcgaagagaccactttggctttaatccagagaagccctgggggcatagaggagattttgatgagagagagcatcgggttctaccggtctatggtggtccaaaaggcttacatgaagaaagaggtagatttcggtctggaaactatcgatttgatcctagaagtggtccttggaaccgaggatttggacaagaagttcacagagattttgatgaccgcagaagaccctgggagaggcaaagggatagggatgacagagattttgatttctgcagagaaatgaatggaaatcgtcttggacgagacagaattcaaaacacttgggttccccctcctcatgctcgggtttttgattattttgaaggggccacttctcaacgaaaaggtgataatgtgcctcaggttaatggtgaaaatacagagagacatgctcagccaccacctataccagtacagaatgatcctgaactttatgaaaaactgacatcttcaaatgaaataaacaaggagaagagtgacacagttgctgatatagaaagtgaaccagtggtagaaagcacagaaactgaggggacataatcatcactcagtaggtaaaagataccttttgtaaagttgtcatctctctgtaatagataatggctgactggaccatagttgttcacttttgtctgccagaattaagttaatctgatgttcatgttcacctttctcttaaaataattgtacaactgacttgtatagacattgttcttaatatgaacatggtaggtaaactttttttttatttttttctgataaaatacaaatgttggccccagattcttttaacgtcaaggaaatgaataacagcttgtcagagacttcctatggaagaaagaattttttagatactatcattaggttggatatggtaatagatatatttcagaatagcaagtggtggtatatcttatccatatctttaggctgctgcagaattttaaggttatagataaagctgtgatattttatgcaaagactggctctaggtatttgaggagcacaatacagagattttaaaaagtgattttgtaaaatctacactacggtctctgtttctccaaagtaagtgtttgtgatttgttcctcatactgcagtgagtaaaaaagaaacaagaaaacaacaacataaatattaaagtacgtttcaatgttgggtgaattttgtttttagatgccaataaaacttatttgtttgataa

SEQ ID NO: 186339 - DNA, 4908 bp, Homo sapiens
  Payload ID: 16694
  Gene Symbol: SCAF8
  Gene Name: SR-related CTD-associated factor 8
  Uniprot ID: Q9UPN6
  ENST ID: ENST00000367186
  CDS Start-End: 46-4059
gcggatccccgaactgcgcggcccgactcgagtccgccatattggatgccgcagccgctgctgccagcgcttcctcctctgtcttcgccgagcggggctggttcctgcggcccgagcggcggggagtgcagtggccgccgcctcttccgccgccgggctcggggcctccgcagcgacaacatggaggccgtgaagaccttcaatagcgaggattgtgcctctactcctgcttgtacagactgcttttccagcagcatggacacaagaagcatattgtattccctgaatgactataaaccacccatttcgaaagcgaaaatgacccaaattactaaggcagccatcaaagctattaagttctataaacatgtggtacagagtgttgagaagtttattcagaaatgtaaaccagaatacaaagtacctggactttatgttattgactccattgtgcgacaatcccgacatcagtttggtcaagaaaaggatgtgtttgcacccagatttagtaataacatcattagcactttccagaatttatatcgttgccctggggatgacaagagtaaaatagtgagagtactaaacttatggcagaagaataatgtatttaagagtgagattattcagccccttttggatatggcagccgggattccgcctccagttgtcacacctgttttggccagcactaccactgctatgagcaatactccaggaactcctgtgacacctgttactccggccaatgtggtccaaggcttacctgatccgtgggtatctcagataacaaatacagatacacttgcggctgtagctcagatcttgcaaagtcctcaaggccagcagcttcaacaattaatacaaaccttacagatacaacaacagaagccccagccttccattctgcaggccctagatgctggtcttgttgttcagttgcaagctcttacggcacaacttacagctgcagctgcagctgccaacactcttactcccttagaacagggagtctcctttaacaagaagttgatggataggtttgattttggggaagactctgagcatagtgaagaacccaaaaaggaaattccagcttcacaactttctcacgtttcagaatctgtgaacaattccatttttcatcagatagcagaacaactacaacagcaaaacctagaacatctcagacagcagctcttggagcagcaacagcctcaaaaggccactcctcaggatagtcaggaaggaacctttgggtcagagcattcagcgtcaccatcacaagggagtagtcagcagcattttcttgaacctgaagtcaatttggatgattccatagatattcagcaacaggatatggatatagatgaagggcaagatggagtggaagaggaggtctttgaacaagaagctaagaaagtggcggttcgctcaagatcaagaacacattcacgatctcgttcaagatcaccaagaaaacgaaggtctaggtcacggtctggctctagaaagcgtaaacacagaaagcgatcacgctcccgctcaagagaaagaaagaggaaatcatcacggtcgtattcaagtgaaaggagagccagagaaagggagaaagaacgacagaaaaagggattacctccaattagatctaaaacactaagtgtatgtagtactactctctgggttgggcaagtggacaagaaggcaacacagcaagacttaaccaacctgtttgaagagtttggacagattgaatccattaatatgattcctccccggggctgtgcttatgtctgcatggttcatcgacaagatgcatttcgagctcttcagaaactcagttctggatcatataaaattgggtccaaggtcattaagatcgcttgggctttaaacaaaggtgtaaaaacagaatacaaacaattctgggatgtggatcttggagttacatatataccatgggaaaaagttaaagtggatgacttggaaggttttgcagaaggaggcatgattgatcaggagactgtaaatactgagtgggaaactgtgaaaagctcagaacctgttaaagagacggtccagacaactcagagcccaactccagttgaaaaggagacagtggtcacaacccaggcagaggttttccctcctcctgttgctatgttgcagattccagtggcgccagccgtgcctacagttagtttagtcccaccagcatttcctgtgtcgatgccggttcctcctcctggattcagtccaatccctccacctccttttttaagagcaagttttaacccttcacaaccaccacctggtttcatgccgcctccagttcccccacctgttgtgccaccccctacgattccaccagtagtaccaacatctttagtgcagccgtcattatccatgacaccggaaactgtgaaagatgttggatttggtagccttgttataccaggcggttctgttgccagcaatcttgctacttccgctctgccagctggaaatgtttttaatgctccaactaaacaggcagagcctgaagaaaaagtacctcatcttatagaccaccagatttcttctggtgaaaacaccagatcagtgattccaaatgatatttcaagtaatgctgcaattttaggaggacagccgccaaatgtgacaagcaattctggaattctgggagtccaaagaccaaatgtatcaagtaattctgaaattcttggggtccggccatctaatgtttccagtagttctgggattattgcagcccaaccaccaaatattctaaataactctggaatattgggaatacagccacccagtgtgtcaaatagttctggacttttgggagtgctacccccaaatatacctaacaattctggacttgtaggagtacagccaccaaatgttccaaatactcctggacttctgggaacacagccaccagctggacctcaaaacttaccccctttaagtatccctaatcaaaggatgcccacaatgccaatgttagacattcgtccgggactaataccacaggcacctgggccaagattccctttaatacagcctggaattccaccccaacggggaatcccacccccatcggtacttgattcagctcttcatccaccaccccgtggaccttttcctccaggagatatttttagtcaaccagaaagaccttttttagctcctggaagacaaagcgtagacaatgttactaacccagaaaaaaggataccacttgggaatgataacattcaacaggaaggagatagagattaccggtttcctcctatagaaaccagggaaagcattagtagacctccccctgtggatgttagagatgtggttgggcggcctatagatccaagagaaggtcctggacggcctccactagatggtagggatcattttggaagacctcctgtagatataagagagaatcttgtgaggccaggtatagatcatcttggtcgaagagaccactttggctttaatccagagaagccctgggggcatagaggagattttgatgagagagagcatcgggttctaccggtctatggtggtccaaaaggcttacatgaagaaagaggtagatttcggtctggaaactatcgatttgatcctagaagtggtccttggaaccgaggatttggacaagaagttcacagagattttgatgaccgcagaagaccctgggagaggcaaagggatagggatgacagagattttgatttctgcagagaaatgaatggaaatcgtcttggacgagacagaattcaaaacacttgggttccccctcctcatgctcgggtttttgattattttgaaggggccacttctcaacgaaaaggtgataatgtgcctcaggttaatggtgaaaatacagagagacatgctcagccaccacctataccagtacagaatgatcctgaactttatgaaaaactgacatcttcaaatgaaataaacaaggagaagagtgacacagttgctgatatagaaagtgaaccagtggtagaaagcacagaaactgaggggacataatcatcactcagtaggtaaaagataccttttgtaaagttgtcatctctctgtaatagataatggctgactggaccatagttgttcacttttgtctgccagaattaagttaatctgatgttcatgttcacctttctcttaaaataattgtacaactgacttgtatagacattgttcttaatatgaacatggtaggtaaactttttttttatttttttctgataaaatacaaatgttggccccagattcttttaacgtcaaggaaatgaataacagcttgtcagagacttcctatggaagaaagaattttttagatactatcattaggttggatatggtaatagatatatttcagaatagcaagtggtggtatatcttatccatatctttaggctgctgcagaattttaaggttatagataaagctgtgatattttatgcaaagactggctctaggtatttgaggagcacaatacagagattttaaaaagtgattttgtaaaatctacactacggtctctgtttctccaaagtaagtgtttgtgatttgttcctcatactgcagtgagtaaaaaagaaacaagaaaacaacaacataaatattaaagtacgtttcaatgttgggtgaattttgtttttagatgccaataaaacttatttgtttgataacagtgttctaggaattgtatttttttaacctataaattcttaaaaccttgaattattattagcatgtgcttattttttgcaaaagctttctatcataacaacaatgaactatgtggtggaaaaagcatgtactttgatataaaaatcatgcagcctcctcagtatgtgtataatatctgtgtat

SEQ ID NO: 186340 - DNA, 4944 bp, Homo sapiens
  Payload ID: 16694
  Gene Symbol: SCAF8
  Gene Name: SR-related CTD-associated factor 8
  ENST ID: ENST00000417268
  CDS Start-End: 46-4095
gcggatccccgaactgcgcggcccgactcgagtccgccatattggatgccgcagccgctgctgccagcgcttcctcctctgtcttcgccgagcggggctggttcctgcggcccgagcggcggggaggtgaaacaggagcccgtcggaggaaggggcagaagggagtggagagtcgccccctcctcgcggccacgcagcagcccgcgtctcgctctccccacccagtgcagtggccgccgcctcttccgccgccgggctcggggcctccgcagcgacaacatggaggccgtgaagaccttcaatagcgagttgtattccctgaatgactataaaccacccatttcgaaagcgaaaatgacccaaattactaaggcagccatcaaagctattaagttctataaacatgtggtacagagtgttgagaagtttattcagaaatgtaaaccagaatacaaagtacctggactttatgttattgactccattgtgcgacaatcccgacatcagtttggtcaagaaaaggatgtgtttgcacccagatttagtaataacatcattagcactttccagaatttatatcgttgccctggggatgacaagagtaaaatagtgagagtactaaacttatggcagaagaataatgtatttaagagtgagattattcagccccttttggatatggcagccgggattccgcctccagttgtcacacctgttttggccagcactaccactgctatgagcaatactccaggaactcctgtgacacctgttactccggccaatgtggtccaaggcttacctgatccgtgggtatctcagataacaaatacagatacacttgcggctgtagctcagatcttgcaaagtcctcaaggccagcagcttcaacaattaatacaaaccttacagatacaacaacagaagccccagccttccattctgcaggccctagatgctggtcttgttgttcagttgcaagctcttacggcacaacttacagctgcagctgcagctgccaacactcttactcccttagaacagggagtctcctttaacaagaagttgatggataggtttgattttggggaagactctgagcatagtgaagaacccaaaaaggaaattccagcttcacaactttctcacgtttcagaatctgtgaacaattccatttttcatcagatagcagaacaactacaacagcaaaacctagaacatctcagacagcagctcttggagcagcaacagcctcaaaaggccactcctcaggatagtcaggaaggaacctttgggtcagagcattcagcgtcaccatcacaagggagtagtcagcagcattttcttgaacctgaagtcaatttggatgattccatagatattcagcaacaggatatggatatagatgaagggcaagatggagtggaagaggaggtctttgaacaagaagctaagaaagtggcggttcgctcaagatcaagaacacattcacgatctcgttcaagatcaccaagaaaacgaaggtctaggtcacggtctggctctagaaagcgtaaacacagaaagcgatcacgctcccgctcaagagaaagaaagaggaaatcatcacggtcgtattcaagtgaaaggagagccagagaaagggagaaagaacgacagaaaaagggattacctccaattagatctaaaacactaagtgtatgtagtactactctctgggttgggcaagtggacaagaaggcaacacagcaagacttaaccaacctgtttgaagagtttggacagattgaatccattaatatgattcctccccggggctgtgcttatgtctgcatggttcatcgacaagatgcatttcgagctcttcagaaactcagttctggatcatataaaattgggtccaaggtcattaagatcgcttgggctttaaacaaaggtgtaaaaacagaatacaaacaattctgggatgtggatcttggagttacatatataccatgggaaaaagttaaagtggatgacttggaaggttttgcagaaggaggcatgattgatcaggagactgtaaatactgagtgggaaactgtgaaaagctcagaacctgttaaagagacggtccagacaactcagagcccaactccagttgaaaaggagacagtggtcacaacccaggcagaggttttccctcctcctgttgctatgttgcagattccagtggcgccagccgtgcctacagttagtttagtcccaccagcatttcctgtgtcgatgccggttcctcctcctggattcagtccaatccctccacctccttttttaagagcaagttttaacccttcacaaccaccacctggtttcatgccgcctccagttcccccacctgttgtgccaccccctacgattccaccagtagtaccaacatctttagtgcagccgtcattatccatgacaccggaaactgtgaaagatgttggatttggtagccttgttataccaggcggttctgttgccagcaatcttgctacttccgctctgccagctggaaatgtttttaatgctccaactaaacaggcagagcctgaagaaaaagtacctcatcttatagaccaccagatttcttctggtgaaaacaccagatcagtgattccaaatgatatttcaagtaatgctgcaattttaggaggacagccgccaaatgtgacaagcaattctggaattctgggagtccaaagaccaaatgtatcaagtaattctgaaattcttggggtccggccatctaatgtttccagtagttctgggattattgcagcccaaccaccaaatattctaaataactctggaatattgggaatacagccacccagtgtgtcaaatagttctggacttttgggagtgctacccccaaatatacctaacaattctggacttgtaggagtacagccaccaaatgttccaaatactcctggacttctgggaacacagccaccagctggacctcaaaacttaccccctttaagtatccctaatcaaaggatgcccacaatgccaatgttagacattcgtccgggactaataccacaggcacctgggccaagattccctttaatacagcctggaattccaccccaacggggaatcccacccccatcggtacttgattcagctcttcatccaccaccccgtggaccttttcctccaggagatatttttagtcaaccagaaagaccttttttagctcctggaagacaaagcgtagacaatgttactaacccagaaaaaaggataccacttgggaatgataacattcaacaggaaggagatagagattaccggtttcctcctatagaaaccagggaaagcattagtagacctccccctgtggatgttagagatgtggttgggcggcctatagatccaagagaaggtcctggacggcctccactagatggtagggatcattttggaagacctcctgtagatataagagagaatcttgtgaggccaggtatagatcatcttggtcgaagagaccactttggctttaatccagagaagccctgggggcatagaggagattttgatgagagagagcatcgggttctaccggtctatggtggtccaaaaggcttacatgaagaaagaggtagatttcggtctggaaactatcgatttgatcctagaagtggtccttggaaccgaggatttggacaagaagttcacagagattttgatgaccgcagaagaccctgggagaggcaaagggatagggatgacagagattttgatttctgcagagaaatgaatggaaatcgtcttggacgagacagaattcaaaacacttgggttccccctcctcatgctcgggtttttgattattttgaaggggccacttctcaacgaaaaggtgataatgtgcctcaggttaatggtgaaaatacagagagacatgctcagccaccacctataccagtacagaatgatcctgaactttatgaaaaactgacatcttcaaatgaaataaacaaggagaagagtgacacagttgctgatatagaaagtgaaccagtggtagaaagcacagaaactgaggggacataatcatcactcagtaggtaaaagataccttttgtaaagttgtcatctctctgtaatagataatggctgactggaccatagttgttcacttttgtctgccagaattaagttaatctgatgttcatgttcacctttctcttaaaataattgtacaactgacttgtatagacattgttcttaatatgaacatggtaggtaaactttttttttatttttttctgataaaatacaaatgttggccccagattcttttaacgtcaaggaaatgaataacagcttgtcagagacttcctatggaagaaagaattttttagatactatcattaggttggatatggtaatagatatatttcagaatagcaagtggtggtatatcttatccatatctttaggctgctgcagaattttaaggttatagataaagctgtgatattttatgcaaagactggctctaggtatttgaggagcacaatacagagattttaaaaagtgattttgtaaaatctacactacggtctctgtttctccaaagtaagtgtttgtgatttgttcctcatactgcagtgagtaaaaaagaaacaagaaaacaacaacataaatattaaagtacgtttcaatgttgggtgaattttgtttttagatgccaataaaacttatttgtttgataacagtgttctaggaattgtatttttttaacctataaattcttaaaaccttgaattattattagcatgtgcttattttttgcaaaagctttctatcataacaacaatgaactatgtggtggaaaaagcatgtactttgatataaaaatcatgcagcctcctcagtatgtgtataatatctgtgtat

SEQ ID NO: 186341 - DNA, 4286 bp, Homo sapiens
  Payload ID: 16695
  Gene Symbol: SRPK1
  Gene Name: SRSF protein kinase 1
  ENST ID: ENST00000361690
  CDS Start-End: 1-2016
aaaggtgagcggtggagcggcctccgccacgaggggcaatggtcgccggggcgaggcccggtgcttgcgctccaggcccgaaagaaaaggaccaaggccaagaaggacaaagcccaaaggaaatctgaaactcagcaccgaggctctgctccccactctgagagtgatctaccagagcaggaagaggagattctgggatctgatgatgatgagcaagaagatcctaatgattattgtaaaggaggttatcatcttgtgaaaattggagatctattcaatgggagataccatgtgatccgaaagttaggctggggacacttttcaacagtatggttatcatgggatattcaggggaagaaatttgtggcaatgaaagtagttaaaagtgctgaacattacactgaaacagcactagatgaaatccggttgctgaagtcagttcgcaattcagaccctaatgatccaaatagagaaatggttgttcaactactagatgactttaaaatatcaggagttaatggaacacatatctgcatggtatttgaagttttggggcatcatctgctcaagtggatcatcaaatccaattatcaggggcttccactgccttgtgtcaaaaaaattattcagcaagtgttacagggtcttgattatttacataccaagtgccgtatcatccacactgacattaaaccagagaacatcttattgtcagtgaatgagcagtacattcggaggctggctgcagaagcaacagaatggcagcgatctggagctcctccgccttccggatctgcagtcagtactgctccccagcctaaaccagctgacaaaatgtcaaagaataagaagaagaaattgaagaagaagcagaagcgccaggcagaattactagagaagcgaatgcaggaaattgaggaaatggagaaagagtcgggccctgggcaaaaaagaccaaacaagcaagaagaatcagagagtcctgttgaaagacccttgaaagagaacccacctaataaaatgacccaagaaaaacttgaagagtcaagtaccattggccaggatcaaacgcttatggaacgtgatacagagggtggtgcagcagaaattaattgcaatggagtgattgaagtcattaattatactcagaacagtaataatgaaacattgagacataaagaggatctacataatgctaatgactgtgatgtccaaaatttgaatcaggaatctagtttcctaagctcccaaaatggagacagcagcacatctcaagaaacagactcttgtacacctataacatctgaggtgtcagacaccatggtgtgccagtcttcctcaactgtaggtcagtcattcagtgaacaacacattagccaacttcaagaaagcattcgggcagagataccctgtgaagatgaacaagagcaagaacataacggaccactggacaacaaaggaaaatccacggctggaaattttcttgttaatccccttgagccaaaaaatgcagaaaagctcaaggtgaagattgctgaccttggaaatgcttgttgggtgcacaaacatttcactgaagatattcaaacaaggcaatatcgttccttggaagttctaatcggatctggctataatacccctgctgacatttggagcacggcatgcatggcctttgaactggccacaggtgactatttgtttgaacctcattcaggggaagagtacactcgagatgaagatcacattgcattgatcatagaacttctggggaaggtgcctcgcaagctcattgtggcaggaaaatattccaaggaatttttcaccaaaaaaggtgacctgaaacatatcacgaagctgaaaccttggggcctttttgaggttctagtggagaagtatgagtggtcgcaggaagaggcagctggcttcacagatttcttactgcccatgttggagctgatccctgagaagagagccactgccgccgagtgtctccggcacccttggcttaactcctaagcccctgcccagcaccacagcagagatcacacactgaccctccgcccttccccttcaagcattttcctcttcccttttcagggtgaagctcttccttcaagagtttctagatcttgttttttttttaatccaacatgttcatttgggtttgcttacttgaccctgtggagatccccacagccattgggcatcctaggtgaatttggccttggttgggctctgccaaagactaatggactaaaatgtgaaacagcctcttgccctgtacctttccttcccattaggacatcctttaaattataagcatcctttttgaaaagagctatgaaggtgtatgagcccatccttttattcattgactctaagagtcaaattttctagtgcatatcctattgccagcataaggatgaggagggggaaagggtcttaattctatgtacagcagagacattaaacttgctgtgtccgggctgcatcatcttcctggactgtttctgttgttctctgtgttcacattttttcctgcaacttttaagctactgtcttttttaaatagctatatgaacaccaaatttgggtaccattttatcactgttcaaagcactgtcaaattcctttcatcctttaatagttaagatctttgaatcttcagtctgatttttaatgtaagcaaaaacagaaccattgaatagtaatttcttgagaacctcaggtgttctataaacagtcctttcctgtatgtcttctattaccctaagaccagagttattttggttggttgttttgttttattttttgtttttgtatccatggctggcactttactcattgcacttgagtttattgccccataactaaaggatcaggatgatggtagaacggagatctgggtttcagagctttcccatttaagaaaaatagatcttgagattctgattcttttccaaacagtcccctgctttcatgtacagctttttctttaccttacccaaaattctggccttgaagcagttttcctctatggctttgcctttctgattttctcagaggctcgagtctttaatataaccccaaatgaaagaaccaaggggaggggtgggatggcacttttttttgttggtcttgttttgttttgttttttggttggttggttcgttattttttaagattagccattctctgctgctatttccctacataatgtcaatttttaaccataattttgacatgattgagatgtacttgaggcttttttgttttaattgagaaaagactttgcaattttttttttaggatgagcctctcctagacttgacctagaatattacatattcctccagtaagtaatactgaagagcaaaagagaggcaggattggggtcacagccgcttcttcagcatggaccaagtgggccttggggattgcagcgttctcgaagtggctgtaggactcgaatttacagaaagccacagaggtgcaacttgaggctctgctagcaagccaccagtgaggctattgggtaaccacctttctatacaggagattggaatctactttgtcatttatccaccacagtgacaaaggaaaagtggtgccgttatgcaatccatttaactcataaacatattactctgagtaactggccagccattcatcggatccttcattgggtactcctgaaatcagacatgttcctgtagaaagaattttaagttaggctttctatgcacctatcaagaatcaagagaatagattgtatcaaacaacggcagggaaatccttcagcaattctaatccactttgggttttcagctgtttttacatctaaagcaatagactagaactgaattatcttctacatagtaaaatcacaattgtggaattacaggaattctggtgatattaaggtgaaataacaaaacacaaaaggccctattttaacagttgatgtgacagtaagttttaatagaacctgtaacttcattttggaaatgcttctccaccaaataagggctttttcccctatttaaggagccagatggattgaaagatgtggaaataggcagctgtagatcttgatcttccaggtaccccatgtacctttattgagcttaattataatactgtcaaattgccacgatctcactaaaggatttctatttgctgtcagttaaaaataaagccctaaatacatttttattctttctactgagggcattgtctgttttctttgtaaatgccgtacaataaacaaattatttaataaccta

SEQ ID NO: 186342 - DNA, 4759 bp, Homo sapiens
  Payload ID: 16695
  Gene Symbol: SRPK1
  Gene Name: SRSF protein kinase 1
  ENST ID: ENST00000373822
  CDS Start-End: 10-2490
ggtctcaccatggagcggaaaggtgagcggtggagcggcctccgccacgaggggcaatggtcgccggggcgaggcccgggtcagcgccgggagcttcgcttaactgccgcggttcggttcccggacgtgcggcgcccctccactgaggtggcgccgccccacaccccctgcctctgggctgcgggtccgcgcccctcagtccgggcgtcctctggcgccggccgtagccgccccttgttccccgccaggccggctcgcgccttggggccactccagggcccggcccttggcgggcgacgcagacccccacccgcccgccccctgacccggcctgagacccctccggcgcatcccgcccgggcgctgctctgcgccccgtgggccgccagccccacgccggccgcctcgccgagcccgcagccgcccccgaggcaggccccgcagccgggcctggcgcccctgctgggtctccaccctcaccttggtcgcctcctttcctccacattcgcccttcatccatccctctctcctgcagtgcttgcgctccaggcccgaaagaaaaggaccaaggccaagaaggacaaagcccaaaggaaatctgaaactcagcaccgaggctctgctccccactctgagagtgatctaccagagcaggaagaggagattctgggatctgatgatgatgagcaagaagatcctaatgattattgtaaaggaggttatcatcttgtgaaaattggagatctattcaatgggagataccatgtgatccgaaagttaggctggggacacttttcaacagtatggttatcatgggatattcaggggaagaaatttgtggcaatgaaagtagttaaaagtgctgaacattacactgaaacagcactagatgaaatccggttgctgaagtcagttcgcaattcagaccctaatgatccaaatagagaaatggttgttcaactactagatgactttaaaatatcaggagttaatggaacacatatctgcatggtatttgaagttttggggcatcatctgctcaagtggatcatcaaatccaattatcaggggcttccactgccttgtgtcaaaaaaattattcagcaagtgttacagggtcttgattatttacataccaagtgccgtatcatccacactgacattaaaccagagaacatcttattgtcagtgaatgagcagtacattcggaggctggctgcagaagcaacagaatggcagcgatctggagctcctccgccttccggatctgcagtcagtactgctccccagcctaaaccagctgacaaaatgtcaaagaataagaagaagaaattgaagaagaagcagaagcgccaggcagaattactagagaagcgaatgcaggaaattgaggaaatggagaaagagtcgggccctgggcaaaaaagaccaaacaagcaagaagaatcagagagtcctgttgaaagacccttgaaagagaacccacctaataaaatgacccaagaaaaacttgaagagtcaagtaccattggccaggatcaaacgcttatggaacgtgatacagagggtggtgcagcagaaattaattgcaatggagtgattgaagtcattaattatactcagaacagtaataatgaaacattgagacataaagaggatctacataatgctaatgactgtgatgtccaaaatttgaatcaggaatctagtttcctaagctcccaaaatggagacagcagcacatctcaagaaacagactcttgtacacctataacatctgaggtgtcagacaccatggtgtgccagtcttcctcaactgtaggtcagtcattcagtgaacaacacattagccaacttcaagaaagcattcgggcagagataccctgtgaagatgaacaagagcaagaacataacggaccactggacaacaaaggaaaatccacggctggaaattttcttgttaatccccttgagccaaaaaatgcagaaaagctcaaggtgaagattgctgaccttggaaatgcttgttgggtgcacaaacatttcactgaagatattcaaacaaggcaatatcgttccttggaagttctaatcggatctggctataatacccctgctgacatttggagcacggcatgcatggcctttgaactggccacaggtgactatttgtttgaacctcattcaggggaagagtacactcgagatgaagatcacattgcattgatcatagaacttctggggaaggtgcctcgcaagctcattgtggcaggaaaatattccaaggaatttttcaccaaaaaaggtgacctgaaacatatcacgaagctgaaaccttggggcctttttgaggttctagtggagaagtatgagtggtcgcaggaagaggcagctggcttcacagatttcttactgcccatgttggagctgatccctgagaagagagccactgccgccgagtgtctccggcacccttggcttaactcctaagcccctgcccagcaccacagcagagatcacacactgaccctccgcccttccccttcaagcattttcctcttcccttttcagggtgaagctcttccttcaagagtttctagatcttgttttttttttaatccaacatgttcatttgggtttgcttacttgaccctgtggagatccccacagccattgggcatcctaggtgaatttggccttggttgggctctgccaaagactaatggactaaaatgtgaaacagcctcttgccctgtacctttccttcccattaggacatcctttaaattataagcatcctttttgaaaagagctatgaaggtgtatgagcccatccttttattcattgactctaagagtcaaattttctagtgcatatcctattgccagcataaggatgaggagggggaaagggtcttaattctatgtacagcagagacattaaacttgctgtgtccgggctgcatcatcttcctggactgtttctgttgttctctgtgttcacattttttcctgcaacttttaagctactgtcttttttaaatagctatatgaacaccaaatttgggtaccattttatcactgttcaaagcactgtcaaattcctttcatcctttaatagttaagatctttgaatcttcagtctgatttttaatgtaagcaaaaacagaaccattgaatagtaatttcttgagaacctcaggtgttctataaacagtcctttcctgtatgtcttctattaccctaagaccagagttattttggttggttgttttgttttattttttgtttttgtatccatggctggcactttactcattgcacttgagtttattgccccataactaaaggatcaggatgatggtagaacggagatctgggtttcagagctttcccatttaagaaaaatagatcttgagattctgattcttttccaaacagtcccctgctttcatgtacagctttttctttaccttacccaaaattctggccttgaagcagttttcctctatggctttgcctttctgattttctcagaggctcgagtctttaatataaccccaaatgaaagaaccaaggggaggggtgggatggcacttttttttgttggtcttgttttgttttgttttttggttggttggttcgttattttttaagattagccattctctgctgctatttccctacataatgtcaatttttaaccataattttgacatgattgagatgtacttgaggcttttttgttttaattgagaaaagactttgcaattttttttttaggatgagcctctcctagacttgacctagaatattacatattcctccagtaagtaatactgaagagcaaaagagaggcaggattggggtcacagccgcttcttcagcatggaccaagtgggccttggggattgcagcgttctcgaagtggctgtaggactcgaatttacagaaagccacagaggtgcaacttgaggctctgctagcaagccaccagtgaggctattgggtaaccacctttctatacaggagattggaatctactttgtcatttatccaccacagtgacaaaggaaaagtggtgccgttatgcaatccatttaactcataaacatattactctgagtaactggccagccattcatcggatccttcattgggtactcctgaaatcagacatgttcctgtagaaagaattttaagttaggctttctatgcacctatcaagaatcaagagaatagattgtatcaaacaacggcagggaaatccttcagcaattctaatccactttgggttttcagctgtttttacatctaaagcaatagactagaactgaattatcttctacatagtaaaatcacaattgtggaattacaggaattctggtgatattaaggtgaaataacaaaacacaaaaggccctattttaacagttgatgtgacagtaagttttaatagaacctgtaacttcattttggaaatgcttctccaccaaataagggctttttcccctatttaaggagccagatggattgaaagatgtggaaataggcagctgtagatcttgatcttccaggtaccccatgtacctttattgagcttaattataatactgtcaaattgccacgatctcactaaaggatttctatttgctgtcagttaaaaataaagccctaaatacatttttattctttctactgagggcattgtctgttttctttgtaaatgccgtacaataaacaaattatttaataacct

SEQ ID NO: 186343 - DNA, 4592 bp, Homo sapiens
  Payload ID: 16695
  Gene Symbol: SRPK1
  Gene Name: SRSF protein kinase 1
  Uniprot ID: Q96SB4
  ENST ID: ENST00000373825
  CDS Start-End: 287-2254
aaatagaacaaaactaaccttgccaggtttccaagcttggatctctaacactccttcaacgttcaccccggcgttcctccccgctgcgccccctccctctccttgccgccccctcctcgggagcaggtggtaggctccgcgcccaacgcgcaagcgcgcggcatcgtggggcgggggtggggcgggactgagggcggagtgtgagcgggctcggttttgggccgcggcgggagcgggagtcgccgccactcgagtgcgcaggcgcctggcgattaccggtctcaccatggagcggaaagtgcttgcgctccaggcccgaaagaaaaggaccaaggccaagaaggacaaagcccaaaggaaatctgaaactcagcaccgaggctctgctccccactctgagagtgatctaccagagcaggaagaggagattctgggatctgatgatgatgagcaagaagatcctaatgattattgtaaaggaggttatcatcttgtgaaaattggagatctattcaatgggagataccatgtgatccgaaagttaggctggggacacttttcaacagtatggttatcatgggatattcaggggaagaaatttgtggcaatgaaagtagttaaaagtgctgaacattacactgaaacagcactagatgaaatccggttgctgaagtcagttcgcaattcagaccctaatgatccaaatagagaaatggttgttcaactactagatgactttaaaatatcaggagttaatggaacacatatctgcatggtatttgaagttttggggcatcatctgctcaagtggatcatcaaatccaattatcaggggcttccactgccttgtgtcaaaaaaattattcagcaagtgttacagggtcttgattatttacataccaagtgccgtatcatccacactgacattaaaccagagaacatcttattgtcagtgaatgagcagtacattcggaggctggctgcagaagcaacagaatggcagcgatctggagctcctccgccttccggatctgcagtcagtactgctccccagcctaaaccagctgacaaaatgtcaaagaataagaagaagaaattgaagaagaagcagaagcgccaggcagaattactagagaagcgaatgcaggaaattgaggaaatggagaaagagtcgggccctgggcaaaaaagaccaaacaagcaagaagaatcagagagtcctgttgaaagacccttgaaagagaacccacctaataaaatgacccaagaaaaacttgaagagtcaagtaccattggccaggatcaaacgcttatggaacgtgatacagagggtggtgcagcagaaattaattgcaatggagtgattgaagtcattaattatactcagaacagtaataatgaaacattgagacataaagaggatctacataatgctaatgactgtgatgtccaaaatttgaatcaggaatctagtttcctaagctcccaaaatggagacagcagcacatctcaagaaacagactcttgtacacctataacatctgaggtgtcagacaccatggtgtgccagtcttcctcaactgtaggtcagtcattcagtgaacaacacattagccaacttcaagaaagcattcgggcagagataccctgtgaagatgaacaagagcaagaacataacggaccactggacaacaaaggaaaatccacggctggaaattttcttgttaatccccttgagccaaaaaatgcagaaaagctcaaggtgaagattgctgaccttggaaatgcttgttgggtgcacaaacatttcactgaagatattcaaacaaggcaatatcgttccttggaagttctaatcggatctggctataatacccctgctgacatttggagcacggcatgcatggcctttgaactggccacaggtgactatttgtttgaacctcattcaggggaagagtacactcgagatgaagatcacattgcattgatcatagaacttctggggaaggtgcctcgcaagctcattgtggcaggaaaatattccaaggaatttttcaccaaaaaaggtgacctgaaacatatcacgaagctgaaaccttggggcctttttgaggttctagtggagaagtatgagtggtcgcaggaagaggcagctggcttcacagatttcttactgcccatgttggagctgatccctgagaagagagccactgccgccgagtgtctccggcacccttggcttaactcctaagcccctgcccagcaccacagcagagatcacacactgaccctccgcccttccccttcaagcattttcctcttcccttttcagggtgaagctcttccttcaagagtttctagatcttgttttttttttaatccaacatgttcatttgggtttgcttacttgaccctgtggagatccccacagccattgggcatcctaggtgaatttggccttggttgggctctgccaaagactaatggactaaaatgtgaaacagcctcttgccctgtacctttccttcccattaggacatcctttaaattataagcatcctttttgaaaagagctatgaaggtgtatgagcccatccttttattcattgactctaagagtcaaattttctagtgcatatcctattgccagcataaggatgaggagggggaaagggtcttaattctatgtacagcagagacattaaacttgctgtgtccgggctgcatcatcttcctggactgtttctgttgttctctgtgttcacattttttcctgcaacttttaagctactgtcttttttaaatagctatatgaacaccaaatttgggtaccattttatcactgttcaaagcactgtcaaattcctttcatcctttaatagttaagatctttgaatcttcagtctgatttttaatgtaagcaaaaacagaaccattgaatagtaatttcttgagaacctcaggtgttctataaacagtcctttcctgtatgtcttctattaccctaagaccagagttattttggttggttgttttgttttattttttgtttttgtatccatggctggcactttactcattgcacttgagtttattgccccataactaaaggatcaggatgatggtagaacggagatctgggtttcagagctttcccatttaagaaaaatagatcttgagattctgattcttttccaaacagtcccctgctttcatgtacagctttttctttaccttacccaaaattctggccttgaagcagttttcctctatggctttgcctttctgattttctcagaggctcgagtctttaatataaccccaaatgaaagaaccaaggggaggggtgggatggcacttttttttgttggtcttgttttgttttgttttttggttggttggttcgttattttttaagattagccattctctgctgctatttccctacataatgtcaatttttaaccataattttgacatgattgagatgtacttgaggcttttttgttttaattgagaaaagactttgcaattttttttttaggatgagcctctcctagacttgacctagaatattacatattcctccagtaagtaatactgaagagcaaaagagaggcaggattggggtcacagccgcttcttcagcatggaccaagtgggccttggggattgcagcgttctcgaagtggctgtaggactcgaatttacagaaagccacagaggtgcaacttgaggctctgctagcaagccaccagtgaggctattgggtaaccacctttctatacaggagattggaatctactttgtcatttatccaccacagtgacaaaggaaaagtggtgccgttatgcaatccatttaactcataaacatattactctgagtaactggccagccattcatcggatccttcattgggtactcctgaaatcagacatgttcctgtagaaagaattttaagttaggctttctatgcacctatcaagaatcaagagaatagattgtatcaaacaacggcagggaaatccttcagcaattctaatccactttgggttttcagctgtttttacatctaaagcaatagactagaactgaattatcttctacatagtaaaatcacaattgtggaattacaggaattctggtgatattaaggtgaaataacaaaacacaaaaggccctattttaacagttgatgtgacagtaagttttaatagaacctgtaacttcattttggaaatgcttctccaccaaataagggctttttcccctatttaaggagccagatggattgaaagatgtggaaataggcagctgtagatcttgatcttccaggtaccccatgtacctttattgagcttaattataatactgtcaaattgccacgatctcactaaaggatttctatttgctgtcagttaaaaataaagccctaaatacatttttattctttctactgagggcattgtctgttttctttgtaaatgccgtacaataaacaaattatttaataacctacatgtttccaaaaatctctgttcatttgttgtccaaattgctctgccctgagtaaaaggaggaaaaga

SEQ ID NO: 186344 - DNA, 4357 bp, Homo sapiens
  Payload ID: 16695
  Gene Symbol: SRPK1
  Gene Name: SRSF protein kinase 1
  Uniprot ID: Q96SB4
  ENST ID: ENST00000423325
  CDS Start-End: 168-2087
ggagtgtgagcgggctcggttttgggccgcggcgggagcgggagtcgccgccactcgagtgcgcaggcgcctggcgattaccggtctcaccatggagcggaaagtgcttgcgctccaggcccgaaagaaaaggaccaaggccaagaaggacaaagcccaaaggaagaatgggcatttttgtatcatttcttagatctgaaactcagcaccgaggctctgctccccactctgagagtgatctaccagagcaggaagaggagattctgggatctgatgatgatgagcaagaagatcctaatgattattgtaaaggaggttatcatcttgtgaaaattggagatctattcaatgggagataccatgtgatccgaaagttaggctggggacacttttcaacagtatggttatcatgggatattcaggggaagaaatttgtggcaatgaaagtagttaaaagtgctgaacattacactgaaacagcactagatgaaatccggttgctgaagtcagttcgcaattcagaccctaatgatccaaatagagaaatggttgttcaactactagatgactttaaaatatcaggagttaatggaacacatatctgcatggtatttgaagttttggggcatcatctgctcaagtggatcatcaaatccaattatcaggggcttccactgccttgtgtcaaaaaaattattcagcaagtgttacagggtcttgattatttacataccaagtgccgtatcatccacactgacattaaaccagagaacatcttattgtcagtgaatgagcagtacattcggaggctggctgcagaagcaacagaatggcagcgatctggagctcctccgccttccggatctgcagtcagtactgctccccagcctaaaccagctgacaaaatgtcaaagaataagaagaagaaattgaagaagaagcagaagcgccaggcagaattactagagaagcgaatgcaggaaattgaggaaatggagaaagagtcgggccctgggcaaaaaagaccaaacaagcaagaagaatcagagagtcctgttgaaagacccttgaaagagaacccacctaataaaatgacccaagaaaaacttgaagagtcaagtaccattggccaggatcaaacgcttatggaacgtgatacagagggtggtgcagcagaaattaattgcaatggagtgattgaagtcattaattatactcagaacagtaataatgaaacattgagacataaagaggatctacataatgctaatgactgtgatgtccaaaatttgaatcaggaatctagtttcctaagctcccaaaatggagacagcagcacatctcaagaaacagactcttgtacacctataacatctgaggtgtcagacaccatggtgtgccagtcttcctcaactgtaggtcagtcattcagtgaacaacacattagccaacttcaagaaagcattcgggcagagataccctgtgaagatgaacaagagcaagaacataacggaccactggacaacaaaggaaaatccacggctggaaattttcttgttaatccccttgagccaaaaaatgcagaaaagctcaaggtgaagattgctgaccttggaaatgcttgttgggtgcacaaacatttcactgaagatattcaaacaaggcaatatcgttccttggaagttctaatcggatctggctataatacccctgctgacatttggagcacggcatgcatggcctttgaactggccacaggtgactatttgtttgaacctcattcaggggaagagtacactcgagatgaagatcacattgcattgatcatagaacttctggggaaggtgcctcgcaagctcattgtggcaggaaaatattccaaggaatttttcaccaaaaaaggtgacctgaaacatatcacgaagctgaaaccttggggcctttttgaggttctagtggagaagtatgagtggtcgcaggaagaggcagctggcttcacagatttcttactgcccatgttggagctgatccctgagaagagagccactgccgccgagtgtctccggcacccttggcttaactcctaagcccctgcccagcaccacagcagagatcacacactgaccctccgcccttccccttcaagcattttcctcttcccttttcagggtgaagctcttccttcaagagtttctagatcttgttttttttttaatccaacatgttcatttgggtttgcttacttgaccctgtggagatccccacagccattgggcatcctaggtgaatttggccttggttgggctctgccaaagactaatggactaaaatgtgaaacagcctcttgccctgtacctttccttcccattaggacatcctttaaattataagcatcctttttgaaaagagctatgaaggtgtatgagcccatccttttattcattgactctaagagtcaaattttctagtgcatatcctattgccagcataaggatgaggagggggaaagggtcttaattctatgtacagcagagacattaaacttgctgtgtccgggctgcatcatcttcctggactgtttctgttgttctctgtgttcacattttttcctgcaacttttaagctactgtcttttttaaatagctatatgaacaccaaatttgggtaccattttatcactgttcaaagcactgtcaaattcctttcatcctttaatagttaagatctttgaatcttcagtctgatttttaatgtaagcaaaaacagaaccattgaatagtaatttcttgagaacctcaggtgttctataaacagtcctttcctgtatgtcttctattaccctaagaccagagttattttggttggttgttttgttttattttttgtttttgtatccatggctggcactttactcattgcacttgagtttattgccccataactaaaggatcaggatgatggtagaacggagatctgggtttcagagctttcccatttaagaaaaatagatcttgagattctgattcttttccaaacagtcccctgctttcatgtacagctttttctttaccttacccaaaattctggccttgaagcagttttcctctatggctttgcctttctgattttctcagaggctcgagtctttaatataaccccaaatgaaagaaccaaggggaggggtgggatggcacttttttttgttggtcttgttttgttttgttttttggttggttggttcgttattttttaagattagccattctctgctgctatttccctacataatgtcaatttttaaccataattttgacatgattgagatgtacttgaggcttttttgttttaattgagaaaagactttgcaattttttttttaggatgagcctctcctagacttgacctagaatattacatattcctccagtaagtaatactgaagagcaaaagagaggcaggattggggtcacagccgcttcttcagcatggaccaagtgggccttggggattgcagcgttctcgaagtggctgtaggactcgaatttacagaaagccacagaggtgcaacttgaggctctgctagcaagccaccagtgaggctattgggtaaccacctttctatacaggagattggaatctactttgtcatttatccaccacagtgacaaaggaaaagtggtgccgttatgcaatccatttaactcataaacatattactctgagtaactggccagccattcatcggatccttcattgggtactcctgaaatcagacatgttcctgtagaaagaattttaagttaggctttctatgcacctatcaagaatcaagagaatagattgtatcaaacaacggcagggaaatccttcagcaattctaatccactttgggttttcagctgtttttacatctaaagcaatagactagaactgaattatcttctacatagtaaaatcacaattgtggaattacaggaattctggtgatattaaggtgaaataacaaaacacaaaaggccctattttaacagttgatgtgacagtaagttttaatagaacctgtaacttcattttggaaatgcttctccaccaaataagggctttttcccctatttaaggagccagatggattgaaagatgtggaaataggcagctgtagatcttgatcttccaggtaccccatgtacctttattgagcttaattataatactgtcaaattgccacgatctcactaaaggatttctatttgctgtcagttaaaaataaagccctaaatacatttttattctttctactgagggcattgtctgttttctttgtaaatgccgtacaataaacaaattatttaataaccta

SEQ ID NO: 186345 - DNA, 634 bp, Homo sapiens
  Payload ID: 16695
  Gene Symbol: SRPK1
  Gene Name: SRSF protein kinase 1
  ENST ID: ENST00000507292
  CDS Start-End: 1-129
agcattcgggcagagataccctgtgaagatgaacaagagcaagaacataacggaccactggacaacaaagtcttattgatgatgcctgttgtctgtaggaaaatccacggctggaaattttcttgttaatccccttgagccaaaaaatgcagaaaagctcaaggtgaagattgctgaccttggaaatgcttgttgggtgcacaaacatttcactgaagatattcaaacaaggcaatatcgttccttggaagttctaatcggatctggctataatacccctgctgacatttggagcacggcatgcatggtaatgttttttccccttggctttcacttgttaagtggtacatatcttgccctgtttgctaatttcagtaaaccagcaaattaactagcagaaaagaacgtaacacagatgatttaccataggtattctaaattctatgtctagagaggtccgaattcaaaaacctgtctggcatttcatttggttactgctaagttcctgttaggtgaaggaaccaaaagtttcttactacagattgttagtggggggaaataatgaaaacaactactaagaggtgttgttggttttgattaggagattacaagtatctttgcatttttagcactc

SEQ ID NO: 186346 - DNA, 559 bp, Homo sapiens
  Payload ID: 16695
  Gene Symbol: SRPK1
  Gene Name: SRSF protein kinase 1
  ENST ID: ENST00000512445
  CDS Start-End: 93-559
gattaccggtctcaccatggagcggaaagtgcttgcgctccaggcccgaaagaaaaggaccaaggccaagaaggacaaagcccaaaggaaagatggagtcttgctgtactaaccaggctggtcttgaactcctggcctcaagggatcctctcaccaccttggcctcccaaattactagaattacaggaatgggcatttttgtatcatttcttagatctgaaactcagcaccgaggctctgctccccactctgagagtgatctaccagagcaggaagaggagattctgggatctgatgatgatgagcaagaagatcctaatgattattgtaaaggaggttatcatcttgtgaaaattggagatctattcaatgggagataccatgtgatccgaaagttaggctggggacacttttcaacagtatggttatcatgggatattcaggggaagaaatttgtggcaatgaaagtagttaaaagtgctgaacattacactgaaacagcactagatgaaatccggttgctgaagtcagttcgcaattcagaccctaatgatccaaa

SEQ ID NO: 186347 - DNA, 621 bp, Homo sapiens
  Payload ID: 16695
  Gene Symbol: SRPK1
  Gene Name: SRSF protein kinase 1
  ENST ID: ENST00000510290
  CDS Start-End: 182-621
ttttgggccgcggcgggagcgggagtcgccgccactcgagtgcgcaggcgcctggcgattaccggtctcaccatggagcggaaagtgcttgcgctccaggcccgaaagaaaaggaccaaggccaagaaggacaaagcccaaaggaatcagtactgctccccagcctaaaccagctgacaaaatgtcaaagaataagaagaagaaattgaagaagaagcagaagcgccaggcagaattactagagaagcgaatgcaggaaattgaggaaatggagaaagagtcgggccctgggcaaaaaagaccaaacaagcaagaagaatcagagagtcctgttgaaagacccttgaaagagaacccacctaataaaatgacccaagaaaaacttgaagagtcaagtaccattggccaggatcaaacgcttatggaacgtgatacagagggtggtgcagcagaaattaattgcaatggagtgattgaagtcattaattatactcagaacagtaataatgaaacattgagacataaagaggatctacataatgctaatgactgtgatgtccaaaatttgaatcaggaatctagtttcctaagctcccaaaatggagacagcagcacatctca

SEQ ID NO: 186348 - DNA, 581 bp, Homo sapiens
  Payload ID: 16695
  Gene Symbol: SRPK1
  Gene Name: SRSF protein kinase 1
  ENST ID: ENST00000507909
  CDS Start-End: 227-581
actcgagtgcgcaggcgcctggcgattaccggtctcaccatggagcggaaagtgcttgcgctccaggcccgaaagaaaaggaccaaggccaagaaggacaaagcccaaaggaagtgagtcttgtaccccaacatcccattctttggattttcctccggcaccttctctgctctggtttcacgtcttgaacgtgcaccgggtttgggcaccctgtggctgcagccacatggcctcggggcagctcggagggtcgctctccagcaaccatgtggaagagagctgctgttgctcaacgccaggcctgggtcttagcagccccgggcctgctggaaagggctgtcggaggaggaccagagcccgcccggtacctttcctccccaactccacagaggaggcacaaactcccctagcttggacctccccaccggagctggtagatcattatcggtctgtttctgaactctggtctctcttacctgctccccaacgtcttaacttgcctccgacgtcttcacgatctgaaactcagcaccgaggctctgctccccactctgagagtgatctaccagagcaggaagagg

SEQ ID NO: 186349 - DNA, 858 bp, Homo sapiens
  Payload ID: 16695
  Gene Symbol: SRPK1
  Gene Name: SRSF protein kinase 1
  ENST ID: ENST00000508473
  CDS Start-End: 363-593
aaatagaacaaaactaaccttgccaggtttccaagcttggatctctaacactccttcaacgttcaccccggcgttcctccccgctgcgccccctccctctccttgccgccccctcctcgggagcaggtggtaggctccgcgcccaacgcgcaagcgcgcggcatcgtggggcgggggtggggcgggactgagggcggagtgtgagcgggctcggttttgggccgcggcgggagcgggagtcgccgccactcgagtgcgcaggcgcctggcgattaccggtctcaccatggagcggaaagtgcttgcgctccaggcccgaaagaaaaggaccaaggccaagaaggacaaagcccaaaggaaagatggagtcttgctgtactaaccaggctggtcttgaactcctggcctcaagggatcctctcaccaccttggcctcccaaattactagaattacagatctgaaactcagcaccgaggctctgctccccactctgagagtgatctaccagagcaggaagaggagattctgggatctgatgatgatgagcaagaagatcctaatgattattgtaaaggaggttatcatcttgtgaaaattggagatctattcaatgggagataccatgtgatccgaaagttaggctggggacacttttcaacagtatggttatcatgggatattcaggggaagaaatttgtggcaatgaaagtagttaaaagtgctgaacattacactgaaacagcactagatgaaatccggttgctgaagtcagttcgcaattcagaccctaatgatccaaatagagaaatggttgttcaactactagatgactttaaaatatcaggagttaatggaac

SEQ ID NO: 186350 - DNA, 3700 bp, Homo sapiens
  Payload ID: 16696
  Gene Symbol: SRPK2
  Gene Name: SRSF protein kinase 2
  Uniprot ID: P78362
  ENST ID: ENST00000357311
  CDS Start-End: 173-2239
ccattgaatcccagtcctaacagaagtactgcgaatcttgtggcctcattctgaacaaaagggattagagaagaaaaatctcttgatataaggcttgaaagcaagggcaggcaatcttggttgtgaatattttctgatttttccagaaatcaagcagaagattgagctgctgatgtcagttaactctgagaagtcgtcctcttcagaaaggccggagcctcaacagaaagctcctttagttcctcctcctccaccgccaccaccaccaccaccgccacctttgccagaccccacacccccggagccagaggaggagatcctgggatcagatgatgaggagcaagaggaccctgcggactactgcaaaggtggatatcatccagtgaaaattggagacctcttcaatggccggtatcatgttattagaaagcttggatgggggcacttctctactgtctggctgtgctgggatatgcaggggaaaagatttgttgcaatgaaagttgtaaaaagtgcccagcattatacggagacagccttggatgaaataaaattgctcaaatgtgttcgagaaagtgatcccagtgacccaaacaaagacatggtggtccagctcattgacgacttcaagatttcaggcatgaatgggatacatgtctgcatggtcttcgaagtacttggccaccatctcctcaagtggatcatcaaatccaactatcaaggcctcccagtacgttgtgtgaagagtatcattcgacaggtccttcaagggttagattacttacacagtaagtgcaagatcattcatactgacataaagccggaaaatatcttgatgtgtgtggatgatgcatatgtgagaagaatggcagctgaggccactgagtggcagaaagcaggtgctcctcctccttcagggtctgcagtgagtacggctccacagcagaaacctataggaaaaatatctaaaaacaaaaagaaaaaactgaaaaagaaacagaagaggcaggctgagttattggagaagcgcctgcaggagatagaagaattggagcgagaagctgaaaggaaaataatagaagaaaacatcacctcagctgcaccttccaatgaccaggatggcgaatactgcccagaggtgaaactaaaaacaacaggattagaggaggcggctgaggcagagactgcaaaggacaatggtgaagctgaggaccaggaagagaaagaagatgctgagaaagaaaacattgaaaaagatgaagatgatgtagatcaggaacttgcgaacatagaccctacgtggatagaatcacctaaaaccaatggccatattgagaatggcccattctcactggagcagcaactggacgatgaagatgatgatgaagaagactgcccaaatcctgaggaatataatcttgatgagccaaatgcagaaagtgattacacatatagcagctcctatgaacaattcaatggtgaattgccaaatggacgacataaaattcccgagtcacagttcccagagttttccacctcgttgttctctggatccttagaacctgtggcctgcggctctgtgctttctgagggatcaccacttactgagcaagaggagagcagtccatcccatgacagaagcagaacggtttcagcctccagtactggggatttgccaaaagcaaaaacccgggcagctgacttgttggtgaatcccctggatccgcggaatgcagataaaattagagtaaaaattgctgacctgggaaatgcttgttgggtgcataaacacttcacggaagacatccagacgcgtcagtaccgctccatagaggttttaataggagcggggtacagcacccctgcggacatctggagcacggcgtgtatggcatttgagctggcaacgggagattatttgtttgaaccacattctggggaagactattccagagacgaagaccacatagcccacatcatagagctgctaggcagtattccaaggcactttgctctatctggaaaatattctcgggaattcttcaatcgcagaggagaactgcgacacatcaccaagctgaagccctggagcctctttgatgtacttgtggaaaagtatggctggccccatgaagatgctgcacagtttacagatttcctgatcccgatgttagaaatggttccagaaaaacgagcctcagctggcgaatgccttcggcatccttggttgaattcttagcaaattctaccaatattgcattctgagctagcaaatgttcccagtacattggacctaaacggtgactctcattctttaacaggattacaagtgagctggcttcatcctcagacctttattttgctttgaggtactgttgtttgacattttgctttttgtgcactgtgatcctggggaagggtagtcttttgtcttcagctaagtagtttactgaccattttcttctggaaacaataacatgtctctaagcattgtttcttgtgttgtgtgacattcaaatgtcatttttttgaatgaaaaatactttcccctttgtgttttggcaggttttgtaactatttatgaagaaatattttagctgagtactatataatttacaatcttaagaaattatcaagttggaaccaagaaatagcaaggaaatgtacaattttatcttctggcaaagggacatcattcctgtattatagtgtatgtaaatgcaccctgtaaatgttactttccattaaatatgggagggggactcaaatttcagaaaagctaccaagtcttgagtgctttgtagcctatgttgcatgtagcggactttaactgctccaaggagttgtgcaaacttttcattccataacagtcttttcacattggattttaaacaaagtggctctgggttataagatgtcattctctatatggcactttaaaggaagaaaagatatgtttctcattctaaaatatgcattataatttagcagtcccatttgtgattttgcatatttttaaaagtacttttaaagaagagcaatttccctttaaaaatgtgatggctcagtaccatgtcatgttgcctcctctgggcgctgtaagttaagctctacatagattaaattggagaaacgtgttaattgtgtggaatgaaaaaatacatatatttttggaaaagcatgatcatgcttgtctagaacacaaggtatggtatatacaatttgcagtgcagtgggcagaatacttctcacagctcaaagataacagtgatcacattcattccataggtagctttacgtgtggctacaacaaattttactagctttttcattgtctttccatgaaacgaagttgagaaaatgattttccctttgcaggttgcacacagttttgtttatgcatttccttaaaattaattgtagactccaggatacaaaccatagtaggcaatacaattttagaatgtaatatatagaggtatatttagcctcttttagaagtcagtggattgaatgtctttttattttaaattttacattcattaaggtgcctcgtttttgactttgtccattaacatttatccatatgcctttgcaataactagattgtgaaaagctaacaagtgttgtaacaataatccattgtttgaggtgcttgcagttgtcttaaaaattaaagtgttttggtttttttttttcc

SEQ ID NO: 186351 - DNA, 3650 bp, Homo sapiens
  Payload ID: 16696
  Gene Symbol: SRPK2
  Gene Name: SRSF protein kinase 2
  Uniprot ID: P78362
  ENST ID: ENST00000393651
  CDS Start-End: 89-2188
ggcggagcgagtggaggctgcagcccagctcgtctcggcgcccgcgtcgccgtcgcgaagccccccgccccgcttccgccgcgtcggaatgagctcccggaaagtgctggccattcaggcccgaaagcggaggccgaaaagagagaaacatccgaaaaagccggagcctcaacagaaagctcctttagttcctcctcctccaccgccaccaccaccaccaccgccacctttgccagaccccacacccccggagccagaggaggagatcctgggatcagatgatgaggagcaagaggaccctgcggactactgcaaaggtggatatcatccagtgaaaattggagacctcttcaatggccggtatcatgttattagaaagcttggatgggggcacttctctactgtctggctgtgctgggatatgcaggggaaaagatttgttgcaatgaaagttgtaaaaagtgcccagcattatacggagacagccttggatgaaataaaattgctcaaatgtgttcgagaaagtgatcccagtgacccaaacaaagacatggtggtccagctcattgacgacttcaagatttcaggcatgaatgggatacatgtctgcatggtcttcgaagtacttggccaccatctcctcaagtggatcatcaaatccaactatcaaggcctcccagtacgttgtgtgaagagtatcattcgacaggtccttcaagggttagattacttacacagtaagtgcaagatcattcatactgacataaagccggaaaatatcttgatgtgtgtggatgatgcatatgtgagaagaatggcagctgaggccactgagtggcagaaagcaggtgctcctcctccttcagggtctgcagtgagtacggctccacagcagaaacctataggaaaaatatctaaaaacaaaaagaaaaaactgaaaaagaaacagaagaggcaggctgagttattggagaagcgcctgcaggagatagaagaattggagcgagaagctgaaaggaaaataatagaagaaaacatcacctcagctgcaccttccaatgaccaggatggcgaatactgcccagaggtgaaactaaaaacaacaggattagaggaggcggctgaggcagagactgcaaaggacaatggtgaagctgaggaccaggaagagaaagaagatgctgagaaagaaaacattgaaaaagatgaagatgatgtagatcaggaacttgcgaacatagaccctacgtggatagaatcacctaaaaccaatggccatattgagaatggcccattctcactggagcagcaactggacgatgaagatgatgatgaagaagactgcccaaatcctgaggaatataatcttgatgagccaaatgcagaaagtgattacacatatagcagctcctatgaacaattcaatggtgaattgccaaatggacgacataaaattcccgagtcacagttcccagagttttccacctcgttgttctctggatccttagaacctgtggcctgcggctctgtgctttctgagggatcaccacttactgagcaagaggagagcagtccatcccatgacagaagcagaacggtttcagcctccagtactggggatttgccaaaagcaaaaacccgggcagctgacttgttggtgaatcccctggatccgcggaatgcagataaaattagagtaaaaattgctgacctgggaaatgcttgttgggtgcataaacacttcacggaagacatccagacgcgtcagtaccgctccatagaggttttaataggagcggggtacagcacccctgcggacatctggagcacggcgtgtatggcatttgagctggcaacgggagattatttgtttgaaccacattctggggaagactattccagagacgaagaccacatagcccacatcatagagctgctaggcagtattccaaggcactttgctctatctggaaaatattctcgggaattcttcaatcgcagaggagaactgcgacacatcaccaagctgaagccctggagcctctttgatgtacttgtggaaaagtatggctggccccatgaagatgctgcacagtttacagatttcctgatcccgatgttagaaatggttccagaaaaacgagcctcagctggcgaatgccttcggcatccttggttgaattcttagcaaattctaccaatattgcattctgagctagcaaatgttcccagtacattggacctaaacggtgactctcattctttaacaggattacaagtgagctggcttcatcctcagacctttattttgctttgaggtactgttgtttgacattttgctttttgtgcactgtgatcctggggaagggtagtcttttgtcttcagctaagtagtttactgaccattttcttctggaaacaataacatgtctctaagcattgtttcttgtgttgtgtgacattcaaatgtcatttttttgaatgaaaaatactttcccctttgtgttttggcaggttttgtaactatttatgaagaaatattttagctgagtactatataatttacaatcttaagaaattatcaagttggaaccaagaaatagcaaggaaatgtacaattttatcttctggcaaagggacatcattcctgtattatagtgtatgtaaatgcaccctgtaaatgttactttccattaaatatgggagggggactcaaatttcagaaaagctaccaagtcttgagtgctttgtagcctatgttgcatgtagcggactttaactgctccaaggagttgtgcaaacttttcattccataacagtcttttcacattggattttaaacaaagtggctctgggttataagatgtcattctctatatggcactttaaaggaagaaaagatatgtttctcattctaaaatatgcattataatttagcagtcccatttgtgattttgcatatttttaaaagtacttttaaagaagagcaatttccctttaaaaatgtgatggctcagtaccatgtcatgttgcctcctctgggcgctgtaagttaagctctacatagattaaattggagaaacgtgttaattgtgtggaatgaaaaaatacatatatttttggaaaagcatgatcatgcttgtctagaacacaaggtatggtatatacaatttgcagtgcagtgggcagaatacttctcacagctcaaagataacagtgatcacattcattccataggtagctttacgtgtggctacaacaaattttactagctttttcattgtctttccatgaaacgaagttgagaaaatgattttccctttgcaggttgcacacagttttgtttatgcatttccttaaaattaattgtagactccaggatacaaaccatagtaggcaatacaattttagaatgtaatatatagaggtatatttagcctcttttagaagtcagtggattgaatgtctttttattttaaattttacattcattaaggtgcctcgtttttgactttgtccattaacatttatccatatgcctttgcaataactagattgtgaaaagctaacaagtgttgtaacaataatccattgtttgaggtgcttgcagttgtcttaaaaattaaagtgttttggtttttttttttcca

SEQ ID NO: 186352 - DNA, 666 bp, Homo sapiens
  Payload ID: 16696
  Gene Symbol: SRPK2
  Gene Name: SRSF protein kinase 2
  ENST ID: ENST00000460391
  CDS Start-End: 186-666
ggcggagcgagtggaggctgcagcccagctcgtctcggcgcccgcgtcgccgtcgcgaagccccccgccccgcttccgccgcgtcggaatgagctcccggaaagtgctggccattcaggcccgaaagcggaggccgaaaagagagaaacatccgaaaaaaaatcaagcagaagattgagctgctgatgtcagttaactctgagaagtcgtcctcttcagaaaggccggagcctcaacagaaagctcctttagttcctcctcctccaccgccaccaccaccaccaccgccacctttgccagaccccacacccccggagccagaggaggagatcctgggatcagatgatgaggagcaagaggaccctgcggactactgcaaaggtggatatcatccagtgaaaattggagacctcttcaatggccggtatcatgttattagaaagcttggatgggggcacttctctactgtctggctgtgctgggatatgcaggggaaaagatttgttgcaatgaaagttgtaaaaagtgcccagcattatacggagacagccttggatgaaataaaattgctcaaatgtgttcgagaaagtgatcccagtgacccaaacaaagacatggtggtccagctcattgacgacttcaagatttcaggcatgaatgggatac

SEQ ID NO: 186353 - DNA, 568 bp, Homo sapiens
  Payload ID: 16696
  Gene Symbol: SRPK2
  Gene Name: SRSF protein kinase 2
  ENST ID: ENST00000465112
  CDS Start-End: 93-299
ggccggcggagcgagtggaggctgcagcccagctcgtctcggcgcccgcgtcgccgtcgcgaagccccccgccccgcttccgccgcgtcggaatgagctcccggaaagtgctggccattcaggcccgaaagcggaggccgaaaagagagaaacatccgaaaaagtggagtacatcctgctgcttcaagggtagaagactcctcactgctttccttcatgagatttcaaaggaagtgttggttttttttttgcctggttcaagtattgaccaagaagatgacagtgatgtggtctcttaggagtgaacaaccaaggcgatgggctgtaggatgttgatacatctgaggggccagatggccaccatatcagggaaagccaatgtgttttgaaaaatatgcaaatgttcaataagaaatcaagcagaagattgagctgctgatgtcagttaactctgagaagtcgtcctcttcagaaaggccggagcctcaacagaaagctcctttagttcctcctcctccaccgccaccaccaccaccaccgccacctttgccagaccccacacccccgg

SEQ ID NO: 186354 - DNA, 954 bp, Homo sapiens
  Payload ID: 16696
  Gene Symbol: SRPK2
  Gene Name: SRSF protein kinase 2
  ENST ID: ENST00000465072
  CDS Start-End: 1-444
atggcatttgagctggcaacgggagattatttgtttgaaccacattctggggaagactattccagagacgaagaccacatagcccacatcatagagctgctaggcagtattccaaggcactttgctctatctggaaaatattctcgggaattcttcaatcgcagagatcacatagcattgatcattgaactgctggggaaagtccctcgaaaatacgctatgttggggaaatactccaaggagtttttcaccagaaaaggagaactgcgacacatcaccaagctgaagccctggagcctctttgatgtacttgtggaaaagtatggctggccccatgaagatgctgcacagtttacagatttcctgatcccgatgttagaaatggttccagaaaaacgagcctcagctggcgaatgccttcggcatccttggttgaattcttagcaaattctaccaatattgcattctgagctagcaaatgttcccagtacattggacctaaacggtgactctcattctttaacaggattacaagtgagctggcttcatcctcagacctttattttgctttgaggttttgtaactatttatgaagaaatattttagctgagtactatataatttacaatcttaagaaattatcaagttggaaccaagaaatagcaaggaaatgtacaattttatcttctggcaaagggacatcattcctgtattatagttccatgtgaaatcttcatggaaaatgacaagcagtggatcacatatgtgtttatagcagatacaggagctggctatctagaagttggcagacagaactgcccaaaggcagagaaaaggtggatataagatcttccgagtcataaacttcttaggtgaaaaccgatttactaacttgcttcttcccatacctggaccatacataactagttaccacgataaagtaaggaaactttc

SEQ ID NO: 186355 - DNA, 872 bp, Homo sapiens
  Payload ID: 16696
  Gene Symbol: SRPK2
  Gene Name: SRSF protein kinase 2
  ENST ID: ENST00000474770
  CDS Start-End: 1-614
tggatccgcggaatgcagataaaattagagtaaaaattgctgacctgggaaatgcttgttgggtgcataaacacttcacggaagacatccagacgcgtcagtaccgctccatagaggttttaataggagcggggtacagcacccctgcggacatctggagcacggcgtgtatggcatttgagctggcaacgggagattatttgtttgaaccacattctggggaagactattccagagacgaagaccacatagcccacatcatagagctgctaggcagtattccaaggcactttgctctatctggaaaatattctcgggaattcttcaatcgcagagatcacatagcattgatcattgaactgctggggaaagtccctcgaaaatacgctatgttggggaaatactccaaggagtttttcaccagaaaaggagaactgcgacacatcaccaagctgaagccctggagcctctttgatgtacttgtggaaaagtatggctggccccatgaagatgctgcacagtttacagatttcctgatcccgatgttagaaatggttccagaaaaacgagcctcagctggcgaatgccttcggcatccttggttgaattcttagcaaattctaccaatattgcattctgagctagcaaatgttcccagtacattggacctaaacggtgactctcattctttaacaggattacaagtgagctggcttcatcctcagacctttattttgctttgaggtactgttgtttgacattttgctttttgtgcactgtgatcctggggaagggtagtcttttgtcttcagctaagtagtttactgaccattttcttctggaaacaataacatgtctctaagcattgtttc

SEQ ID NO: 186356 - DNA, 715 bp, Homo sapiens
  Payload ID: 16696
  Gene Symbol: SRPK2
  Gene Name: SRSF protein kinase 2
  ENST ID: ENST00000482897
  CDS Start-End: 22-715
ggagaggaggaagcggcgctcatggggttgcaaggatgtagaggagcaaagggagagaagaggccgcgggaagagaggtggtgcgagacccgcggaggcgccggccaaggacgggcgcatggagcagcgggcggcgcgaccggccgggtgctggccattcaggcccgaaagcggaggccgaaaagagagaaacatccgaaaaagccggagcctcaacagaaagctcctttagttcctcctcctccaccgccaccaccaccaccaccgccacctttgccagaccccacacccccggagccagaggaggagatcctgggatcagatgatgaggagcaagaggaccctgcggactactgcaaaggtggatatcatccagtgaaaattggagacctcttcaatggccggtatcatgttattagaaagcttggatgggggcacttctctactgtctggctgtgctgggatatgcaggggaaaagatttgttgcaatgaaagttgtaaaaagtgcccagcattatacggagacagccttggatgaaataaaattgctcaaatgtgttcgagaaagtgatcccagtgacccaaacaaagacatggtggtccagctcattgacgacttcaagatttcaggcatgaatgggatacatgtctgcatggtcttcgaagtacttggccaccatctcctcaagtggatcatcaaatccaactatcaag

SEQ ID NO: 186357 - DNA, 2560 bp, Homo sapiens
  Payload ID: 16696
  Gene Symbol: SRPK2
  Gene Name: SRSF protein kinase 2
  Uniprot ID: P78362
  ENST ID: ENST00000489828
  CDS Start-End: 182-2248
gttggagtgggccctgtgcctctgctgtctcctactgctaacgagtgaacaaccaaggcgatgggctgtaggatgttgatacatctgaggggccagatggccaccatatcagggaaagccaatgtgttttgaaaaatatgcaaatgttcaataagaaatcaagcagaagattgagctgctgatgtcagttaactctgagaagtcgtcctcttcagaaaggccggagcctcaacagaaagctcctttagttcctcctcctccaccgccaccaccaccaccaccgccacctttgccagaccccacacccccggagccagaggaggagatcctgggatcagatgatgaggagcaagaggaccctgcggactactgcaaaggtggatatcatccagtgaaaattggagacctcttcaatggccggtatcatgttattagaaagcttggatgggggcacttctctactgtctggctgtgctgggatatgcaggggaaaagatttgttgcaatgaaagttgtaaaaagtgcccagcattatacggagacagccttggatgaaataaaattgctcaaatgtgttcgagaaagtgatcccagtgacccaaacaaagacatggtggtccagctcattgacgacttcaagatttcaggcatgaatgggatacatgtctgcatggtcttcgaagtacttggccaccatctcctcaagtggatcatcaaatccaactatcaaggcctcccagtacgttgtgtgaagagtatcattcgacaggtccttcaagggttagattacttacacagtaagtgcaagatcattcatactgacataaagccggaaaatatcttgatgtgtgtggatgatgcatatgtgagaagaatggcagctgaggccactgagtggcagaaagcaggtgctcctcctccttcagggtctgcagtgagtacggctccacagcagaaacctataggaaaaatatctaaaaacaaaaagaaaaaactgaaaaagaaacagaagaggcaggctgagttattggagaagcgcctgcaggagatagaagaattggagcgagaagctgaaaggaaaataatagaagaaaacatcacctcagctgcaccttccaatgaccaggatggcgaatactgcccagaggtgaaactaaaaacaacaggattagaggaggcggctgaggcagagactgcaaaggacaatggtgaagctgaggaccaggaagagaaagaagatgctgagaaagaaaacattgaaaaagatgaagatgatgtagatcaggaacttgcgaacatagaccctacgtggatagaatcacctaaaaccaatggccatattgagaatggcccattctcactggagcagcaactggacgatgaagatgatgatgaagaagactgcccaaatcctgaggaatataatcttgatgagccaaatgcagaaagtgattacacatatagcagctcctatgaacaattcaatggtgaattgccaaatggacgacataaaattcccgagtcacagttcccagagttttccacctcgttgttctctggatccttagaacctgtggcctgcggctctgtgctttctgagggatcaccacttactgagcaagaggagagcagtccatcccatgacagaagcagaacggtttcagcctccagtactggggatttgccaaaagcaaaaacccgggcagctgacttgttggtgaatcccctggatccgcggaatgcagataaaattagagtaaaaattgctgacctgggaaatgcttgttgggtgcataaacacttcacggaagacatccagacgcgtcagtaccgctccatagaggttttaataggagcggggtacagcacccctgcggacatctggagcacggcgtgtatggcatttgagctggcaacgggagattatttgtttgaaccacattctggggaagactattccagagacgaagaccacatagcccacatcatagagctgctaggcagtattccaaggcactttgctctatctggaaaatattctcgggaattcttcaatcgcagaggagaactgcgacacatcaccaagctgaagccctggagcctctttgatgtacttgtggaaaagtatggctggccccatgaagatgctgcacagtttacagatttcctgatcccgatgttagaaatggttccagaaaaacgagcctcagctggcgaatgccttcggcatccttggttgaattcttagcaaattctaccaatattgcattctgagctagcaaatgttcccagtacattggacctaaacggtgactctcattctttaacaggattacaagtgagctggcttcatcctcagacctttattttgctttgaggtactgttgtttgacattttgctttttgtgcactgtgatcctggggaagggtagtcttttgtcttcagctaagtagtttactgaccattttcttctggaaacaataacatgtctctaagcattgtttcttgtgttgtgtgacattcaaatgtcatttttttgaatgaaaaatactttcccct

SEQ ID NO: 186358 - DNA, 1336 bp, Homo sapiens
  Payload ID: 16696
  Gene Symbol: SRPK2
  Gene Name: SRSF protein kinase 2
  ENST ID: ENST00000477925
  CDS Start-End: 1-886
ggagcagcaactggacgatgaagatgatgatgaagaagactgcccaaatcctgaggaatataatcttgatgagccaaatgcagaaagtgattacacatatagcagctcctatgaacaattcaatggtgaattgccaaatggacgacataaaattcccgagtcacagttcccagagttttccacctcgttgttctctggatccttagaacctgtggcctgcggctctgtgctttctgagggatcaccacttactgagcaagaggagagcagtccatcccatgacagaagcagaacggtttcagcctccagtactggggatttgccaaaagcaaaaacccgggcagctgacttgttggtgaatcccctggatccgcggaatgcagataaaattagagtaaaaattgctgacctgggaaatgcttgttgggtgcataaacacttcacggaagacatccagacgcgtcagtaccgctccatagaggttttaataggagcggggtacagcacccctgcggacatctggagcacggcgtgtatggcatttgagctggcaacgggagattatttgtttgaaccacattctggggaagactattccagagacgaagatcacatagcattgatcattgaactgctggggaaagtccctcgaaaatacgctatgttggggaaatactccaaggagtttttcaccagaaaaggagaactgcgacacatcaccaagctgaagccctggagcctctttgatgtacttgtggaaaagtatggctggccccatgaagatgctgcacagtttacagatttcctgatcccgatgttagaaatggttccagaaaaacgagcctcagctggcgaatgccttcggcatccttggttgaattcttagcaaattctaccaatattgcattctgagctagcaaatgttcccagtacattggacctaaacggtgactctcattctttaacaggattacaagtgagctggcttcatcctcagacctttattttgctttgaggtactgttgtttgacattttgctttttgtgcactgtgatcctggggaagggtagtcttttgtcttcagctaagtagtttactgaccattttcttctggaaacaataacatgtctctaagcattgtttcttgtgttgtgtgacattcaaatgtcatttttttgaatgaaaaatactttcccctttgtgttttggcaggttttgtaactatttatgaagaaatattttagctgagtactatataatttacaatcttaagaaattatcaagttggaaccaagaaatagcaaggaaatgtacaattttatcttctggcaaaggg

SEQ ID NO: 186359 - DNA, 1717 bp, Homo sapiens
  Payload ID: 16697
  Gene Symbol: SRPK3
  Gene Name: SRSF protein kinase 3
  ENST ID: ENST00000370100
  CDS Start-End: 31-1509
cagcggcggcagcggcggcagtagcagcagatgctgcagggccttctgggctccgacgacgaggaacaggaagaccccaaagactactgcaagggcggctaccaccctgtgaagatcggcgacgtgttcaatgggcggtaccacgtggtgcgcaaactgggctggggccacttctccaccgtctggctctgctgggacatccagcgcaagcgctttgtggccctcaaagtggtgaagagtgcggggcattacacggagacagctgtggatgagatcaagctcctgaaatgtgtccgggacagcgaccccagtgaccccaaaagagagaccattgtccagctcattgatgacttcaggatctcaggagtcaatggagtccatgtgtgcatggtgctggaggtgctgggccaccagctcctcaaatggatcatcaagtccaactaccagggcctgcccgtgccctgcgtgaagagcatcgtgaggcaggtgctgcacggcctggactacctccacaccaagtgcaagatcatccacacggacatcaagcccgagaacatcttgctgtgtgtgggggacgcttacatcaggcgcctggctgccgaggccacggagtggcaacaggcaggggcgccgcccccctcccgctccatagtcagcactgccccccaggaggtcttgaccggtaagctgtccaaaaacaagaggaagaagatgaggcgcaaacggaaacagcagaagcggctgctggaggagcggctgcgggacctgcagaggctggaggccatggaggctgccacccaggctgaggactctggcttgagactagacgggggcagcggctccacatcctcttcaggctgcttctccggctccctcttctctcctgcctcctgctccatcctctccggctcgtccaatcagcgagagaccgggggcctcctgtcgcctagcacaccattcggtgcctcgaacctcctggtgaaccccctggagccccaaaatgcagataagatcaagatcaagatcgcagacctgggcaacgcctgctgggtgcacaagcacttcacggaagacatccagactcggcagtaccgggccgtcgaggtgctgatcggcgccgaatacggccccccggcagacatctggagcacagcctgcatggccttcgagctggccactggtgactacctgttcgagccgcattctggagaagactacagtcgtgatgaggaccacatcgctcacatagtggagcttctgggggacatccccccagccttcgccctctcaggccgctattcccgggagttcttcaaccggagaggagagctgcggcacatccacaatctcaagcactggggcctgtacgaggtactcatggaaaagtacgagtggcccctagagcaggccacacagttcagcgcctttctgctgcccatgatggagtacatccccgaaaagcgggccagtgccgctgactgcctccagcacccctggctcaacccctaggcccggctgtggctccacctccagctctccgtgccttaagggaaaagcgggacagctcccaccaccctgctgggcgccagttctccacaaccacagggcagagagacgctggagccaggcccggctctcagagcgtgttctgcctgagacccccgtgagggctctcggagaaagtgtgtgtattcctttcttaataaagtgtggactg

SEQ ID NO: 186360 - DNA, 1958 bp, Homo sapiens
  Payload ID: 16697
  Gene Symbol: SRPK3
  Gene Name: SRSF protein kinase 3
  Uniprot ID: Q9UPE1
  ENST ID: ENST00000370101
  CDS Start-End: 47-1750
aggagcagccgcccggggcaccggagctgcgggctgcgtggccgggatgagcgccagcacgggcggtggtggggacagcggcggcagcggcggcagtagcagcagctcacaggcctcctgcgggcccgagtcctcgggctccgaactagccctggccacaccggtgcctcagatgctgcagggccttctgggctccgacgacgaggaacaggaagaccccaaagactactgcaagggcggctaccaccctgtgaagatcggcgacgtgttcaatgggcggtaccacgtggtgcgcaaactgggctggggccacttctccaccgtctggctctgctgggacatccagcgcaagcgctttgtggccctcaaagtggtgaagagtgcggggcattacacggagacagctgtggatgagatcaagctcctgaaatgtgtccgggacagcgaccccagtgaccccaaaagagagaccattgtccagctcattgatgacttcaggatctcaggagtcaatggagtccatgtgtgcatggtgctggaggtgctgggccaccagctcctcaaatggatcatcaagtccaactaccagggcctgcccgtgccctgcgtgaagagcatcgtgaggcaggtgctgcacggcctggactacctccacaccaagtgcaagatcatccacacggacatcaagcccgagaacatcttgctgtgtgtgggggacgcttacatcaggcgcctggctgccgaggccacggagtggcaacaggcaggggcgccgcccccctcccgctccatagtcagcactgccccccaggaggtcttgcagaccggtaagctgtccaaaaacaagaggaagaagatgaggcgcaaacggaaacagcagaagcggctgctggaggagcggctgcgggacctgcagaggctggaggccatggaggctgccacccaggctgaggactctggcttgagactagacgggggcagcggctccacatcctcttcaggctgtcaccccgggggcgccagagcaggtccctccccagcctcttcctcccccgccccagggggcggccgtagcctcagcgcgggctcacagacctcaggcttctccggctccctcttctctcctgcctcctgctccatcctctccggctcgtccaatcagcgagagaccgggggcctcctgtcgcctagcacaccattcggtgcctcgaacctcctggtgaaccccctggagccccaaaatgcagataagatcaagatcaagatcgcagacctgggcaacgcctgctgggtgcacaagcacttcacggaagacatccagactcggcagtaccgggccgtcgaggtgctgatcggcgccgaatacggccccccggcagacatctggagcacagcctgcatggccttcgagctggccactggtgactacctgttcgagccgcattctggagaagactacagtcgtgatgaggaccacatcgctcacatagtggagcttctgggggacatccccccagccttcgccctctcaggccgctattcccgggagttcttcaaccggagaggagagctgcggcacatccacaatctcaagcactggggcctgtacgaggtactcatggaaaagtacgagtggcccctagagcaggccacacagttcagcgcctttctgctgcccatgatggagtacatccccgaaaagcgggccagtgccgctgactgcctccagcacccctggctcaacccctaggcccggctgtggctccacctccagctctccgtgccttaagggaaaagcgggacagctcccaccaccctgctgggcgccagttctccacaaccacagggcagagagacgctggagccaggcccggctctcagagcgtgttctgcctgagacccccgtgagggctctcggagaaagtgtgtgtattcctttcttaataaagtgtggactg

SEQ ID NO: 186361 - DNA, 1753 bp, Homo sapiens
  Payload ID: 16697
  Gene Symbol: SRPK3
  Gene Name: SRSF protein kinase 3
  Uniprot ID: Q9UPE1
  ENST ID: ENST00000370104
  CDS Start-End: 49-1749
acaggagcagccgcccggggcaccggagctgcgggctgcgtggccgggatgagcgccagcacgggcggtggtggggacagcggcggcagcggcggcagtagcagcagctcacaggcctcctgcgggcccgagtcctcgggctccgaactagccctggccacaccggtgcctcagatgctgcagggccttctgggctccgacgacgaggaacaggaagaccccaaagactactgcaagggcggctaccaccctgtgaagatcggcgacgtgttcaatgggcggtaccacgtggtgcgcaaactgggctggggccacttctccaccgtctggctctgctgggacatccagcgcaagcgctttgtggccctcaaagtggtgaagagtgcggggcattacacggagacagctgtggatgagatcaagctcctgaaatgtgtccgggacagcgaccccagtgaccccaaaagagagaccattgtccagctcattgatgacttcaggatctcaggagtcaatggagtccatgtgtgcatggtgctggaggtgctgggccaccagctcctcaaatggatcatcaagtccaactaccagggcctgcccgtgccctgcgtgaagagcatcgtgaggcaggtgctgcacggcctggactacctccacaccaagtgcaagatcatccacacggacatcaagcccgagaacatcttgctgtgtgtgggggacgcttacatcaggcgcctggctgccgaggccacggagtggcaacaggcaggggcgccgcccccctcccgctccatagtcagcactgccccccaggaggtcttgaccggtaagctgtccaaaaacaagaggaagaagatgaggcgcaaacggaaacagcagaagcggctgctggaggagcggctgcgggacctgcagaggctggaggccatggaggctgccacccaggctgaggactctggcttgagactagacgggggcagcggctccacatcctcttcaggctgtcaccccgggggcgccagagcaggtccctccccagcctcttcctcccccgccccagggggcggccgtagcctcagcgcgggctcacagacctcaggcttctccggctccctcttctctcctgcctcctgctccatcctctccggctcgtccaatcagcgagagaccgggggcctcctgtcgcctagcacaccattcggtgcctcgaacctcctggtgaaccccctggagccccaaaatgcagataagatcaagatcaagatcgcagacctgggcaacgcctgctgggtgcacaagcacttcacggaagacatccagactcggcagtaccgggccgtcgaggtgctgatcggcgccgaatacggccccccggcagacatctggagcacagcctgcatggccttcgagctggccactggtgactacctgttcgagccgcattctggagaagactacagtcgtgatgaggaccacatcgctcacatagtggagcttctgggggacatccccccagccttcgccctctcaggccgctattcccgggagttcttcaaccggagaggagagctgcggcacatccacaatctcaagcactggggcctgtacgaggtactcatggaaaagtacgagtggcccctagagcaggccacacagttcagcgcctttctgctgcccatgatggagtacatccccgaaaagcgggccagtgccgctgactgcctccagcacccctggctcaacccctaggccc

SEQ ID NO: 186362 - DNA, 1863 bp, Homo sapiens
  Payload ID: 16697
  Gene Symbol: SRPK3
  Gene Name: SRSF protein kinase 3
  ENST ID: ENST00000370108
  CDS Start-End: 49-1653
acaggagcagccgcccggggcaccggagctgcgggctgcgtggccgggatgagcgccagcacgggcggtggtggggacagcggcggcagcggcggcagtagcagcagctcacaggcctcctgcgggcccgagtcctcgggctccgaactagccctggccacaccggtgcctcagatgctgcagggccttctgggctccgacgacgaggaacaggaagaccccaaagactactgcaagggcggctaccaccctgtgaagatcggcgacgtgttcaatgggcggtaccacgtggtgcgcaaactgggctggggccacttctccaccgtctggctctgctgggacatccagcgcaagcgctttgtggccctcaaagtggtgaagagtgcggggcattacacggagacagctgtggatgagatcaagctcctgaaatgtgtccgggacagcgaccccagtgaccccaaaagagagaccattgtccagctcattgatgacttcaggatctcaggagtcaatggagtccatgtgtgcatggtgctggaggtgctgggccaccagctcctcaaatggatcatcaagtccaactaccagggcctgcccgtgccctgcgtgaagagcatcgtgaggcaggtgctgcacggcctggactacctccacaccaagtgcaagatcatccacacggacatcaagcccgagaacatcttgctgtgtgtgggggacgcttacatcaggcgcctggctgccgaggccacggagtggcaacaggcaggggcgccgcccccctcccgctccatagtcagcactgccccccaggaggtcttgaccggtaagctgtccaaaaacaagaggaagaagatgaggcgcaaacggaaacagcagaagcggctgctggaggagcggctgcgggacctgcagaggctggaggccatggaggctgccacccaggctgaggactctggcttgagactagacgggggcagcggctccacatcctcttcaggctgcttctccggctccctcttctctcctgcctcctgctccatcctctccggctcgtccaatcagcgagagaccgggggcctcctgtcgcctagcacaccattcggtgcctcgaacctcctggtgaaccccctggagccccaaaatgcagataagatcaagatcaagatcgcagacctgggcaacgcctgctgggtgcacaagcacttcacggaagacatccagactcggcagtaccgggccgtcgaggtgctgatcggcgccgaatacggccccccggcagacatctggagcacagcctgcatggccttcgagctggccactggtgactacctgttcgagccgcattctggagaagactacagtcgtgatgaggaccacatcgctcacatagtggagcttctgggggacatccccccagccttcgccctctcaggccgctattcccgggagttcttcaaccggagaggagagctgcggcacatccacaatctcaagcactggggcctgtacgaggtactcatggaaaagtacgagtggcccctagagcaggccacacagttcagcgcctttctgctgcccatgatggagtacatccccgaaaagcgggccagtgccgctgactgcctccagcacccctggctcaacccctaggcccggctgtggctccacctccagctctccgtgccttaagggaaaagcgggacagctcccaccaccctgctgggcgccagttctccacaaccacagggcagagagacgctggagccaggcccggctctcagagcgtgttctgcctgagacccccgtgagggctctcggagaaagtgtgtgtattcctttcttaataaagtgtggactgaa

SEQ ID NO: 186363 - DNA, 1900 bp, Homo sapiens
  Payload ID: 16697
  Gene Symbol: SRPK3
  Gene Name: SRSF protein kinase 3
  Uniprot ID: Q9UPE1
  ENST ID: ENST00000393786
  CDS Start-End: 87-1688
ggccaaggctataaattcgcaggccgcggccgggccccacaggagcagccgcccggggcaccggagctgcgggctgcgtggccgggatgagcgccagcacgggcggtggtggggacagcggcggcagcggcggcagtagcagcagctcacaggcctcctgcgggcccgagtcctcgggctccgaactagccctggccacaccggtgcctcagatgctgcagggccttctgggctccgacgacgaggaacaggaagaccccaaagactactgcaagggcggctaccaccctgtgaagatcggcgacgtgttcaatgggcggtaccacgtggtgcgcaaactgggctggggccacttctccaccgtctggctctgctgggacatccagcgcaagcgctttgtggccctcaaagtggtgaagagtgcggggcattacacggagacagctgtggatgagatcaagctcctgaaatgtgtccgggacagcgaccccagtgaccccaaaagagagaccattgtccagctcattgatgacttcaggatctcaggagtcaatggagtccatgtgtgcatggtgctggaggtgctgggccaccagctcctcaaatggatcatcaagtccaactaccagggcctgcccgtgccctgcgtgaagagcatcgtgaggcaggtgctgcacggcctggactacctccacaccaagtgcaagatcatccacacggacatcaagcccgagaacatcttgctgtgtgtgggggacgcttacatcaggcgcctggctgccgaggccacggagtggcaacaggcaggggcgccgcccccctcccgctccatagtcagcactgccccccaggaggtcttgaccggtaagctgtccaaaaacaagaggaagaagatgaggcgcaaacggaaacagcagaagcggctgctggaggagcggctgcgggacctgcagaggctggaggccatggaggctgccacccaggctgaggactctggcttgagactagacgggggcagcggctccacatcctcttcaggcttctccggctccctcttctctcctgcctcctgctccatcctctccggctcgtccaatcagcgagagaccgggggcctcctgtcgcctagcacaccattcggtgcctcgaacctcctggtgaaccccctggagccccaaaatgcagataagatcaagatcaagatcgcagacctgggcaacgcctgctgggtgcacaagcacttcacggaagacatccagactcggcagtaccgggccgtcgaggtgctgatcggcgccgaatacggccccccggcagacatctggagcacagcctgcatggccttcgagctggccactggtgactacctgttcgagccgcattctggagaagactacagtcgtgatgaggaccacatcgctcacatagtggagcttctgggggacatccccccagccttcgccctctcaggccgctattcccgggagttcttcaaccggagaggagagctgcggcacatccacaatctcaagcactggggcctgtacgaggtactcatggaaaagtacgagtggcccctagagcaggccacacagttcagcgcctttctgctgcccatgatggagtacatccccgaaaagcgggccagtgccgctgactgcctccagcacccctggctcaacccctaggcccggctgtggctccacctccagctctccgtgccttaagggaaaagcgggacagctcccaccaccctgctgggcgccagttctccacaaccacagggcagagagacgctggagccaggcccggctctcagagcgtgttctgcctgagacccccgtgagggctctcggagaaagtgtgtgtattcctttcttaataaagtgtggactgaaca

SEQ ID NO: 186364 - DNA, 614 bp, Homo sapiens
  Payload ID: 16697
  Gene Symbol: SRPK3
  Gene Name: SRSF protein kinase 3
  ENST ID: ENST00000430541
  CDS Start-End: 1-614
cagcggcggcagcggcggcagtagcagcaggtagggctcggctggggcacccggagcccctggcgtctctcatgcccactgccactcaccccacccgcagctcacaggcctcctgcgggcccgagtcctcgggctccgaactagccctggccacaccggtgcctcagatgctgcagggccttctgggctccgacgacgaggaacaggaagaccccaaagactactgcaagggcggctaccaccctgtgaagatcggcgacgtgttcaatgggcggtaccacgtggtgcgcaaactgggctggggccacttctccaccgtctggctctgctgggacatccagcgcaagcgctttgtggccctcaaagtggtgaagagtgcggggcattacacggagacagctgtggatgagatcaagctcctgaaatgtgtccgggacagcgaccccagtgaccccaaaagagagaccattgtccagctcattgatgacttcaggatctcaggagtcaatggagtccatgtgtgcatggtgctggaggtgctgggccaccagctcctcaaatggatcatcaagtccaactaccagggcctgcccgtgccctgcgtgaagagcatc

SEQ ID NO: 186365 - DNA, 386 bp, Homo sapiens
  Payload ID: 16697
  Gene Symbol: SRPK3
  Gene Name: SRSF protein kinase 3
  ENST ID: ENST00000458681
  CDS Start-End: 1-386
gacagccttggccccagcccgtccccagggctccccttgcttccagcacaagcacttcacggaagacatccagactcggcagtaccgggccgtcgaggtgctgatcggcgccgaatacggccccccggcagacatctggagcacagcctgcatggccttcgagctggccactggtgactacctgttcgagccgcattctggagaagactacagtcgtgatgaggaccacatcgctcacatagtggagcttctgggggacatccccccagccttcgccctctcaggccgctattcccgggagttcttcaaccggagaggagagctgcggcacatccacaatctcaagcactggggcctgtacgaggtactcatggaaaagtacgagt

SEQ ID NO: 186366 - DNA, 4479 bp, Homo sapiens
  Payload ID: 16697
  Gene Symbol: SRPK3
  Gene Name: SRSF protein kinase 3
  ENST ID: ENST00000489426
  CDS Start-End: 2367-4271
gtgacccaaaaccactggaagagactcaacaccttgcaacactacaaggtcccagatggagcaacagtggggctcgtccctcagctgcaccgtggcagcaccatctcccagagcctggcccagaggtgccccttgggagagaacatacccacgctggaggatggcgaggaggggggggtgtgcctctggcacctggtgaaagccaccgaggagccagaaggggccaaggtgcggtgcagcagcctgcgggagcgcgagccagcaagggccaaggccattccggaaatctacctcacccgtctgctgtccatgaagggcacgctgcagaagtttgtggacgacaccttccaggccattctcagcgtgaaccggcccatccccatcgccgtcaagtacctgtttgaccttctggatgagctagcagagaagcacggcatcgaggacccagggaccctgcacatctggaagaccaacagtctgctgctgcggttctgggtgaatgccttgaagaacccacagctcatctttgatgtacgggtgtcggacaatgtggacgccatccttgctgtcatcgcccagaccttcattgactcctgtaccacctcggagcataaagtgggccgggtgagagcagtgccagcagcagcagctggcaggggcttgaggaggaaaggcttatgggggaagcctagagggctgtgcacagagctctgggtgggcagtggcagcatcatgggggcaccttcacctccgagctcatgcctagcgcctcccctccctccggagcaggattccccagtgaacaaactgctctacgcccgggagatcccacgctacaagcagatggtggagaggtgggtgtcagaggcatcggggctgcggggaagggggctgccccacccctaacgaagtctgctcctccaggtactatgcggacattcgccagagctctccggcgagctaccaggagatgaactctgctttggctgagctctccgggaactacacttctgctccccactgtctggaggctctgcaagaactctacaaccacatccacaggtactatgatcagattatcagtgccctggaggaggaccctgtgggccagaagctgcagctggcctgccgcctgcagcaggtcgccgccctggtggaaaacaaagtgactgacctgtgagctctggctcagacagcagcaagccggatccaccaacaccgcagcgccttatgaccccggaaccgagccagccactgaggggagctggcagagcctgggggcacagggtgcaaagccaggcactgtgcccagcagtgggctccctgcctgccacctcccctgccagcccacccaccttccccccacctgagattgtttctaatttataaggatccccctccttccccctctccccattgtatttatttgcctgctggaaaatcacatccggaaataaaatagaaatatgtctttttattttattttgagacggagtctcgctctctctcccaggctggagtgcagtggcgcaatctcggctcactgcaacctctttttcccggagttcaagcaattctcctgcctcagcctcccgagtagctgggactacaggcgtgtgccaccacacccgactaattttggtatttttagtaaagacagggtttccccatgtcggacaggctggtctcaaaactcctgacttcaggtgatctgcccgcctcagcctcccaaagtgctgggatcacaggcatgagccaccgcgcctggccagaaatgtcttttgacaaagggcccaatccccagcccctgctgttccctgcaggagctgactcagtgctctcctgactgagagtccctcagccccatgcctataacctgctacccacagacaaagagaggccatcaggtacccgggcttcactttccctcccactctctgacctcgctggcccctccagcaatgcctggcccacccctaccagttcacggaccctggtacagggacactgcaccaatatcttgggacaaacaccctctctgccgagccccctccctttcattgggactcctctgtcaggccccagctggcctcccggctccaccctcgcctctccattcccttgtccttgaagtggccagagtgatcttttgctgagcagaagctcagtgaccaccccccaaccccatatcacccaagctccacattaagcctacagacaccaggcctctagtcctcgccctcgaaccatgcggcagccgtggccagcacgtgaagggctggaacgcgtcttggccgcaggccttgccccactgtgccctgtgctgccctggatgcttctggggacccaatttctcctggtctctcatgatgcagcccctgggtcacaggcccctcagtcaccaccgcactcatggggaagtggctatgggcttgcttgtccccagcagtgagcagcttcctgctgcctccctcatgtctggctatggagcagcccacgacaggcaccttgcaaatggtggagaggaagagcaggcgctgggagccagagcgccaggcagcgtcgcaggagcaggttctgggctggcaagctcccaggcctcccctcagcaggcctgttgcctctgctcacaggcctcctgcgggcccgagtcctcgggctccgaactagccctggccacaccggtgcctcagatgctgcagggccttctgggctccgacgacgaggaacaggaagaccccaaagactactgcaagggcggctaccaccctgtgaagatcggcgacgtgttcaatgggcggtaccacgtggtgcgcaaactgggctggggccacttctccaccgtctggctctgctgggacatccagcgcaagcgctttgtggccctcaaagtggtgaagagtgcggggcattacacggagacagctgtggatgagatcaagctcctgaaatgtgtccgggacagcgaccccagtgaccccaaaagagagaccattgtccagctcattgatgacttcaggatctcaggagtcaatggagtccatgtgtgcatggtgctggaggtgctgggccaccagctcctcaaatggatcatcaagtccaactaccagggcctgcccgtgccctgcgtgaagagcatcgtgaggcaggtgctgcacggcctggactacctccacaccaagtgcaagatcatccacacggacatcaagcccgagaacatcttgctgtgtgtgggggacgcttacatcaggcgcctggctgccgaggccacggagtggcaacaggcaggggcgccgcccccctcccgctccatagtcagcactgccccccaggaggtcttgcagaccggtaagctgtccaaaaacaagaggaagaagatgaggcgcaaacggaaacagcagaagcggctgctggaggagcggctgcgggacctgcagaggctggaggccatggaggctgccacccaggctgaggactctggcttgagactagacgggggcagcggctccacatcctcttcaggctgtcaccccgggggcgccagagcaggtccctccccagcctcttcctcccccgccccagggggcggccgtagcctcagcgcgggctcacagacctcaggcttctccggctccctcttctctcctgcctcctgctccatcctctccggctcgtccaatcagcgagagaccgggggcctcctgtcgcctagcacaccattcggtgcctcgaacctcctggtgaaccccctggagccccaaaatgcagataagatcaagatcaagatcgcagacctgggcaacgcctgctgggtgcacaagcacttcacggaagacatccagactcggcagtaccgggccgtcgaggtgctgatcggcgccgaatacggccccccggcagacatctggagcacagcctgcatggccttcgagctggccactggtgactacctgttcgagccgcattctggagaagactacagtcgtgatgaggaccacatcgctcacatagtggagcttctgggggacatccccccagccttcgccctctcaggccgctattcccgggagttcttcaaccggagaggagagctgcggcacatccacaatctcaagcactggggcctgtacgaggtactcatggaaaagtacgagtggcccctagagcaggccacacagttcagcgcctttctgctgcccatgatggagtacatccccgaaaagcgggccagtgccgctgactgcctccagcacccctggctcaacccctaggcccggctgtggctccacctccagctctccgtgccttaagggaaaagcgggacagctcccaccaccctgctgggcgccagttctccacaaccacagggcagagagacgctggagccaggcccggctctcagagcgtgttctgcctgagacccccgtgagggctctcggagaaagtgtgtgtattcctttcttaataaagtgtggactg

SEQ ID NO: 186367 - DNA, 2842 bp, Homo sapiens
  Payload ID: 16698
  Gene Symbol: SOX1
  Gene Name: SRY (sex determining region Y)-box 1
  Uniprot ID: O00570
  ENST ID: ENST00000330949
  CDS Start-End: 13-1188
ccagccgccccgatgtacagcatgatgatggagaccgacctgcactcgcccggcggcgcccaggcccccacgaacctctcgggccccgccggggcgggcggcggcgggggcggaggcgggggcggcggcggcggcgggggcgccaaggccaaccaggaccgggtcaaacggcccatgaacgccttcatggtgtggtcccgcgggcagcggcgcaagatggcccaggagaaccccaagatgcacaactcggagatcagcaagcgcctgggggccgagtggaaggtcatgtccgaggccgagaagcggccgttcatcgacgaggccaagcggctgcgcgcgctgcacatgaaggagcacccggattacaagtaccggccgcgccgcaagaccaagacgctgctcaagaaggacaagtactcgctggccggcgggctcctggcggccggcgcgggtggcggcggcgcggctgtggccatgggcgtgggcgtgggcgtgggcgcggcggccgtgggccagcgcctggagagcccaggcggcgcggcgggcggcggctacgcgcacgtcaacggctgggccaacggcgcctaccccggctcggtggcggcggcggcggcggccgcggccatgatgcaggaggcgcagctggcctacgggcagcacccgggcgcgggcggcgcgcacccgcacgcgcaccccgcgcacccgcacccgcaccacccgcacgcgcacccgcacaacccgcagcccatgcaccgctacgacatgggcgcgctgcagtacagccccatctccaactcgcagggctacatgagcgcgtcgccctcgggctacggcggcctcccctacggcgccgcggccgccgccgccgccgctgcgggcggcgcgcaccagaactcggccgtggcggcggcggcggcggcggcggccgcgtcgtcgggcgccctgggcgcgctgggctctctggtgaagtcggagcccagcggcagcccgcccgccccagcgcactcgcgggcgccgtgccccggggacctgcgcgagatgatcagcatgtacttgcccgccggcgaggggggcgacccggcggcggcagcagcggccgcggcgcagagccggctgcactcgctgccgcagcactaccagggcgcgggcgcgggcgtgaacggcacggtgcccctgacgcacatctagcgccttcgggacgccggggactctgcggcggcgacccacgagctcgcggcccgcgcccggctcccgccccgccccggcgcggcgtggcttttgtacagacgttcccacattcttgtcaaaaggaaaatactggagacgaacgccgggtgacgcgtgtcccccactcaccttccccggagaccctggcgaccgccgggcgctgacaccagacttgggttttagactgaacttcggtgttttcttgagactttttgtacagtatttatcacctacggaggaagcggaaagcgttttctttgctcgaggggacaaaaaagtcaaaacgaggcgagaggcgaagcccacttttgtataccggccggcgcgctcactttcctccgcgttgcttccggacggcgccgaccgccggagcccaagtgacgcggagctcgtcgcatttgttataaatgtagtaaggcaggtccaagcacttacaagttttttgtagttgttaccgctcttttgggttggtttgttaatttatacaaagagattaccaccaccaccccctccttcagacggcggagttatattctgggttttgtaaaactttatgtatctgagcatttccatttttttttttgggttttgtattatttcttgtaaatgcattgtgaaaaattttattttcggcgttgcaatgcggggaggagaagtcagattatgtacatagttttctaaaaagcctttcttctaaaaacgaaaaaagaccccccacccaaaatgtttcgagtcaacaaatttaagagacagagcccattttctccataaatttgtaacatgctatttttatgtgcatgttttatgagttcaaaatgcaatgaggaaatctgacagggaaattatctgtatgaactaaaagtaagggaaccccggggaatgggaggacaggatttttcaaggaacctttttcaatgaaagagaaggaagttaaaacctataggttattttgtagagctgagtgttaatacgggccgagaaataaaagtatcttctgctccggctgtttcactgcggacggctggggctgctgcgcgttaccttgctgcaagcggggcgccttccacctggctgggggtctgcgccacagtttggtccagaggagggaggaggaagggaagaccccagtggtgggaccctggaccaggccatggatgaaggacaaagaccagggcaggtcacgggtttcccaattccccagcaattaagatttcgagcagaatttatctaaatgtgtttcaaggaaacacaatcgctgaaccaaaacgtactgcagccgagccccctccgtccatcctctgcccctccccctggcttctttctcttgggaaaacgggcaaaataattgtgctggattctcacacacacagaaatatcgaccatcaccctcccccgcgtgaactgggatgcaagttgctaaccgatgtgaacgcaaaatgccttgttcattattcctgacgagatcttgaggttgtttgatgctttaaattttttaattatattattttctaggtgtttattggtacattgcagttttttttttgaaatttaaaaatttctgtaaaactttgtcttcaagtaatctgacagcattaaatattgcatttaaaaatta

SEQ ID NO: 186368 - DNA, 2861 bp, Homo sapiens
  Payload ID: 16699
  Gene Symbol: SOX10
  Gene Name: SRY (sex determining region Y)-box 10
  Uniprot ID: P56693
  ENST ID: ENST00000360880
  CDS Start-End: 266-1666
ggggggtgaagggtcactgctgaccggaggcagctctgccaggcagtgtcatcagtgggcttcacgtttgactgacagcccaccagcgtcacctcccagccccgagctggaccgcacaccttgggacacggttttccacttcctaaggacgagccccagactggaggagaggtccgaggaggtgggcgttggactctttgcgaggaccccggcggctggcccgggggaggcggccgaggcggcggcggcggcggccgggggcgacatggcggaggagcaggacctatcggaggtggagctgagccccgtgggctcggaggagccccgctgcctgtccccggggagcgcgccctcgctagggcccgacggcggcggcggcggatcgggcctgcgagccagcccggggccaggcgagctgggcaaggtcaagaaggagcagcaggacggcgaggcggacgatgacaagttccccgtgtgcatccgcgaggccgtcagccaggtgctcagcggctacgactggacgctggtgcccatgcccgtgcgcgtcaacggcgccagcaaaagcaagccgcacgtcaagcggcccatgaacgccttcatggtgtgggctcaggcagcgcgcaggaagctcgcggaccagtacccgcacctgcacaacgctgagctcagcaagacgctgggcaagctctggaggctgctgaacgaaagtgacaagcgccccttcatcgaggaggctgagcggctccgtatgcagcacaagaaagaccacccggactacaagtaccagcccaggcggcggaagaacgggaaggccgcccagggcgaggcggagtgccccggtggggaggccgagcaaggtgggaccgccgccatccaggcccactacaagagcgcccacttggaccaccggcacccaggagagggctcccccatgtcagatgggaaccccgagcacccctcaggccagagccatggcccacccacccctccaaccaccccgaagacagagctgcagtcgggcaaggcagacccgaagcgggacgggcgctccatgggggagggcgggaagcctcacatcgacttcggcaacgtggacattggtgagatcagccacgaggtaatgtccaacatggagacctttgatgtggctgagttggaccagtacctgccgcccaatgggcacccaggccatgtgagcagctactcagcagccggctatgggctgggcagtgccctggccgtggccagtggacactccgcctggatctccaagccaccaggcgtggctctgcccacggtctcaccacctggtgtggatgccaaagcccaggtgaagacagagaccgcggggccccaggggcccccacactacaccgaccagccatccacctcacagatcgcctacacctccctcagcctgccccactatggctcagccttcccctccatctcccgcccccagtttgactactctgaccatcagccctcaggaccctattatggccactcgggccaggcctctggcctctactcggccttctcctatatggggccctcgcagcggcccctctacacggccatctctgaccccagcccctcagggccccagtcccacagccccacacactgggagcagccagtatatacgacactgtcccggccctaaagggggccctgtcgccaccaccccccgcccagcccctgcccccagcctgtgtgccctgttccttgcccacctcaggcctggtggtggcagtggaggaggctgaggaggctgaagaggctgacaggtcggggggctttctgtctggctcactgccctgatgacccacccgccccatccaggctccagcagcaaagccccaggagaacaggctggacagaggagaaggaggttgactgttgcacccacactgaaagatgaggggctgcaccttcccccaggaatgaccctctatcccaggacctgagaagggcctgctcaccctcctcggggaggggaagcaccagggttggtggcatcggaggccttaccactcctatgactcctgttttctctctcacagatagtgagggtctgacatgcccatgccacctatgccacagtgcctaagggctaggccacccagagactgtgcccggagctggccgtgtctcccactcaggggctgagagtagctttgaggagcctcattggggagtggggggttcgagggacttagtggagttctcatcccttcaatgccccctccctttctgaaggcaggaaggagttggcacagaggccccctgatccaattctgtgccaataacctcattctttgtctgagaaacagcccccagtcctcctccactacaacctccatgaccttgagacgcatcccaggaggtgacgaggcaggggctccaggaaaggaatcagagacaattcacagagcctccctccctgggctccttgccagctccctcttcccttactaggctctatggcccctgctcagtcagccccactccctgggcttcccagagagtgacagctgctcaggccctaacccttggctccaggagacacagggcccagcacccaggttgctgtcggcaggctgaagacactagaatcctgacctgtacattctgcccttgcctcttaccccttgcctcccagtggtatttgaataaagtatgtagctatatctgcccctattttcctgttctgcagccccccaaatccacatgtaactcattactgtctcctgttatttatctcagtagtcccctctcctagccactctagcccctattaactctgcattaagcattccacataataaaattaaaggttccggttacctgcttggtga

SEQ ID NO: 186369 - DNA, 2879 bp, Homo sapiens
  Payload ID: 16699
  Gene Symbol: SOX10
  Gene Name: SRY (sex determining region Y)-box 10
  Uniprot ID: P56693
  ENST ID: ENST00000396884
  CDS Start-End: 284-1684
gggctgtccggccagggtggttggtggtaaggattcaggctccgtcctaacgaggccgtggcctgaggctcagggccccccgcccctccctcccagcccaccagcgtcacctcccagccccgagctggaccgcacaccttgggacacggttttccacttcctaaggacgagccccagactggaggagaggtccgaggaggtgggcgttggactctttgcgaggaccccggcggctggcccgggggaggcggccgaggcggcggcggcggcggccgggggcgacatggcggaggagcaggacctatcggaggtggagctgagccccgtgggctcggaggagccccgctgcctgtccccggggagcgcgccctcgctagggcccgacggcggcggcggcggatcgggcctgcgagccagcccggggccaggcgagctgggcaaggtcaagaaggagcagcaggacggcgaggcggacgatgacaagttccccgtgtgcatccgcgaggccgtcagccaggtgctcagcggctacgactggacgctggtgcccatgcccgtgcgcgtcaacggcgccagcaaaagcaagccgcacgtcaagcggcccatgaacgccttcatggtgtgggctcaggcagcgcgcaggaagctcgcggaccagtacccgcacctgcacaacgctgagctcagcaagacgctgggcaagctctggaggctgctgaacgaaagtgacaagcgccccttcatcgaggaggctgagcggctccgtatgcagcacaagaaagaccacccggactacaagtaccagcccaggcggcggaagaacgggaaggccgcccagggcgaggcggagtgccccggtggggaggccgagcaaggtgggaccgccgccatccaggcccactacaagagcgcccacttggaccaccggcacccaggagagggctcccccatgtcagatgggaaccccgagcacccctcaggccagagccatggcccacccacccctccaaccaccccgaagacagagctgcagtcgggcaaggcagacccgaagcgggacgggcgctccatgggggagggcgggaagcctcacatcgacttcggcaacgtggacattggtgagatcagccacgaggtaatgtccaacatggagacctttgatgtggctgagttggaccagtacctgccgcccaatgggcacccaggccatgtgagcagctactcagcagccggctatgggctgggcagtgccctggccgtggccagtggacactccgcctggatctccaagccaccaggcgtggctctgcccacggtctcaccacctggtgtggatgccaaagcccaggtgaagacagagaccgcggggccccaggggcccccacactacaccgaccagccatccacctcacagatcgcctacacctccctcagcctgccccactatggctcagccttcccctccatctcccgcccccagtttgactactctgaccatcagccctcaggaccctattatggccactcgggccaggcctctggcctctactcggccttctcctatatggggccctcgcagcggcccctctacacggccatctctgaccccagcccctcagggccccagtcccacagccccacacactgggagcagccagtatatacgacactgtcccggccctaaagggggccctgtcgccaccaccccccgcccagcccctgcccccagcctgtgtgccctgttccttgcccacctcaggcctggtggtggcagtggaggaggctgaggaggctgaagaggctgacaggtcggggggctttctgtctggctcactgccctgatgacccacccgccccatccaggctccagcagcaaagccccaggagaacaggctggacagaggagaaggaggttgactgttgcacccacactgaaagatgaggggctgcaccttcccccaggaatgaccctctatcccaggacctgagaagggcctgctcaccctcctcggggaggggaagcaccagggttggtggcatcggaggccttaccactcctatgactcctgttttctctctcacagatagtgagggtctgacatgcccatgccacctatgccacagtgcctaagggctaggccacccagagactgtgcccggagctggccgtgtctcccactcaggggctgagagtagctttgaggagcctcattggggagtggggggttcgagggacttagtggagttctcatcccttcaatgccccctccctttctgaaggcaggaaggagttggcacagaggccccctgatccaattctgtgccaataacctcattctttgtctgagaaacagcccccagtcctcctccactacaacctccatgaccttgagacgcatcccaggaggtgacgaggcaggggctccaggaaaggaatcagagacaattcacagagcctccctccctgggctccttgccagctccctcttcccttactaggctctatggcccctgctcagtcagccccactccctgggcttcccagagagtgacagctgctcaggccctaacccttggctccaggagacacagggcccagcacccaggttgctgtcggcaggctgaagacactagaatcctgacctgtacattctgcccttgcctcttaccccttgcctcccagtggtatttgaataaagtatgtagctatatctgcccctattttcctgttctgcagccccccaaatccacatgtaactcattactgtctcctgttatttatctcagtagtcccctctcctagccactctagcccctattaactctgcattaagcattccacataataaaattaaaggttccggttacctgcttggtga

SEQ ID NO: 186370 - DNA, 1095 bp, Homo sapiens
  Payload ID: 16699
  Gene Symbol: SOX10
  Gene Name: SRY (sex determining region Y)-box 10
  ENST ID: ENST00000446929
  CDS Start-End: 1-539
accagtacccgcacctgcacaacgctgagctcagcaagacgctgggcaagctctggaggctgctgaacgaaagtgacaagcgccccttcatcgaggaggctgagcggctccgtatgcagcacaagaaagaccacccggactacaagtaccagcccaggcggcggaagaacgggaaggccgcccagggcgaggcggagtgccccggtggggaggccgagcaaggtgggaccgccgccatccaggcccactacaagagcgcccacttggaccaccggcacccaggagagggctcccccatgtcagatgggaaccccgagcacccctcaggccagagccatggcccacccacccctccaaccaccccgaagacagagctgcagtcgggcaaggcagacccgaagcgggacgggcgctccatgggggagggcgggaagcctcacatcgacttcggcaacgtggacattggtgagatcagccacgagatggggaaactgaagtttgcgaggctgatgctaagaagtgctggtgccagaatctgaacccagctctgactccaaggcttgcatttttaaccatcatcccctccacctgcctgtggtttgcagcccctgcttctgctttgtatctggagcaatgcatcttccactgctccagactgggcatcctcagctcccttccttccatctgcggtctccagcccctagtcaggaccaggggagaggcagggcaccaagaagtagcccagtccccagggtggccaaaatccctccatctaggacctgcatcatggaagctcttcaagcaacctccccaaaactgctggttcccgtgaagctggatggtaaccgaaaccccgatcttttagacaatatccattgcaaagtcatatccaaattgtatgtatgctgtttttgttttgttttagataaaagcaggactttacactgatctttaacagatctcaccttgttgggtttgacccatttccccacctgtattaaactttttagaacttagctctcctttagagctttatgtatctgcaaacttgaatagcctcattcaagtcactaataaaggtcgaaatgaagaggg

SEQ ID NO: 186371 - DNA, 873 bp, Homo sapiens
  Payload ID: 16699
  Gene Symbol: SOX10
  Gene Name: SRY (sex determining region Y)-box 10
  ENST ID: ENST00000427770
  CDS Start-End: 233-873
ccgaggaggtgagtgcgcagcctgctcctccctggcccgcccaggcctgggaccctgctgtgaggtggagagaggcgacaccccgcccttgccccccacctggctctcctctaaaccccgttggggcaggctgagggaagaaggaaaggtgggcgttggactctttgcgaggaccccggcggctggcccgggggaggcggccgaggcggcggcggcggcggccgggggcgacatggcggaggagcaggacctatcggaggtggagctgagccccgtgggctcggaggagccccgctgcctgtccccggggagcgcgccctcgctagggcccgacggcggcggcggcggatcgggcctgcgagccagcccggggccaggcgagctgggcaaggtcaagaaggagcagcaggacggcgaggcggacgatgacaagttccccgtgtgcatccgcgaggccgtcagccaggtgctcagcggctacgactggacgctggtgcccatgcccgtgcgcgtcaacggcgccagcaaaagcaagccgcacgtcaagcggcccatgaacgccttcatggtgtgggctcaggcagcgcgcaggaagctcgcggaccagtacccgcacctgcacaacgctgagctcagcaagacgctgggcaagctctggaggctgctgaacgaaagtgacaagcgccccttcatcgaggaggctgagcggctccgtatgcagcacaagaaagaccacccggactacaagtaccagcccaggcggcggaagaacgggaaggccgcccagggcgaggcggagtgccccggtggggaggccgagcaaggtgggaccgccgccatccaggcccactacaagagcgcccacttggacca

SEQ ID NO: 186372 - DNA, 8719 bp, Homo sapiens
  Payload ID: 16700
  Gene Symbol: SOX11
  Gene Name: SRY (sex determining region Y)-box 11
  Uniprot ID: P35716
  ENST ID: ENST00000322002
  CDS Start-End: 56-1381
acctccgcacgagacccagcggcccgggttggagcgtccagccctgcagcggatcatggtgcagcaggcggagagcttggaagcggagagcaacctgccccgggaggcgctggacacggaggagggcgaattcatggcttgcagcccggtggccctggacgagagcgacccagactggtgcaagacggcgtcgggccacatcaagcggccgatgaacgcgttcatggtatggtccaagatcgaacgcaggaagatcatggagcagtctccggacatgcacaacgccgagatctccaagaggctgggcaagcgctggaaaatgctgaaggacagcgagaagatcccgttcatccgggaggcggagcggctgcggctcaagcacatggccgactaccccgactacaagtaccggccccggaaaaagcccaaaatggacccctcggccaagcccagcgccagccagagcccagagaagagcgcggccggcggcggcggcgggagcgcgggcggaggcgcgggcggtgccaagacctccaagggctccagcaagaaatgcggcaagctcaaggcccccgcggccgcgggcgccaaggcgggcgcgggcaaggcggcccagtccggggactacgggggcgcgggcgacgactacgtgctgggcagcctgcgcgtgagcggctcgggcggcggcggcgcgggcaagacggtcaagtgcgtgtttctggatgaggacgacgacgacgacgacgacgacgacgagctgcagctgcagatcaaacaggagccggacgaggaggacgaggaaccaccgcaccagcagctcctgcagccgccggggcagcagccgtcgcagctgctgagacgctacaacgtcgccaaagtgcccgccagccctacgctgagcagctcggcggagtcccccgagggagcgagcctctacgacgaggtgcgggccggcgcgacctcgggcgccgggggcggcagccgcctctactacagcttcaagaacatcaccaagcagcacccgccgccgctcgcgcagcccgcgctgtcgcccgcgtcctcgcgctcggtgtccacctcctcgtccagcagcagcggcagcagcagcggcagcagcggcgaggacgccgacgacctgatgttcgacctgagcttgaatttctctcaaagcgcgcacagcgccagcgagcagcagctggggggcggcgcggcggccgggaacctgtccctgtcgctggtggataaggatttggattcgttcagcgagggcagcctgggctcccacttcgagttccccgactactgcacgccggagctgagcgagatgatcgcgggggactggctggaggcgaacttctccgacctggtgttcacatattgaaaggcgcccgctgctcgctctttctctcggagggtgcagagctgggttccttgggaggaagttgtagtggtgatgatgatgatgataatgatgatgatgatggtggtgttgatggtggcggtggtagggtggaggggagagaagaagatgctgatgatattgataagatgtcgtgacgcaaagaaattggaaaacatgatgaaaattttggtggagttaaagtgaaatgagtagtttttaaacatttttcctgtcctttttttgtcccccctcccttcctttatcgtgtctcaaggtagttgcatacctagtctggagttgtgattattttcccaaaaaatgtgtttttgtaattactatttctttttcctgaaattcgtgattgcaacaaaggcagagggggcggggcgggggaggggaggtaggacccgctccggaaggcgctgtttgaagcttgtcggtctttgaagtctggaagacgtctgcagaggacccttttggcagcacaactgttactctagggagttggtggagatatttttttttcttaagagaacttaaagaactggtgatttttttttaacaaaaaaagggaccattgcaacttttgttaatttaattttttttttttttttttttttttttttttttggagggagaaaactgatgtcttctatgcatccgattcttaacaaaactgcagggagcttgaaaaaatgcagactgtacaaacgcttacaaaaaaaaaaactgtgaactgacttaagatcagagtttacttttcagatcaaattgtttatggttttacaaatgtgatttctacttgccaactttttttttgtaacttgttcccttatacctccttgattgaataccagacagcctagacctcagtacaaaaggtattgaaacatttttgatacataacagacctcagtcttttttaaaaattaatatattttcaggcgtatttttgtacagtgaaaagggaacattcttgctgtgttttttcagtaagactttcaggcacttcttcccttttgatttcttttttttcctctgttttttagcatgcaagtatgttggtacgttatgtcctggtttaaaaaggattaaaattttaaaataatccttgcatctaaaggccttgtggtttaaaaaaaaaaagcaaacttttttttgtacagctatagtagagatttgttcaatatttgtaggtaaagatttattgaaaatggtgatatagacctcagagctgttatcttagtttaaagattgtatatgtactgtactatagtaggactttatgtatctcatacgctgtgatgtggatggggccccagatggaaggtttgaaactggattctcgatttttagcaaaaaagaaaaaaaaaaggcacatagtttaaaaagtttctcattttgtgcaatataatctaaataaagtacagaccatctgcatattttgtagcaaatggtggcaaagcagactcaatgcactgtcgacatcattgcctgtttttttttttttttttttgtgctggaagtctgtatcttgacaattttaataaatcagctggaactgatagaaactcgcatcgccaatagtctctatggaagtcaaactggaggtcctgttgtcgcagagcattcggtggtgaggctgttgtgtgcgcggatgaggggaggtggcaggagagaattctacatttagggggttaggctgaaaagtgttcaattagcaggctgatttctttttcctcttccgctagttgtgaaagacaggggaagggtgttctttctctctgccctccctttccatctccagctccccatttcctttctcacctcctcctccactccctgcctcttctccccacccatcctggcgggcgggctgcgcggaggctcgggagctggccggggaggggcggatggaggggcctgggttgccagctcccttggtcggggtcctgctcgctggggcttgtgtgttctctgcggcgggccgcgtccccgctgagcctcgcggtgacagccgcctttggcagcgagcgctcggggcacttctatccccgcctctcaaagggtggggacagccgtttccagatttgaattttttctgttctttatttttaacgctgcatcttcgcgtgtgctcagaggtggttgttggcggagaacgccgccgcagtgtttgacctctagcggtgaagggggaaggggaagaggaaaggagagaagtggtcggtgtctgtttccttctgtcccccggggccgtggagctgtcggagggaaggaggacggtgcggggccgcagggggcgcggggcgcggcgggacccaggctacgagcgggagggaggcgggagtcgggggaagacgcggcaggccggccgagggcaccccgaggaacatggcatggcctctgtgcgatccgagtcgcggtctccggggtgcctgggagggccgaaccactggtgagggcgtggggagcagggggtggcagagggcacccgggcggtagtccgggacgcgcaaggcagagccctgacgctccgggtccccgtgcctggctcttcttgcctcgccaccgcgtgctcctgggcgcgccccgccgcgggcccttgaggcgcgcggagacaccagcgctggcttcccgggcccgcgggccggggagggaagcctcggggctgcggggtgagaggaagaaagcaaacccggggagcaggcggctgccgcacccgcgcaccccgggccctcaccacgccctccccgcgcgccggctcaggggctgccccggaatcagctccccggggccgccgcaacgaaggtggatccgcatcttgattgttctccgggagcctcctgggggctccggcggcggcgcgggcgcgacccatcccgctggcgctccccgctcgctgaaccccgtttgcctgtccacaccccctcgctccccaccatttttcctgaccggcctgtgtccccgagccctcgcggcaggcccgagcaggcgatcgcggccgggcacgcgcgccccgggctcccgccccccttccgagcatccgccgcctcttttctgctgggtctgggaggagggaggctgggaggccgctcggggcccagcgtgccagccccggagttcagcctcccgagctgcggcgcccgcagcggaggaggttttcagtggctgattgaaactcactgcaaaatcaccacgactctttcacctactgagatgattgaccgaggtttggccttccatttttactgagatttggcgagaccgaatggaagcgtccgcacagtaactgcagctgctaggccagaggggccccggcgcccttcccgcctcccctcccgcttgcttttgccttactcgatcttaccaccacccctcccccggccccccgactgagaactcgggcctctcacccgccccccagcctcccgctctgggcgagcctcctccccagcccccacccctgggatgcgaagccagcaagcttttgctgcagatggacaggtttcttttctgtggctttttcctttcgataaaccatcagatttcagtagtacatttgggaaaagaaggggctgatggcgttaaccaggttctcaatatagaactggatttctggagttgtttaccttaccccacaccccctcaacatgtagactaatgcagccattggtggtacatttattttagccacggataattgaaccagcggtttacaattgacacgtgctccgtgctggtgattttatgtggcagccctctgctgcagttccgaaacttgttggcaacgtaaacccattgataggctgatctatgtattttgaaagcctgaaaacttggcatgtcttttctgttttaatcatagatgaatcttggacattttctgtggtgaggtggaaactttaagtaaattagtaaagtaataatttggcttcagaatgggaagagatagtcaagattttttttttttaaagccatgtggcctaacttgatacaaaaataaaagtaattgtttggcaatctaaatttaaaacctgttagaactcaggacaggcgcttcaatgcgctttttaacaatatttaaggctgttttgatgagtgcgttgtgagaatcatcttaatgaattctttattgagtgtctaaaacatagtataatacacatggtattcttgccactggatagtcttcaataaaagtttaattgatttttttttgttggtctcttaagtaagtcttatttttaactaagcattgacagaatatcttaaaatggtaacctgggggtggcgggtgggtgctgtgtgcacggcagcctagccagtggggatcctgctgtttattataagtagttcacagactctgatggcattttggtaagctttccatctttaagaaattgaaccagcattctcttattaattctttaaactgtggaagtaatttccagttcttacactctgatacgcatcccttttatttaaaaaaaaaaaaaatgctaataaaaggcagtgtacttaaactgtgctttgcaaatattgtgtatgttatgaatgactacagacactgggcaaattatttgtagaatgattatcctttagctagagaaagaaatcattacaactcttttgggcagagatgtttctttttaatgttaatcaaggggaagtgatttaaatatgcataaatgtagcagtcagggtgatttagttgcttttttcatgaaagaaaaagactcaaaagacaagacttatttttctcttctgggacttgaaatcataatcatctgatattagtacagtacaagaaatttacatttgttttttacttcagaatttaagtgacttttgcccaaggaatttgagaaataaggcaaataagttgctctattttaaagtagtcattcaatataaatatattatatcaatcttaacttttttattctctgatatgattaataatatgtatattcttacttttcttctaatgggcatatgtatccttgtggacactttgagagaggttttcttggactctcccatttatagaatctttatactcttttactgtgtggttccctgcttttaacagatttctgaggcaaatatatttgtgcttttttcttatgtaggaagaccagcgaaaatagtttactgagttgtcaattttatcagtagataagaaactttctttattacagtttcagggaagattttttcaggatatttctcagttattctaagggccaaattttgtaaaatttccattaggaatgtcagtttcaaataccctttgtatagcctaagcctgtgaggataacaagaatgagccttacctatcctaacacagggatttacaagttcccaaagtaaccgtctccatgtaactcttgacatacttttctgagatttggcttatttttattattggttatttctcactgttcattctatttgatttattctacaacatccccttttatttaatgatctggaaaattctgctctttgataacaactcaggatttttttgttcagttttggtttttgccccttcctgtggagcctacattttcaaccacaataaagatgaaacaaaatttatgaaactgagctctcttccattttacttactgctggcttttttttttttttttttccttgattcctaccataccttcgtttttttcattgtacttttttaacactacctatatccattagctgcctaattagttttatctgttccatgtggatgcagtgagtttataagagaatttcacaaacaagtagttttttagtgaacttaaaataaacagaattttaaaggagacctatttttatactcaataaaagcacaaaagtgcagaaagtataaaacggcttacaaagggagacacaagctcataatgttccatgtataaaagtaataactttattgggtagagatattcttacaagatctagcacctctgccagtgcacagataggactgttttaaatgatttgggaacttttggttgcctgcagttgtgaacagagaacttctctacagagaaacaaaccactaaaagcaatatgaccgagttgagatgtggtttccaatgagcaattggtgaatttaagcaacctggatgtgcatatgtggaggctcccgtctcactgtttgatcaaacttcttttatgtagtcacgtagacttgattttttctgctgtgaaaatgaaaaaataaagcaatatgacaaaaagtttaaaaatgcataaaaaataggatttcctctaggctcctcgaagagatttttttaatatgatgcttgtcttactttcttagacacgttacatttccccttccaaaaaaaaaaaaaaggacaactggaagtaatttatcatataaagaattttgatcaaatagatattgacaaagggccctctgtcacatttttcttcatccagcttttgttcaaaaacagtatgcctcctcccttgaatcacatagggagaaacgttatactccattctcattaatttcccattttgtctacttttactcttgtacatatgttgtgggtttaagagtcttttgcatttgttctgtgacacctttttttgaattgactgttttaaaacggaggcctattttttccggtttgggactcctagtggttatggcatcccataatgcttcgtgacggccaccaggacagaaccacctgatgttttagagcagttttcagcatgacactgttaacaagtgtgtattttccaaggccacatgaaacttactttcttagccactccaggtttgggagcagaaaagctgaaaaacccttttgtgtagaagtctgagtggtttgtgggggggaccttttttagagtttgcatgccagcgcacggcctattgctgtgaaacagagagaaggtaaagctacctgaggcagtgcgctggaggatgaagtgtttgatagcactaggggggaaagaaaatgcatggcaaagtttcgtcttctcgtagactatctagcatgcagagtgtagtgtgttgaaacggtgtatgacattgctgtatcaaagttgtaaaattaagcattatttattgaaaactatgtatttttttgtaaaaacctgatcacatagagaatatcagtggcttgtgcttgtgcttcgatctaaccagcttcttgacccacccccccttggtatgcagtgttaatgctcagggttgaaaatagtacactccaatgtctcttttgcaagagtttttcacagaggattacatttgttcaaaagactctaataaaattgtgtgatcaatcttca

SEQ ID NO: 186373 - DNA, 4824 bp, Homo sapiens
  Payload ID: 16701
  Gene Symbol: SOX12
  Gene Name: SRY (sex determining region Y)-box 12
  Uniprot ID: O15370
  ENST ID: ENST00000342665
  CDS Start-End: 525-1472
gcggcgcccgagcgcgaggcggggcccggccgcagcccaagcgggcacctcggtgtttacacggggcggccccgcgcgcgccgcagcggcccgcagacggcgagggggaggggtggtgcgcgcgccggcggggccgcgcggggagaaagacactgaaaggcgtcggcggccgggcggggagcggcgcgcgcgggccgcggcggagccagaggctgcaggaagagcccgcgggggcccggagggtgcgattcctcggcccccgcaaaacaatgtgtgttgtgagccaggacgcaacttgccggaggcggcgggggcgcgccgagcccgcctgagaccgcgctgaccttctccccccgccgtccgttgggcccgagcgcccagctcctcgctccccagttcgcgggggccgggccgagccgcggggcggggccgcccctccgtcgccgctgcctcctcccccacccccagccgcggaggatgcggacggcccccggcggcgtctagcggccccgggcccaggcgcgatggtgcagcagcggggcgcgagggccaagcgggacggcgggccgccgcccccgggacccgggccggccgaggagggggcgcgcgagcccggctggtgcaagaccccgagcggccacatcaagaggccgatgaacgcattcatggtgtggtcgcagcacgaacggcggaagatcatggaccagtggcccgacatgcacaacgccgagatctccaagcgcctgggccgccgctggcagctgctgcaggactcggagaagatcccgttcgtgcgggaggcggagcggctgcggctcaagcacatggcggattacccggactacaagtaccggccgcgcaaaaagagcaagggggcgcccgccaaggcgcggccccgcccccccggtggtagcggtggcggcagccggctcaagcccgggccgcagctgcctggccgcgggggccgccgagcagcgggagggcctttggggggcggggcggcggcgcccgaggacgacgatgaagacgacgacgaggagctgctggaagtgcgcctggtcgagaccccggggcgggagctgtggaggatggtcccggcgggacgggccgctcggggacaagcggagcgcgcccaagggccgtcgggcgagggggcggccgccgccgccgccgcctccccgacaccgtcggaggacgaggagccggaggaagaggaggaggaggcggcagcggctgaggaaggtgaagaggagacggtggcgtcgggggaggagtcgctgggctttctgtccaggctgccccctggcccggccggcctggactgcagcgccctggatcgcgacccggacctgcagcctccctcgggcacgtcgcacttcgagttcccggactactgcacccccgaggttaccgagatgatcgcgggggactggcgcccgtctagcatcgcagacctggttttcacctactgagcccaccgtcagcggggcgcgcacgcccccaaaccagctgtttacatacaggaatcaggtattggggcccctcggaggccgaggctggcaccccatctcccgcgcagcctgccccctcctggacgtgcccatcccccctcagatccagacatgcccctcccccgcagacacaccccaaggcagcccaacccccaccccttccccgacacccaagcccctccccacgtcgccccctcctgcacagccaccagcagccagccccctccgatacacctcccgtcctctcctacagacctgcacccctccccccttttgcacacgcccctcctcgtggccggaggacccgccccctcctttgctccggaatctctcctccctcgcccggcccgccttctctgggttaggggggcgatgcggccgggtggcaacgcacgcgcctcctgcgcccctcccttccctggggggaggggcgcaccccttttatccccggagcgctagggcccgcccctccgctggggcccacccccttcgtgcgcatgcttaatgcttctggggaggagggggctggtcccagcggagccgcactcttcgcccgctccgggcaaaagcgggggcgagtgtagagcgatcctgggaaatcctttgatccgggagccctaggtttcctctccagccaacggggcgtcgctgccttaatgggaggagcactcggaagggttggtttgggcctgaaactctcccaagtggcatagccccttttccggtatggggtctcctacacccacgcgcaccacctctccggtcgcgtggctgcctctacagcctacctatacgtccctttttccccccaactgggaattgagaggtaaggtctttctctggaaatccagcagtagaggaagggaccacccaagaaaactaaaaaccaaggcaccttaccagtctgtctggggacaggatccctgctgcaccttccccaccccctcctgggaagtgccccctcacctcagggcacccgcaacctgggctcctccctgagcgcaccggcccttcctgtcacccaggtccaccctcagtactcaagctgcagtatacagcgggaaaaactgaggcactttggtgctaggggtttgggactgaggcgtggagagcagatgtgatggcaggaagactctcgcttttaaacatctggtttgggagagaccatcgacttggccagtgagactgagaatggattccgagtagtgatgggccgtttgcacctcggtttttccacgtgagaaatggggagaacgctgctgttaggaggaagttgtgtccagttcagggtgccctcgggagccctgtccctgttgctgtggcccctctcacgccgccatctctctgccccgccccgcccctccggcctccccacaccccccttgccctcactacctgtatctcaccggcgtgtgttcaccctcccgggtggctcacacactctcattcacacacacaaatctcaggaacaaacggtcccagagtcctccggacccctgcccagggtctctgcaggtctctgccccacgcgttcccgtcgctgacaaagccaccagctgcctcctttaagcttggtgctccggctctgggcctttcttgcgctctattttttttttttttttttttaagaaaaacaacaacaacaaaaaaagacaatgaaaaaaaaaacgtcatgtgagtgaagagatgtcactgtctgtggtcttggagaactagtctcgtagctgaggggtggggtccctctgtctggggcactggcacccacagcaggactccgccagtctgatgccaggactgaataaagtgtatttgccccgaccttgccctgtggttctgcatgtctgtgctcttcctcaaccctccctaaacagtttgccagattcaagtccgtgtgatttgggcccgagctgggtgtcccagggcaagccaccttgcctgtctaggcctctatgtcaggactccctggccttcatgaagaatagcaaactcatccctgtagggaccaggcaggtaacatagacgagtgactctgggtggacagtggtgtcatgacccacttcaaggggcctacctcctgccagttgtgaccctgtgggaatgcagtccacagtggccaggtggccagatttttcaagaaaagctggatggatgtttctgagtcatcttaatttcaaaatgagactcatattttaaaatttctgtgggccaaatgaaacaagtatgcaggcaggtctggtccgagggggctggcttggccatgcctttctgtgcctttaatgaggactaagaagcaagattgggccacactgtctggactcaaagcccagctccaccactgagcacccgtgtgactctttccatatgtataacgtggggataataataatagctgcttcacaggatgaaatgaagtttgaggtgagaagcattcaccatggtgcccatcgtgttactccattgtcagaggaggaaacggggtcaggcaggaaagcaacttaaaggagggcctgcaagcagccagggtcagagacagggcttggttctgcttcctggtgaagcatggcttcggggtgctgcctctccctccctgtttgaatctgcagattgtgttaggcccccagctgagggcctggagtggtgggattggtcccagtgcctggcgcacattggcctgcagagtagattaactgaatgaccaaagagcaacagaagtctagtgattcttgtctttgaggttctgactggtgttttacaactgagtccaaggcttttccctcctttgtccctctgacacccctccccctaattctcatctgtcagatccagtgtattcctaagctgggacaaagcctctgttttcccagtaggagccagggctgagtgtggaaattacagtgactgcttcttctcagcttctctggttgaaagcaagctggcgaagtaagaggaggtagagttgagaaggtgtggaagatagggacagctgcccccagaactcccttcaagggaggacttccccagctatgggaagtgccatcagggtggccgcagctgcagagagccacttcacctgagaccacgcccttcctggggcagcctgtatctggtgtctgagtgaggcatggtataaacacctggtcatttcaatccaacatgggacggacactgacagacagtactcccagcaggcccaggccagccagggcttcgtcaggcctgcagcacaatttgacttcctatgcccaggcctgcttcctcttcttcctcttcttttcacaggtgcttattcctaataaacatcttgcaacccaaa

SEQ ID NO: 186374 - DNA, 3587 bp, Homo sapiens
  Payload ID: 16702
  Gene Symbol: SOX13
  Gene Name: SRY (sex determining region Y)-box 13
  Uniprot ID: Q9UN79
  ENST ID: ENST00000367204
  CDS Start-End: 110-1978
ggcatgtgagcgggaagcctaggctgccagccgcgaggaccgcacggaggaggagcaggagcgcggagccgcgagccccgagccccgagcccggcgcctggctgagtagatgtccatgaggagccccatctctgcccagctggccctggatggcgttggcaccatggtgaactgcaccatcaagtcagaggagaagaaagagccttgccacgaggccccccagggctcagccactgccgctgaacctcagcctggagacccagcccgggcctcccaggatagtgctgacccccaagctccagcccaggggaatttcaggggctcctgggactgtagctctccagagggtaatgggtccccagaacccaagagaccaggagtgtcggaggctgcctctggaagccaggagaagctggacttcaaccgaaatttgaaagaagtggtgccagccatagagaagctgttgtccagtgactggaaggagaggtttctaggaaggaactctatggaagccaaagatgtcaaagggacccaagagagcctagcagagaaggagctccagcttctggtcatgattcaccagctgtccaccctgcgggaccagctcctgacagcccactcggagcagaagaacatggctgccatgctgtttgagaagcagcagcagcagatggagcttgcccggcagcagcaggagcagattgcaaagcagcagcagcagctgattcagcagcagcataagatcaacctccttcagcagcagatccagcaggttaacatgccttatgtcatgatcccagccttccccccaagccaccaacctctgcctgtcacccctgactcccagctggccttacccattcagcccattccctgcaaaccagtggagtatccgctgcagctgctgcacagcccccctgccccagtggtgaagaggcctggggccatggccacccaccaccccctgcaggagccctcccagcccctgaacctcacagccaagcccaaggcccccgagctgcccaacacctccagctccccaagcctgaagatgagcagctgtgtgccccgcccccccagccatggaggccccacgcgggacctgcagtccagccccccgagcctgcctctgggcttccttggtgaaggggacgctgtcaccaaagccatccaggatgctcggcagctgctgcacagccacagtggggccttggatggctcccccaacacccccttccgtaaggacctcatcagcctggactcatccccagccaaggagcggctggaggacggctgtgtgcacccactggaggaagccatgctgagctgcgacatggatggctcccgccacttccccgagtcccgaaacagcagccacatcaagaggcccatgaacgccttcatggtgtgggccaaggatgagcggaggaagatcctgcaagccttcccagacatgcacaactccagcatcagcaagatccttggatctcgctggaagtccatgaccaaccaggagaagcagccctactatgaggaacaggcgcggctgagccggcagcacctggagaagtatcctgactacaagtacaagccgcggcccaagcgcacctgcatcgtggagggcaagcggctgcgcgtgggagagtacaaggccctgatgaggacccggcgtcaggatgcccgccagagctacgtgatccccccgcaggctggccaggtgcagatgagctcctcagatgtcctgtaccctcgggcagcaggcatgccgctggcacagccactggtggagcactatgtccctcgtagcctggaccccaacatgcctgtgatcgtcaacacctgcagcctcagagaggagggtgagggcacagatgacaggcactcggtggctgatggcgagatgtaccggtacagcgaggacgaggactcggagggcgaagagaagagcgatggggagttggtggtgctcacagactgatcccggctgggtgggcctggccccttctcctctggggaagaccttgtcccaactcgatgggcacagccagccaacctaagactatgttggtacttggacttgttcgtgccccagagatgggcaaagctgtgcacttgcagatacattcatgaggggagaggcgccctcccttcctgaggagctgttggcctgggtgggcaggaactgcagtatggccatgggctgagcaggctgagcacctcagcctttagggcttatggccaggggacactgtatgactctcctctcctgcaggtgtctatccacctggggtatggcatctaccgacctgtctccctggggtcacatgctttgtttccattcttgtcctggctggaccagccactgtgggaccaacacccctcccacactcccccagactgctcgtctatcaccaggatcgctttgtactttgtgcaaaagggtctggctgtcccttgctgttttcatctctgccaagcctattgtgcctctggctgctgtatgtgtgcgcgtgcacgtgtgtgtgtttcatctgttcattcactgcacaagatatttattgagtgcccactacgtgccaggcactgttgctgagttcctgtgggtgtgtctctcgatgccactcctgcttctctgggggcctctttctgtgcttctctttgtccccaaattgctacctctttgtcagtctgggtgtctcaggttctgtgtgtccttgtgtgcatttctgtctctctctgtcctcgtctctctgcaaggccctctatttctctctttcttggtgtctgtcctttgccccctgtgccctctggattctctgggtctatgtaggcccctggtctgccctgggctcatcagccttcctgacctcctcctgccctccccttcactccctccctggctctgccagtcggttcccacggagccatttttagctctgatcagcatgggaatgtgcctcggcctccaaggggctttgtcctggtgcccccgcccctggtcccaacctgatcccacgagggagttgggacaggaggattgatggtgctccccttcctgccagcgtcagaggccctggagaggggctgtccatggcagctggtctttattcctccctcatgagcacagggtcgggggggtccccattcttggaagaggttgagaagactcctgggcttcagcctctcccacccagccctgcccctcacctgcctgccctcccctcccccactctatactagggactggatctcagcctctgatcagtttcacaaagtttgttccctaaggaaatcaaatcccattgtcacctaactctgaagatctaaatagcccttggatcagtatgggaaccccaaatcccacagggccagatgtggagtctgtgtctgcccccgtcttctctccatcctcaaagcccccacttctctccaggctgtttctttttttatgactgtaaacatagatagtgctttattttgttaataataagataatgatgagtaacttaaccagcacatttctcctgtttacactcgggggatttttttgttttctgatgacataataaagacagatcatttcagaa

SEQ ID NO: 186375 - DNA, 538 bp, Homo sapiens
  Payload ID: 16702
  Gene Symbol: SOX13
  Gene Name: SRY (sex determining region Y)-box 13
  ENST ID: ENST00000525442
  CDS Start-End: 366-538
acgcgggtcgagcttagggtgcacccccaacccgctcctcgccgaccgcagaggactaggtctttctcatcagcccgactatgcgcctagtttaaggatttctcagcgggaagccgaagcgacctgcgcgcgtcctgcgtggggctcaggtgcctgcgacgaggcgcagagctcctccaccatggttgcgtggggtgctgggggacagacgcgctccccttgccacggtttcagggtcgttccccagcggaccagaccagcgcggcatcctgtttgttttctgctccggctgctcctgtcccacccccacccccaccgcaggctgcttcttgctacccccacctcccgccctgggatatcgtaggatgtccatgaggagccccatctctgcccagctggccctggatggcgttggcaccatggtgaactgcaccatcaagtcagaggagaagaaagagccttgccacgaggccccccagggctcagccactgccgctgaacctcagcctggagacccagcccgggcctcccaggatag

SEQ ID NO: 186376 - DNA, 699 bp, Homo sapiens
  Payload ID: 16702
  Gene Symbol: SOX13
  Gene Name: SRY (sex determining region Y)-box 13
  ENST ID: ENST00000480326
  CDS Start-End: 1-386
ggacccaagagagcctagcagagaaggagctccagcttctggtcatgattcaccagctgtccaccctgcgggaccagctcctgacagcccactcggagcagaagaacatggctgccatgctgtttgagaagcagcagcagcagatggagcttgcccggcagcagcaggagcagattgcaaagcagcagcagcagctgattcagcagcagcataagatcaacctccttcagcagcagatccagcaggttaacatgccttatgtcatgatcccagccttccccccaagccaccaacctctgcctgtcacccctgactcccagctggccttacccattcagcccattccctgcaaaccaggacttttctccttgctgccttttccatagtggagtatccgctgcagctgctgcacagcccccctgccccagtggtgaagaggcctggggccatggccacccaccaccccctgcaggagccctcccagcccctgaacctcacagccaagcccaaggcccccgagctgcccaacacctccagctccccaagcctgaagatgagcagctgtgtgccccgcccccccagccatggaggccccacgcgggacctgcagtccagccccccgagcctgcctctgggcttccttggtgaaggggacgctgtcaccaaagccatccaggatgctcggcagctgctgcacag

SEQ ID NO: 186377 - DNA, 597 bp, Homo sapiens
  Payload ID: 16702
  Gene Symbol: SOX13
  Gene Name: SRY (sex determining region Y)-box 13
  ENST ID: ENST00000528591
  CDS Start-End: 59-597
agaactgttgggaggctaatggctgatgatgtctgcggcagcagtgctccatgaatggatgtccatgaggagccccatctctgcccagctggccctggatggcgttggcaccatggtgaactgcaccatcaagtcagaggagaagaaagagccttgccacgaggccccccagggctcagccactgccgctgaacctcagcctggagacccagcccgggcctcccaggatagtgctgacccccaagctccagcccaggggaatttcaggggctcctgggactgtagctctccagagggtaatgggtccccagaacccaagagaccaggagtgtcggaggctgcctctggaagccaggagaagctggacttcaaccgaaatttgaaagaagtggtgccagccatagagaagctgttgtccagtgactggaaggagaggtttctaggaaggaactctatggaagccaaagatgtcaaagggacccaagagagcctagcagagaaggagctccagcttctggtcatgattcaccagctgtccaccctgcgggaccagctcctgacagcccactcggagcagaagaacatggctgccatgct

SEQ ID NO: 186378 - DNA, 3476 bp, Homo sapiens
  Payload ID: 16702
  Gene Symbol: SOX13
  Gene Name: SRY (sex determining region Y)-box 13
  Uniprot ID: Q9UN79
  ENST ID: ENST00000618875
  CDS Start-End: 1-1869
atgtccatgaggagccccatctctgcccagctggccctggatggcgttggcaccatggtgaactgcaccatcaagtcagaggagaagaaagagccttgccacgaggccccccagggctcagccactgccgctgaacctcagcctggagacccagcccgggcctcccaggatagtgctgacccccaagctccagcccaggggaatttcaggggctcctgggactgtagctctccagagggtaatgggtccccagaacccaagagaccaggagtgtcggaggctgcctctggaagccaggagaagctggacttcaaccgaaatttgaaagaagtggtgccagccatagagaagctgttgtccagtgactggaaggagaggtttctaggaaggaactctatggaagccaaagatgtcaaagggacccaagagagcctagcagagaaggagctccagcttctggtcatgattcaccagctgtccaccctgcgggaccagctcctgacagcccactcggagcagaagaacatggctgccatgctgtttgagaagcagcagcagcagatggagcttgcccggcagcagcaggagcagattgcaaagcagcagcagcagctgattcagcagcagcataagatcaacctccttcagcagcagatccagcaggttaacatgccttatgtcatgatcccagccttccccccaagccaccaacctctgcctgtcacccctgactcccagctggccttacccattcagcccattccctgcaaaccagtggagtatccgctgcagctgctgcacagcccccctgccccagtggtgaagaggcctggggccatggccacccaccaccccctgcaggagccctcccagcccctgaacctcacagccaagcccaaggcccccgagctgcccaacacctccagctccccaagcctgaagatgagcagctgtgtgccccgcccccccagccatggaggccccacgcgggacctgcagtccagccccccgagcctgcctctgggcttccttggtgaaggggacgctgtcaccaaagccatccaggatgctcggcagctgctgcacagccacagtggggccttggatggctcccccaacacccccttccgtaaggacctcatcagcctggactcatccccagccaaggagcggctggaggacggctgtgtgcacccactggaggaagccatgctgagctgcgacatggatggctcccgccacttccccgagtcccgaaacagcagccacatcaagaggcccatgaacgccttcatggtgtgggccaaggatgagcggaggaagatcctgcaagccttcccagacatgcacaactccagcatcagcaagatccttggatctcgctggaagtccatgaccaaccaggagaagcagccctactatgaggaacaggcgcggctgagccggcagcacctggagaagtatcctgactacaagtacaagccgcggcccaagcgcacctgcatcgtggagggcaagcggctgcgcgtgggagagtacaaggccctgatgaggacccggcgtcaggatgcccgccagagctacgtgatccccccgcaggctggccaggtgcagatgagctcctcagatgtcctgtaccctcgggcagcaggcatgccgctggcacagccactggtggagcactatgtccctcgtagcctggaccccaacatgcctgtgatcgtcaacacctgcagcctcagagaggagggtgagggcacagatgacaggcactcggtggctgatggcgagatgtaccggtacagcgaggacgaggactcggagggcgaagagaagagcgatggggagttggtggtgctcacagactgatcccggctgggtgggcctggccccttctcctctggggaagaccttgtcccaactcgatgggcacagccagccaacctaagactatgttggtacttggacttgttcgtgccccagagatgggcaaagctgtgcacttgcagatacattcatgaggggagaggcgccctcccttcctgaggagctgttggcctgggtgggcaggaactgcagtatggccatgggctgagcaggctgagcacctcagcctttagggcttatggccaggggacactgtatgactctcctctcctgcaggtgtctatccacctggggtatggcatctaccgacctgtctccctggggtcacatgctttgtttccattcttgtcctggctggaccagccactgtgggaccaacacccctcccacactcccccagactgctcgtctatcaccaggatcgctttgtactttgtgcaaaagggtctggctgtcccttgctgttttcatctctgccaagcctattgtgcctctggctgctgtatgtgtgcgcgtgcacgtgtgtgtgtttcatctgttcattcactgcacaagatatttattgagtgcccactacgtgccaggcactgttgctgagttcctgtgggtgtgtctctcgatgccactcctgcttctctgggggcctctttctgtgcttctctttgtccccaaattgctacctctttgtcagtctgggtgtctcaggttctgtgtgtccttgtgtgcatttctgtctctctctgtcctcgtctctctgcaaggccctctatttctctctttcttggtgtctgtcctttgccccctgtgccctctggattctctgggtctatgtaggcccctggtctgccctgggctcatcagccttcctgacctcctcctgccctccccttcactccctccctggctctgccagtcggttcccacggagccatttttagctctgatcagcatgggaatgtgcctcggcctccaaggggctttgtcctggtgcccccgcccctggtcccaacctgatcccacgagggagttgggacaggaggattgatggtgctccccttcctgccagcgtcagaggccctggagaggggctgtccatggcagctggtctttattcctccctcatgagcacagggtcgggggggtccccattcttggaagaggttgagaagactcctgggcttcagcctctcccacccagccctgcccctcacctgcctgccctcccctcccccactctatactagggactggatctcagcctctgatcagtttcacaaagtttgttccctaaggaaatcaaatcccattgtcacctaactctgaagatctaaatagcccttggatcagtatgggaaccccaaatcccacagggccagatgtggagtctgtgtctgcccccgtcttctctccatcctcaaagcccccacttctctccaggctgtttctttttttatgactgtaaacatagatagtgctttattttgttaataataagataatgatgagtaacttaaccagcacatttctcctgtttacactcgggggatttttttgttttctgatgacataataaagacagatcatttcag

SEQ ID NO: 186379 - DNA, 2055 bp, Homo sapiens
  Payload ID: 16703
  Gene Symbol: SOX14
  Gene Name: SRY (sex determining region Y)-box 14
  Uniprot ID: O95416
  ENST ID: ENST00000306087
  CDS Start-End: 502-1224
gcttttggctctcgttcaccagcctccccgcattctcagccaggtgcagcgctaggcgcggcagctccgggaaagccacgggaagggggagccacgactggaaacgcaagaggagagaagggaactagagaaggcaaaggtggagagggggagaaggaggagcttcttgccctggctaaaaaattacctggccacttaatcccggagactccgatacttgggtcccagcccctggtgcctgaagccccccggccgatcgccctctcctcccccgccctttctgcccccactcgctcccccggggctgcctgggcgctgggactggcatgatcagctgaactttgtggggtcagcgcttctctctggcttcccctcagcggcgccaaggcgaggggagcgcagaaccccggctcaggacggacagacagacggccagccgcgcccaggctcgtctgcagaacccttgcactccctacccccacccacctagccgccgggaccatgtccaaaccttcagaccacatcaagcggcccatgaacgccttcatggtatggtcccggggccagcggcgcaagatggcccaggaaaaccccaagatgcacaactcggagatcagcaaacgcctaggtgccgaatggaagcttctgtccgaggcagagaagcggccatacatcgatgaagccaagcggctacgcgcccagcacatgaaggagcaccctgactacaagtaccgacctcggcgcaagcccaagaacctgctcaagaaggacaggtatgtcttccccttgccctacctgggcgacacggacccgctcaaggcggctggcctgcccgtgggggcctccgacggcctcctgagcgcgcccgagaaagcccgggccttcttgccgccggcctcggcgccctactccctgctggaccccgcgcagtttagctcgagcgccatccagaagatgggcgaagtgccccacaccttggctaccggcgctctgccctacgcgtccaccctgggctaccagaacggcgccttcggcagcctcagctgccccagccagcacacgcacacgcacccgtcccccaccaaccctggctacgtggtgccctgtaactgtaccgcctggtctgcctccaccctgcagccccccgtcgcctacatcctcttcccaggcatgaccaagactggcatagacccttattcgtcagcccacgctacggccatgtaacccccagcccggcccggacctgaggcgtggtctgaaagccgggtctgcaccctgtcctctgagcctagccccggcctgcagacgcctccggggtcagccctgccgctgtcccttacaccacccagacttttcctctctcttccagggggaagggtggggcgtcctcccggacccaaggcgcagacaggtaccggaaacttgcaaacgttatgtcagctacacagctgcccctatcccgactctcccaaaacaaatctccgactgtaccccctttggacaaaaaagtaggcagttttgctttatttatatccccttcactctcctcggataggctttggactctgaactcccagattctgatattatatctacaatatgcatatattttttccttttgtcccctgaagaaaagagttagctgtgtctctgtgttttgccatcagacacaactaggagccatttgctcttcatgtatgggggggaaaggcttcaaagttttaaattacagaaagggaaacatttctatttaaaaccatgctatgatagtgtttgcttctttaaagggaaaacaaaaaggacctacatggttatttactttgtgtaaagcagtgcttctagagatctaagtttacttttagacagaatgtcgggttatgaagtcaggaagtagaaggtgaacaaaaaattaaaagaacaaaaacaacctaaatggtcataaatgttttgacgatgtcttggaaatgtacctagaaggattttacctcgttgctctgttcatttgttgaacaaagacgttttgaataaagacaatctgtcattgtaaaaaagtaa

SEQ ID NO: 186380 - DNA, 1396 bp, Homo sapiens
  Payload ID: 16704
  Gene Symbol: SOX15
  Gene Name: SRY (sex determining region Y)-box 15
  Uniprot ID: O60248
  ENST ID: ENST00000250055
  CDS Start-End: 495-1196
ttaaggaggtgcagtcttatgggagggacaggggcggagtcagtctttaaaagctgttcccaggtctggcccgcctgccacaaacgctgagcccaggtgggagaggtctggcctatccgcgcctggcagctgtcggaactccggagaccacaaaggggtttatggtttaccccctccacggaaggtcggtctgatcgcagctgcgggtcggggagagggaccgggggtcccccagtcagtaggcctcagaacacctcttcagtgccggggcaccagacagcggattttgcattcgactctccccaaagtgtgccgaacaggttggaagcaaaggctccggtttaagctctgggcttggggataaaatacactttttaaggacccaagttcctcggcaacgactccagactgggaagacctttccattttcaggatcgacgcttcacgttgaggggagggcattcaggacgccctcttaaggcttctcccaacccatggcgctaccaggctcctcacaggaccaggcctggagcctggagcctccggctgccacggctgctgcctcctcatcttcgggaccccaggagcgggagggcgctgggagccccgcggcccccgggacgctgcccctggagaaggtgaagcggccgatgaacgcgttcatggtgtggagctccgctcagcgccgccagatggcgcagcagaaccccaagatgcacaactccgagatctccaagcgcctgggcgcgcagtggaagctgctggacgaggacgagaagcggcccttcgtggaggaggccaagcggctccgcgcccgacacctgcgcgactaccccgactacaagtaccggcctcggcgcaaggccaagagctcgggcgccggaccttcccgctgcggacagggaagaggcaacctggccagcggcggcccgctctgggggccggggtacgcgaccacccaaccgagcagaggctttgggtacagaccccccagctactcgacagcctacctgcctggcagctatggctcttcccactgcaaactggaagccccctcaccgtgctccctccctcagagtgaccctaggctccagggggaactgctgcccacctatacccactacctgccccctggctctcccactccatacaaccctccccttgctggtgcccccatgcccctaacccacctctaaccctcatggacgcagacctcacgggacgggcctcatcctccttttttaatccagcagcatcccctaccccaggctgtcaaccctttctcctgttggactacagttcagaggcagcctgcagtcctcccatgatagccagggagagccgcacaacatacaattatatttttggtagtattaaacagttttgtattattcaa

SEQ ID NO: 186381 - DNA, 1050 bp, Homo sapiens
  Payload ID: 16704
  Gene Symbol: SOX15
  Gene Name: SRY (sex determining region Y)-box 15
  Uniprot ID: O60248
  ENST ID: ENST00000538513
  CDS Start-End: 149-850
gggagaggtctggcctatccgcgcctggcagctgtcggaactccggagaccacaaaggggtttatggtttaccccctccacggaaggatcgacgcttcacgttgaggggagggcattcaggacgccctcttaaggcttctcccaacccatggcgctaccaggctcctcacaggaccaggcctggagcctggagcctccggctgccacggctgctgcctcctcatcttcgggaccccaggagcgggagggcgctgggagccccgcggcccccgggacgctgcccctggagaaggtgaagcggccgatgaacgcgttcatggtgtggagctccgctcagcgccgccagatggcgcagcagaaccccaagatgcacaactccgagatctccaagcgcctgggcgcgcagtggaagctgctggacgaggacgagaagcggcccttcgtggaggaggccaagcggctccgcgcccgacacctgcgcgactaccccgactacaagtaccggcctcggcgcaaggccaagagctcgggcgccggaccttcccgctgcggacagggaagaggcaacctggccagcggcggcccgctctgggggccggggtacgcgaccacccaaccgagcagaggctttgggtacagaccccccagctactcgacagcctacctgcctggcagctatggctcttcccactgcaaactggaagccccctcaccgtgctccctccctcagagtgaccctaggctccagggggaactgctgcccacctatacccactacctgccccctggctctcccactccatacaaccctccccttgctggtgcccccatgcccctaacccacctctaaccctcatggacgcagacctcacgggacgggcctcatcctccttttttaatccagcagcatcccctaccccaggctgtcaaccctttctcctgttggactacagttcagaggcagcctgcagtcctcccatgatagccagggagagccgcacaacatacaattatatttttggtagtattaaacagttttgtattattcaa

SEQ ID NO: 186382 - DNA, 1093 bp, Homo sapiens
  Payload ID: 16704
  Gene Symbol: SOX15
  Gene Name: SRY (sex determining region Y)-box 15
  Uniprot ID: O60248
  ENST ID: ENST00000570788
  CDS Start-End: 416-952
acaaacgctgagcccaggtgggagaggtctggcctatccgcgcctggcagctgtcggaactccggagaccacaaaggggtttatggtttaccccctccacggaaggtcggtctgatcgcagctgcgggtcggggagagggaccgggggtcccccagtcagtaggcctcagaacacctcttcagtgccggggcaccagacagcggattttgcattcgactctccccaaagtgtgccgaacaggttggaagcaaaggctccggtttaagctctgggcttggggataaaatacactttttaaggacccaagttcctcggcaacgactccagactgggaagacctttccattttcaggatcgacgcttcacgttgaggggagggcattcaggacgccctcttaaggcttctcccaacccatggcgctaccaggctcctcacaggaccaggcctggagcctggagcctccggctgccacggctgctgcctcctcatcttcgggaccccaggagcgggagggcgctgggagccccgcggcccccgggacgctgcccctggagaaggtgaagcggccgatgaacgcgttcatggtgtggagctccgctcagcgccgccagatggcgcagcagaaccccaagatgcacaactccgagatctccaagcgcctgggcgcgcagtggaagctgctggacgaggacgagaagcggcccttcgtggaggaggccaagcggctccgcgcccgacacctgcgcgactaccccgactacaagtaccggcctcggcgcaaggccaagagctcgggcgccggaccttcccgctgcggacagggaagaggcaacctggccagcggcggcccgctctgggggccggggtacgcgaccacccaaccgagcagaggctttgggtacagaccccccagctactcgacagcctacctgcctggcagctatgggtgagtgcctgggaagcgggccgaagacggaggcccatgcgcccctcttctggagccttggtgggggcggatgccggaggacgggagcccacccaagcagaggccactcgcggccaaggtgtggcgggcgcaggcccagtacctc

SEQ ID NO: 186383 - DNA, 2342 bp, Homo sapiens
  Payload ID: 16705
  Gene Symbol: SOX17
  Gene Name: SRY (sex determining region Y)-box 17
  Uniprot ID: Q9H6I2
  ENST ID: ENST00000297316
  CDS Start-End: 205-1449
gcagtgtcactaggccggctgggggccctgggtacgctgtagaccagaccgcgacaggccagaacacgggcggcggcttcgggccgggagacccgcgcagccctcggggcatctcagtgcctcactccccaccccctcccccgggtcgggggaggcggcgcgtccggcggagggttgaggggagcggggcaggcctggagcgccatgagcagcccggatgcgggatacgccagtgacgaccagagccagacccagagcgcgctgcccgcggtgatggccgggctgggcccctgcccctgggccgagtcgctgagccccatcggggacatgaaggtgaagggcgaggcgccggcgaacagcggagcaccggccggggccgcgggccgagccaagggcgagtcccgtatccggcggccgatgaacgctttcatggtgtgggctaaggacgagcgcaagcggctggcgcagcagaatccagacctgcacaacgccgagttgagcaagatgctgggcaagtcgtggaaggcgctgacgctggcggagaagcggcccttcgtggaggaggcagagcggctgcgcgtgcagcacatgcaggaccaccccaactacaagtaccggccgcggcggcgcaagcaggtgaagcggctgaagcgggtggagggcggcttcctgcacggcctggctgagccgcaggcggccgcgctgggccccgagggcggccgcgtggccatggacggcctgggcctccagttccccgagcagggcttccccgccggcccgccgctgctgcctccgcacatgggcggccactaccgcgactgccagagtctgggcgcgcctccgctcgacggctacccgttgcccacgcccgacacgtccccgctggacggcgtggaccccgacccggctttcttcgccgccccgatgcccggggactgcccggcggccggcacctacagctacgcgcaggtctcggactacgctggccccccggagcctcccgccggtcccatgcacccccgactcggcccagagcccgcgggtccctcgattccgggcctcctggcgccacccagcgcccttcacgtgtactacggcgcgatgggctcgcccggggcgggcggcgggcgcggcttccagatgcagccgcaacaccagcaccagcaccagcaccagcaccaccccccgggccccggacagccgtcgccccctccggaggcactgccctgccgggacggcacggaccccagtcagcccgccgagctcctcggggaggtggaccgcacggaatttgaacagtatctgcacttcgtgtgcaagcctgagatgggcctcccctaccaggggcatgactccggtgtgaatctccccgacagccacggggccatttcctcggtggtgtccgacgccagctccgcggtatattactgcaactatcctgacgtgtgacaggtccctgatccgccccagcctgcaggccagaagcagtgttacacacttcctggaggagctaaggaaatcctcagactcctgggtttttgttgttgctgttgttgttttttaaaaggtgtgttggcatataatttatggtaatttattttgtctgccacttgaacagtttgggggggtgaggtttcatttaaaatttgttcagagatttgtttcccatagttggattgtcaaaaccctatttccaagttcaagttaactagctttgaatgtgtcccaaaacagcttcctccatttcctgaaagtttattgatcaaagaaatgttgtcctgggtgtgttttttcaatcttctaaaaaataaaatctggaatcctgcttttttgctctactagtacctctgtcacactagtcttatcaaaaaccagttcttaagatcaatgttaagtttattagttaatgtaaatttctcatcctcgaaaagggtgaacataaatgcctttaaggagtatatctaaaaataaacattaggatatctaagtttgatgtaattgtttcaggaaggaaaaaagaaaagcattctggaatgagcctacttcaagtaatcttagtttctaaaactaacagttaatattttcaattccagtatatcactttaagtagaaggggatgtccaagtaattttggttttctaactgttgaatcataagcttgacctgcccccagaggctttttggatgtttttatctgtgttttgccatctctttacactcctcgacattcagtttaccttaatcttcacatttttacaccttgggaagtggcaagcatcgctgggtttaagataaaggagtcacaaaaactaatcaaaataaaatttgcattatgacaactt

SEQ ID NO: 186384 - DNA, 1864 bp, Homo sapiens
  Payload ID: 16706
  Gene Symbol: SOX18
  Gene Name: SRY (sex determining region Y)-box 18
  Uniprot ID: P35713
  ENST ID: ENST00000340356
  CDS Start-End: 126-1280
ccaccgccgtccccaccgccatccgccctcccggcctggcctgcccttgcgcccggctccccagtgcccgccgcccgcccgccgcgctcccgcgctccgttccgcccaggccgcgcccagctggaatgcagagatcgccgcccggctacggcgcacaggacgacccgcccgcccgccgcgactgtgcatgggccccgggacacggggccgccgctgacacgcgcggcctcgccgccggccccgccgccctcgccgcgcccgccgcgcccgcctcgccgcccagcccgcagcgcagtcccccgcgcagccccgagccggggcgctatggcctcagcccggccggccgcggggaacgccaggcggcagacgagtcgcgcatccggcggcccatgaacgccttcatggtgtgggcaaaggacgagcgcaagcggctggctcagcagaacccggacctgcacaacgcggtgctcagcaagatgctgggcaaagcgtggaaggagctgaacgcggcggagaagcggcccttcgtggaggaagccgaacggctgcgcgtgcagcacttgcgcgaccaccccaactacaagtaccggccgcgccgcaagaagcaggcgcgcaaggcccggcggctggagcccggcctcctgctcccgggattagcgcccccgcagccaccgcccgagcctttccccgcggcgtctggctcggctcgcgccttccgcgagctgcccccgctgggcgccgagttcgacggcctggggctgcccacgcccgagcgctcgcctctggacggcctggagcccggcgaggctgccttcttcccaccgcccgcggcgcccgaggactgcgcgctgcggcccttccgcgcgccctacgcgcccaccgagttgtcgcgggaccccggcggttgctacggggctcccctggcggaggcgctcaggaccgcgccccccgcggcgccgctcgctggcctgtactacggcaccctgggcacgcccggcccgtaccccggcccgctgtcgccgccgcccgaggccccgccgctggagagcgccgagccgctggggcccgccgccgatctgtgggccgacgtggacctcaccgagttcgaccagtacctcaactgcagccggactcggcccgacgcccccgggctcccgtaccacgtggcactggccaaactgggcccgcgcgccatgtcctgcccagaggagagcagcctgatctccgcgctgtcggacgccagcagcgcggtctattacagcgcgtgcatctccggctaggccgccggcgccgcccgggtccctgcagcgcttcctcccgcagcccccgcgaccgatccgaccgcgtcgctgccgctctgctctctcatacgcgtgtatgtttggttccatgtcacagccccctaggagccagtgatgctcggccttgcgcccgttccacctcccaggccacccttcctgggcttctgggccacctgccctcggggggcccctgcgagggtgcctggagttcccacgtgtcccggggcttttccaggaagcccgagcccaggacctgttggcagagttgccagggttacatttttgaagcacctgctccttttcttgcagtgtattttctacaaccagattgtattaatattttttactttgcccttttaaaaaatatacctaatacaatatatttaatttttaattaaactcttaaacttttcttccaagaagtttcagtgatcagaagcgtcactgtggcaaagacttttgcaatgtgaggaatacagatgtttgctttctataaaggaggagcctggagctgggtccccggacggagaggccacaataaatcctcgggcctttcctctgca

SEQ ID NO: 186385 - DNA, 2513 bp, Homo sapiens
  Payload ID: 16707
  Gene Symbol: SOX2
  Gene Name: SRY (sex determining region Y)-box 2
  Uniprot ID: P48431
  ENST ID: ENST00000325404
  CDS Start-End: 438-1391
ggatggttgtctattaacttgttcaaaaaagtatcaggagttgtcaaggcagagaagagagtgtttgcaaaagggggaaagtagtttgctgcctctttaagactaggactgagagaaagaagaggagagagaaagaaagggagagaagtttgagccccaggcttaagcctttccaaaaaataataataacaatcatcggcggcggcaggatcggccagaggaggagggaagcgctttttttgatcctgattccagtttgcctctctctttttttcccccaaattattcttcgcctgattttcctcgcggagccctgcgctcccgacacccccgcccgcctcccctcctcctctccccccgcccgcgggccccccaaagtcccggccgggccgagggtcggcggccgccggcgggccgggcccgcgcacagcgcccgcatgtacaacatgatggagacggagctgaagccgccgggcccgcagcaaacttcggggggcggcggcggcaactccaccgcggcggcggccggcggcaaccagaaaaacagcccggaccgcgtcaagcggcccatgaatgccttcatggtgtggtcccgcgggcagcggcgcaagatggcccaggagaaccccaagatgcacaactcggagatcagcaagcgcctgggcgccgagtggaaacttttgtcggagacggagaagcggccgttcatcgacgaggctaagcggctgcgagcgctgcacatgaaggagcacccggattataaataccggccccggcggaaaaccaagacgctcatgaagaaggataagtacacgctgcccggcgggctgctggcccccggcggcaatagcatggcgagcggggtcggggtgggcgccggcctgggcgcgggcgtgaaccagcgcatggacagttacgcgcacatgaacggctggagcaacggcagctacagcatgatgcaggaccagctgggctacccgcagcacccgggcctcaatgcgcacggcgcagcgcagatgcagcccatgcaccgctacgacgtgagcgccctgcagtacaactccatgaccagctcgcagacctacatgaacggctcgcccacctacagcatgtcctactcgcagcagggcacccctggcatggctcttggctccatgggttcggtggtcaagtccgaggccagctccagcccccctgtggttacctcttcctcccactccagggcgccctgccaggccggggacctccgggacatgatcagcatgtatctccccggcgccgaggtgccggaacccgccgcccccagcagacttcacatgtcccagcactaccagagcggcccggtgcccggcacggccattaacggcacactgcccctctcacacatgtgagggccggacagcgaactggaggggggagaaattttcaaagaaaaacgagggaaatgggaggggtgcaaaagaggagagtaagaaacagcatggagaaaacccggtacgctcaaaaagaaaaaggaaaaaaaaaaatcccatcacccacagcaaatgacagctgcaaaagagaacaccaatcccatccacactcacgcaaaaaccgcgatgccgacaagaaaacttttatgagagagatcctggacttctttttgggggactatttttgtacagagaaaacctggggagggtggggagggcgggggaatggaccttgtatagatctggaggaaagaaagctacgaaaaactttttaaaagttctagtggtacggtaggagctttgcaggaagtttgcaaaagtctttaccaataatatttagagctagtctccaagcgacgaaaaaaatgttttaatatttgcaagcaacttttgtacagtatttatcgagataaacatggcaatcaaaatgtccattgtttataagctgagaatttgccaatatttttcaaggagaggcttcttgctgaattttgattctgcagctgaaatttaggacagttgcaaacgtgaaaagaagaaaattattcaaatttggacattttaattgtttaaaaattgtacaaaaggaaaaaattagaataagtactggcgaaccatctctgtggtcttgtttaaaaagggcaaaagttttagactgtactaaattttataacttactgttaaaagcaaaaatggccatgcaggttgacaccgttggtaatttataatagcttttgttcgatcccaactttccattttgttcagataaaaaaaaccatgaaattactgtgtttgaaatattttcttatggtttgtaatatttctgtaaatttattgtgatattttaaggttttcccccctttattttccgtagttgtattttaaaagattcggctctgtattatttgaatcagtctgccgagaatccatgtatatatttgaactaatatcatccttataacaggtacattttcaacttaagtttttactccattatgcacagtttgagataaataaatttttgaaatatggacactgaaa

SEQ ID NO: 186386 - DNA, 2778 bp, Homo sapiens
  Payload ID: 16708
  Gene Symbol: SOX21
  Gene Name: SRY (sex determining region Y)-box 21
  Uniprot ID: Q9Y651
  ENST ID: ENST00000376945
  CDS Start-End: 351-1181
gcccggccgccgctacctgcggggagctcaccagcaaacgccactgcagacgaaggacccaaagaacgtaaagggcaaactgccgccgcggggagggggcaccgccgagaagttagagtgtcccagagacaacctgctcgagcgctcggccggagacactaaggcggcccggggcgcggcgtggccctgggctggtcccccagccccctcctccggggcgggagcgacgccggggcgcgacgagccccggccggccgagcgggtctccgcgggcagccaacattgatttcctccgggccgagggcgagggcccgggaggcggcgggctgcagccgcggcagggcgagagcatgtccaagccggtggaccacgtcaagcggcccatgaacgccttcatggtgtggtcgcgggctcagcggcgcaagatggcccaggagaaccccaagatgcacaactcggagatcagcaagcgcttgggcgccgagtggaaactgctcacagagtcggagaagcggccgttcatcgacgaggccaagcgtctacgcgccatgcacatgaaggagcaccccgactacaagtaccggccgcggcgcaagcccaagacgctgctcaagaaggacaagttcgccttcccggtgccctacggcctgggcggcgtggcggacgccgagcaccctgcgctcaaggcgggcgccgggctgcacgcgggggcgggcggcggcctggtgcctgagtcgctgctcgccaatcccgagaaggcggccgcggccgccgccgctgccgccgcacgcgtcttcttcccgcagtcggccgctgccgccgccgctgccgccgccgccgccgccgcgggcagcccctactcgctgctcgacctgggctccaaaatggcagagatctcgtcgtcctcgtccggcctcccgtacgcgtcgtcgctgggctacccgaccgcgggcgcgggcgccttccacggcgcggcggcggcggctgcagcggcggccgccgccgccggggggcacacgcactcgcaccccagcccgggcaacccgggctacatgatcccgtgcaactgcagcgcgtggcccagccccgggctgcagccgccgctcgcctacatcctgctgccgggcatgggcaagccccagctggacccctaccccgcggcctacgctgccgcgctatgaccccgcggggccgcctcgcgaggaccggtgtgcacacgtgtacatatgtataggtacgagcgctgcggcctccccgtgcgccctcccgcgaccgggggcccggtttgtatgtacatagaatgtataggtgccaggtagaggcagagaggccaggcggggcaggagtggccaagcgcgcaagggcgcgggcgagcaggcctgtgaattcgcaggatcatttcagacccgcacttcggcagccaactcgaaagcaggcggttgtgtgcggcagcagttggcgtttgctttgcacttcggaacctgttgcgttttgacccacggaggtggaggagtaactttttgacatgttggcctttccagttttgttggaagtttcatggtcggttttgtttttgtttctcattcttcttcctcgcccctcagccccccaacccccaaccccctcccggtccgtgttgcatgcacgctgttcaaatgtgaggtctgaaatggctggcacacgggaaaagctgcttgtgtcattcgtttctgggagtgggatggctctgagcagcctcgcctccctgtttgtactatttgaactttgcagatctctgttctctcaagcagaactcccaaccagatccattcttgaccagtgaccggctcgaatctggccttttgtgtgagatgatcacggtttcttttgtttatcacgccatttgcaaatcagagcaagagctctttctcaagggcaagaaacgcaaacaagaaatatttgtgagatgaaagttgtcaattggattttcttcctaaacaaacaacaacaacaaactactagaagtctccctgagtccactcgcttggatttctgacacagtttacaaaaaaggaaaaaggcactgctcctattttcccttatggctgagttcaccttaagattgtaaatgtgtatatgtcagtgaaaacattgaggcttggaaaatgtgttattttcgttgccctaagtttgagtcgactttagactcaaaaacattttgagcgaatatcaaagttaacttttaaaaattgcgaaactatttcagaatcgcaattttatcgaagattaaatcagacttttttgtctggtaattatatatttattatttagcaaaactgaagaaaaaaagcacagaattgtttcaacagatgtctctcattttcagctagcatttctctcccaagttgagctggtttaatgtgttttggatttccctcctcaattggcttattttttagatcacctgcaattcatttgcaaattgcaataaaacacattttagaaaaaaggaaccttcaattattagctttgtttctttttaaatgtatatattttgactaatgtttgtgaatgaagttggctaacatgtatttagtttcattttggctttatgtaatataaagtttttaaaattttaaatatggttttaacctttatgtgtaaatgattttctagtgtgaccttctaatttaatattagacgtctaaggtatatctgtaaattagaatccgactatcactctgttcattttttttgaacaaagagtttaaataaagcctgaaccagggaaaagaaaaa

SEQ ID NO: 186387 - DNA, 2517 bp, Homo sapiens
  Payload ID: 16709
  Gene Symbol: SOX3
  Gene Name: SRY (sex determining region Y)-box 3
  Uniprot ID: P41225
  ENST ID: ENST00000370536
  CDS Start-End: 444-1784
tggccgggggatggggcgccggtctgccttgacagggttgcaaagttgttttctaaattccgaaggcgcccctctgccccctccccccaatctgcttgcgtgccccctcccccctccccccgtcacctcctcaggtttcgttctttcaaactttttgaaaccctaattggtggcctctgagtgggcctcgtggactcccgcctcctaagtaactcttaccacgtcactaggccaaagaggggcgtggggtgaacgaaagggctccccgaacttttttttttccagccaggccgaacgggggctcggtaatgattggccagggcgcatcactgcgaacctgtcaatcacgggtcctccgggttgcgaggggcggaccaagccccaaccccggggaatccgagcaggtatataaggggcccagctagagcccaggcagactgtgaatgcgacctgttcgagagaactcatcaggtgcgagaagcccgcgggttcctgctgatttggcgcggagcattttgataagcctacccttcccgccggactcgctggcccacaggcccccaagctccgctccgacggagtcccagggccttttcaccgtggccgctccagccccgggagcgccttctcctcccgccacgctggcgcaccttcttcccgccccggcaatgtacagccttctggagactgaactcaagaaccccgtagggacacccacacaagcggcgggcaccggcggccccgcagccccgggaggcgcaggcaagagtagtgcgaacgcagccggcggcgcgaactcgggcggcggcagcagcggtggtgcgagcggaggtggcgggggtacagaccaggaccgtgtgaaacggcccatgaacgccttcatggtatggtcccgcgggcagcggcgcaaaatggccctggagaaccccaagatgcacaattctgagatcagcaagcgcttgggcgccgactggaaactgctgaccgacgccgagaagcgaccattcatcgacgaggccaagcgacttcgcgccgtgcacatgaaggagtatccggactacaagtaccgaccgcgccgcaagaccaagacgctgctcaagaaagataagtactccctgcccagcggcctcctgcctcccggtgccgcggccgccgccgccgctgccgcggccgcagccgctgccgccagcagtccggtgggcgtgggccagcgcctggacacgtacacgcacgtgaacggctgggccaacggcgcgtactcgctggtgcaggagcagctgggctacgcgcagcccccgagcatgagcagcccgccgccgccgcccgcgctgccgccgatgcaccgctacgacatggccggcctgcagtacagcccaatgatgccgcccggcgctcagagctacatgaacgtcgctgccgcggccgccgccgcctcgggctacgggggcatggcgccctcagccacagcagccgcggccgccgcctacgggcagcagcccgccaccgccgcggccgcagctgcggccgcagccgccatgagcctgggccccatgggctcggtagtgaagtctgagcccagctcgccgccgcccgccatcgcatcgcactctcagcgcgcgtgcctcggcgacctgcgcgacatgatcagcatgtacctgccacccggcggggacgcggccgacgccgcctctccgctgcccggcggtcgcctgcacggcgtgcaccagcactaccagggcgccgggactgcagtcaacggaacggtgccgctgacccacatctgagcaccggcctgcgctcgtccacccttgttccccacccccacccccactcccgccccgcacccccaagttgggacgccttgtttagctttgcttgcctgggactgttgccttgtaccgatgatggggagggctgaaagttttgctgtagctgtcgggttttgtacaaaagcaaaaataagtcaggagcagcgaaaatgggacttctagagagctctcttgccccacgccgctgctcctttcacctttgtaggctgggaatcgctgtgttatttgcaaagaaaaaacagcccccactcctcctcctgagttccagggttattctgttacatttgaaaatgttgtcttgttagtttgcagttagccaaggagtgaatgggagaaacatagtatcgggtgaggccagctggagaactgcaacgcctacgcccccagtcgtgtcgcgtctgttttcctcgtggttttttggggcgctgaccgctccaagcagcgcggcagctaaagccaatgttaatttatagccaggtgtgcgtgtgtctcccgcctcgccgcccctggccgcgggacagcttctgtccaatcatgttgagttggtgatttctgccgtgatctgtttgatatttcttcgcgctaatgtgttcagatttcgtttgggtagtggggaggggctactttgtttcagggttttcaagcttttactcttaattcctaaatgagatcaataaattttataacc

SEQ ID NO: 186388 - DNA, 3265 bp, Homo sapiens
  Payload ID: 16710
  Gene Symbol: SOX30
  Gene Name: SRY (sex determining region Y)-box 30
  Uniprot ID: O94993
  ENST ID: ENST00000265007
  CDS Start-End: 343-2604
gggggagggatgactaaagacaacggctgtaagagaactccacaagagagtcagaacgaaaatgtgcaacaagtgcggcggctcctaccatggcaggtgattcgaggactcagcacgaggcgagagtagggaccaggaagagccggaaaacccgcctgtgattggccgtccacgggtatcggtcgttgtgattgggtgaggcccagacagacagctgcgttttgaaccgcgtagggttctgggtagcaaaggccttgcaaggctcttaaccgaaagggggagggggaaggtcgccaacaaacggctgagctcacaatcctggccggggcgtccccctcccccatggagagagccagacccgagccgccgcctcagccgcgcccgttgcgtcccgctccgcccccgctgccggtcgagggcacctccttttgggcagcagccatggagccccctccgtcgtctcccacactgagcgcggcagccagtgcgaccttggcctcgtcgtgcggggaggcagtggcgtccggcttacagcccgcggtgcggcggctgctgcaggtgaagccagagcaggtgttgctgctaccacagcctcaggcccagaacgaggaagccgctgcctcgtccgcgcaggcgcggctgttgcagttcaggcccgacctgcggctcctgcagccgccgacagcgtcagacggcgccacctccaggcccgagttgcacccggtgcagcccctggcgctgcatgtcaaggccaagaagcagaagctggggcccagcctggatcagtcagtggggcctcgaggggccgtcgaaaccggtcctagagcctccagggtggtcaagttggaaggccccgggccggccctcggctacttccgaggggacgagaagggcaagctggaggcggaggaggtcatgagagactcgatgcaaggcggggcaggcaaaagcccggcagccatccgagaaggtgtgatcaaaacggaggaacccgagagactcctcgaggactgcaggctcggcgcggagcccgcgtccaatggcctggttcatggcagcgcggaggtcatcttggccccaacgtccggtgcctttgggccgcaccagcaagaccttaggatccctttgacgctccacacggtcccccctggggcccggatccagtttcagggagctccgccttcagagctgataagattgaccaaggtccccctgacaccagtgcctactaaaatgcagtccctactggagccttctgtaaaaattgaaaccaaagatgtcccgctcaccgtgttgccctcagatgcaggcataccagatactcccttcagtaaggacagaaatggtcatgtgaagcgacccatgaacgcatttatggtttgggcaaggatccaccgaccagcactagccaaagctaacccagcagccaacaatgcagaaatcagtgtccagcttgggttagagtggaacaaacttagtgaagaacaaaagaaaccctattacgatgaagcacaaaagattaaggaaaagcacagagaggaatttcctggttgggtttatcagcctcgtccagggaagcgaaaacgattccctctaagtgtttccaatgtattttctggtaccacacagaatatcatctctacaaatcctacaacagtttatccttaccgctcacctacgtactctgtggtaattcccagcctacagaatcccatcactcatccagttggtgaaacctcacctgctatccagctgcccacacctgcagtccagagcccaagccctgtcacacttttccagcccagcgtctccagtgctgctcaggtggctgtccaggatccaagtctacctgtctatccagcactcccaccccaacgctttactgggccttcccaaacagacactcatcagctgcattctgaagccactcacactgtgaagcaacccactcctgtctctctagagagcgccaacaggatttcaagtagtgcaagtactgcccatgccagatttgcaacttcgaccatccaacctcctagggagtattccagcgtttccccttgtcccagaagtgctccaatcccccaggcttctcccattccacacccacatgtctaccagccccctccccttggccatccagccacactgttcgggacaccaccaagattctcttttcatcacccttacttcctacccggacctcactacttcccatcaagtacatgcccttacagtcggcctccctttggctatggaaattttccgagttcaatgccagaatgccttagttattatgaagacaggtacccaaaacatgagggtatcttttcaactttaaatagagactattcttttagagactactcaagtgaatgcacacacagtgaaaattctcggagttgtgagaacatgaatggaacttcttactataacagtcatagccacagtggggaagaaaacttaaaccctgtgcctcagctggacattggaaccttggagaatgtcttcacagccccgacatcaactccttctagcatccagcaagtcaatgtcaccgacagtgatgaggaggaagaagaaaaagtgctcagggatttataattttaaaacaaatatgcacagaaaataaacatttcttaaaatatattctgggtcagttggtatgagaaaaaaaaaagcctagaattctttgttgaaagttttcagtcgtgatttgaggagttaaaaccaaatgcaatttatgtcttcataaaattttgattagtgaaactagagtctggatgtttcattgtaggaatatttaagttattaagtagtttaattttaatggctgaaatttgcatcaacatgtattattattactttatcctggaacatgcaaaatactgaagcctcacagttgtatgtgaggggaaaggggaaataaatctagcatagtgtgatttttattttatctcaggatacattttttaaatgattttttgtttgctttttatgtaatacttatggatgttgtcaatttttgatgtaacattttgaaagtattttgacaactcctagtgaacttggacttggttgctaaatttaacttacactaataaccaattataagttccaaatgtgttttaatggcacctgggtgattcttcagctaaatttagtcatttctgtttctaaatatttttatcattttaaaatattttttttccatttggcatacatcgttctttgttgtaattaaataaacatagataaaattgtt

SEQ ID NO: 186389 - DNA, 2716 bp, Homo sapiens
  Payload ID: 16710
  Gene Symbol: SOX30
  Gene Name: SRY (sex determining region Y)-box 30
  Uniprot ID: O94993
  ENST ID: ENST00000311371
  CDS Start-End: 287-1792
cgaaaatgtgcaacaagtgcggcggctcctaccatggcaggtgattcgaggactcagcacgaggcgagagtagggaccaggaagagccggaaaacccgcctgtgattggccgtccacgggtatcggtcgttgtgattgggtgaggcccagacagacagctgcgttttgaaccgcgtagggttctgggtagcaaaggccttgcaaggctcttaaccgaaagggggagggggaaggtcgccaacaaacggctgagctcacaatcctggccggggcgtccccctcccccatggagagagccagacccgagccgccgcctcagccgcgcccgttgcgtcccgctccgcccccgctgccggtcgagggcacctccttttgggcagcagccatggagccccctccgtcgtctcccacactgagcgcggcagccagtgcgaccttggcctcgtcgtgcggggaggcagtggcgtccggcttacagcccgcggtgcggcggctgctgcaggtgaagccagagcaggtgttgctgctaccacagcctcaggcccagaacgaggaagccgctgcctcgtccgcgcaggcgcggctgttgcagttcaggcccgacctgcggctcctgcagccgccgacagcgtcagacggcgccacctccaggcccgagttgcacccggtgcagcccctggcgctgcatgtcaaggccaagaagcagaagctggggcccagcctggatcagtcagtggggcctcgaggggccgtcgaaaccggtcctagagcctccagggtggtcaagttggaaggccccgggccggccctcggctacttccgaggggacgagaagggcaagctggaggcggaggaggtcatgagagactcgatgcaaggcggggcaggcaaaagcccggcagccatccgagaaggtgtgatcaaaacggaggaacccgagagactcctcgaggactgcaggctcggcgcggagcccgcgtccaatggcctggttcatggcagcgcggaggtcatcttggccccaacgtccggtgcctttgggccgcaccagcaagaccttaggatccctttgacgctccacacggtcccccctggggcccggatccagtttcagggagctccgccttcagagctgataagattgaccaaggtccccctgacaccagtgcctactaaaatgcagtccctactggagccttctgtaaaaattgaaaccaaagatgtcccgctcaccgtgttgccctcagatgcaggcataccagatactcccttcagtaaggacagaaatggtcatgtgaagcgacccatgaacgcatttatggtttgggcaaggatccaccgaccagcactagccaaagctaacccagcagccaacaatgcagaaatcagtgtccagcttgggttagagtggaacaaacttagtgaagaacaaaagaaaccctattacgatgaagcacaaaagattaaggaaaagcacagagaggaatttcctggttgggtttatcagcctcgtccagggaagcgaaaacgattccctctaagtgtttccaatgtattttctggtaccacacagaatatcatctctacaaatcctacaacagtttatccttaccgctcacctacgtactctgtggtaattcccagcctacagaatcccatcactcatccagttgtacatgcccttacagtcggcctccctttggctatggaaattttccgagttcaatgccagaatgccttagttattatgaagacaggtacccaaaacatgagggtatcttttcaactttaaatagagactattcttttagagactactcaagtgaatgcacacacagtgaaaattctcggagttgtgagaacatgaatggaacttcttactataacagtcatagccacagtggggaagaaaacttaaaccctgtgcctcagctggacattggaaccttggagaatgtcttcacagccccgacatcaactccttctagcatccagcaagtcaatgtcaccgacagtgatgaggaggaagaagaaaaagtgctcagggatttataattttaaaacaaatatgcacagaaaataaacatttcttaaaatatattctgggtcagttggtatgagaaaaaaaaaagcctagaattctttgttgaaagttttcagtcgtgatttgaggagttaaaaccaaatgcaatttatgtcttcataaaattttgattagtgaaactagagtctggatgtttcattgtaggaatatttaagttattaagtagtttaattttaatggctgaaatttgcatcaacatgtattattattactttatcctggaacatgcaaaatactgaagcctcacagttgtatgtgaggggaaaggggaaataaatctagcatagtgtgatttttattttatctcaggatacattttttaaatgattttttgtttgctttttatgtaatacttatggatgttgtcaatttttgatgtaacattttgaaagtattttgacaactcctagtgaacttggacttggttgctaaatttaacttacactaataaccaattataagttccaaatgtgttttaatggcacctgggtgattcttcagctaaatttagtcatttctgtttctaaatatttttatcattttaaaatattttttttccatttggcatacatcgttctttgttgtaattaaataaacatagataaaattgtt

SEQ ID NO: 186390 - DNA, 1666 bp, Homo sapiens
  Payload ID: 16710
  Gene Symbol: SOX30
  Gene Name: SRY (sex determining region Y)-box 30
  ENST ID: ENST00000519442
  CDS Start-End: 155-1501
atattggctgcggggaaggggacgggggctgttggacatgcgtgcagagtccggcggccacggacgcggtaatattgtccctcggcatccgccgtggtgagacccggcgcgttgctgtgaagacggacgggtctggaagaagtggggtgcggtcatggagaaatgttgtagagggaaggaacaaagtctactgtgcatccagcaaggcataccagatactcccttcagtaaggacagaaatggtcatgtgaagcgacccatgaacgcatttatggtttgggcaaggatccaccgaccagcactagccaaagctaacccagcagccaacaatgcagaaatcagtgtccagcttgggttagagtggaacaaacttagtgaagaacaaaagaaaccctattacgatgaagcacaaaagattaaggaaaagcacagagaggaatttcctggttgggtttatcagcctcgtccagggaagcgaaaacgattccctctaagtgtttccaatgtattttctggtaccacacagaatatcatctctacaaatcctacaacagtttatccttaccgctcacctacgtactctgtggtaattcccagcctacagaatcccatcactcatccagttggtgaaacctcacctgctatccagctgcccacacctgcagtccagagcccaagccctgtcacacttttccagcccagcgtctccagtgctgctcaggtggctgtccaggatccaagtctacctgtctatccagcactcccaccccaacgctttactgggccttcccaaacagacactcatcagctgcattctgaagccactcacactgtgaagcaacccactcctgtctctctagagagcgccaacaggatttcaagtagtgcaagtactgcccatgccagatttgcaacttcgaccatccaacctcctagggagtattccagcgtttccccttgtcccagaagtgctccaatcccccaggcttctcccattccacacccacatgtctaccagccccctccccttggccatccagccacactgttcgggacaccaccaagattctcttttcatcacccttacttcctacccggacctcactacttcccatcaagtacatgcccttacagtcggcctccctttggctatggaaattttccgagttcaatgccagaatgccttagttattatgaagacaggtacccaaaacatgagggtatcttttcaactttaaatagagactattcttttagagactactcaagtgaatgcacacacagtgaaaattctcggagttgtgagaacatgaatggaacttcttactataacagtcatagccacagtggggaagaaaacttaaaccctgtgcctcagctggacattggaaccttggagaatgtcttcacagccccgacatcaactccttctagcatccagcaagtcaatgtcaccgacagtgatgaggaggaagaagaaaaagtgctcagggatttataattttaaaacaaatatgcacagaaaataaacatttcttaaaatatattctgggtcagttggtatgagaaaaaaaaaagcctagaattctttgttgaaagttttcagtcgtgatttgaggagttaaaaccaaatgcaatttatgtcttcataaaattttgattagtg

SEQ ID NO: 186391 - DNA, 5851 bp, Homo sapiens
  Payload ID: 16711
  Gene Symbol: SOX4
  Gene Name: SRY (sex determining region Y)-box 4
  Uniprot ID: Q06945
  ENST ID: ENST00000244745
  CDS Start-End: 1767-3191
agagtgaagcaatctttaattttgaaaacagggaaaacaaatatttagaaagtaaaaccgatttccatcctttacatgccattatacatcctatacaaaactctggaaatctgcctattgaggtaattacggagcactacctaatgtgtttcaagggaaagctcccctgtttgggctatgcaggatttacagggagtttaaatcattaaataaccatagttgacccttgcttggttaagagagtaagcaattattgcaaagtcctcttccctgccttccacaaacagcacaaaaacggttctgaagggatttacacaatacatcaacatctgtgctgtacctagagttgttaaaataattgtgatgacaggtgtctaggtaccactttcttaatggttttcaatatccattgatttattgttttgtggctttctcttcccctttacagctttggctttaagaaagagctggggaacagattttgcaccagaggctgattctttattccaatgctgaaaagaactaataaaaataatcacttggcttttaagcagaaagcttccatttacagtatttcacccttaccccgccccgttccaagccccttgttatctaacataatggttagaatacatttccgtctctccccttaataatttcatgcattaacatcctcttcacacactatacacacacgcacgcgcgcacacacacgcgcgcgcacacacacagcaaaaggaaaaaagaggcagcagaaatctcagctgtacttctagcccttttaaaaagtttgctctgtaaattggaatgaggtcagatttggagcttctcattgcacgcggagattattattgcatcgggttccaagccaatgggaagcccgggggaggggtttggcatgaggaagcgttggttacagcagctgattggctgcagccaagactgtgaaaggataaagaggcgcgaggcggaattggggtctgctctaagctgcagcaagagaaactgtgtgtgaggggaagaggcctgtttcgctgtcgggtctctagttcttgcacgctctttaagagtctgcactggaggaactcctgccattaccagctcccttcttgcagaagggagggggaaacatacatttattcatgccagtctgttgcatgcaggctttttggcttcctaccttgcaacaaaataattgcaccaactccttagtgccgattccgcccacagagagtcctggagccacagtcttttttgctttgcattgtaggagagggactaagtgctagagactatgtcgctttcctgagctaccgagagcgctcgtgaactggaatcaactgcttcagggaaaaagaaaaaaaaaaaaaaaagacttgcctgggaggccgcgagaaacttgcattggaagcttcagcaaccagcattcgagaaactcctctctactttagcacggtctccagactcagccgagagacagcaaactgcagcgcggtgagagagcgagagagagggagagagagactctccagcctgggaactataactcctctgcgagaggcggagaactccttccccaaatcttttggggacttttctctctttacccacctccgcccctgcgaggagttgaggggccagttcggccgccgcgcgcgtcttcccgttcggcgtgtgcttggcccggggaaccgggagggcccggcgatcgcgcggcggccgccgcgagggtgtgagcgcgcgtgggcgcccgccgagccgaggccatggtgcagcaaaccaacaatgccgagaacacggaagcgctgctggccggcgagagctcggactcgggcgccggcctcgagctgggaatcgcctcctcccccacgcccggctccaccgcctccacgggcggcaaggccgacgacccgagctggtgcaagaccccgagtgggcacatcaagcgacccatgaacgccttcatggtgtggtcgcagatcgagcggcgcaagatcatggagcagtcgcccgacatgcacaacgccgagatctccaagcggctgggcaaacgctggaagctgctcaaagacagcgacaagatccctttcattcgagaggcggagcggctgcgcctcaagcacatggctgactaccccgactacaagtaccggcccaggaagaaggtgaagtccggcaacgccaactccagctcctcggccgccgcctcctccaagccgggggagaagggagacaaggtcggtggcagtggcgggggcggccatgggggcggcggcggcggcgggagcagcaacgcggggggaggaggcggcggtgcgagtggcggcggcgccaactccaaaccggcgcagaaaaagagctgcggctccaaagtggcgggcggcgcgggcggtggggttagcaaaccgcacgccaagctcatcctggcaggcggcggcggcggcgggaaagcagcggctgccgccgccgcctccttcgccgccgaacaggcgggggccgccgccctgctgcccctgggcgccgccgccgaccaccactcgctgtacaaggcgcggactcccagcgcctcggcctccgcctcctcggcagcctcggcctccgcagcgctcgcggccccgggcaagcacctggcggagaagaaggtgaagcgcgtctacctgttcggcggcctgggcacgtcgtcgtcgcccgtgggcggcgtgggcgcgggagccgaccccagcgaccccctgggcctgtacgaggaggagggcgcgggctgctcgcccgacgcgcccagcctgagcggccgcagcagcgccgcctcgtcccccgccgccggccgctcgcccgccgaccaccgcggctacgccagcctgcgcgccgcctcgcccgccccgtccagcgcgccctcgcacgcgtcctcctcggcctcgtcccactcctcctcttcctcctcctcgggctcctcgtcctccgacgacgagttcgaagacgacctgctcgacctgaaccccagctcaaactttgagagcatgtccctgggcagcttcagttcgtcgtcggcgctcgaccgggacctggattttaacttcgagcccggctccggctcgcacttcgagttcccggactactgcacgcccgaggtgagcgagatgatctcgggagactggctcgagtccagcatctccaacctggttttcacctactgaagggcgcgcaggcagggagaagggccggggggggtaggagaggagaaaaaaaaagtgaaaaaaagaaacgaaaaggacagacgaagagtttaaagagaaaagggaaaaaagaaagaaaaagtaagcagggctggcttcgcccgcgttctcgtcgtcggatcaaggagcgcggcggcgttttggacccgcgctcccatcccccaccttcccgggccggggacccactctgcccagccggagggacgcggaggaggaagagggtagacaggggcgacctgtgattgttgttattgatgttgttgttgatggcaaaaaaaaaaaagcgacttcgagtttgctcccctttgcttgaagagaccccctcccccttccaacgagcttccggacttgtctgcacccccagcaagaaggcgagttagttttctagagacttgaaggagtctcccccttcctgcatcaccaccttggttttgttttattttgcttcttggtcaagaaaggaggggagaacccagcgcacccctccccccctttttttaaacgcgtgatgaagacagaaggctccggggtgacgaatttggccgatggcagatgttttgggggaacgccgggactgagagactccacgcaggcgaattcccgtttggggcttttttttcctccctcttttccccttgccccctctgcagccggaggaggagatgttgaggggaggaggccagccagtgtgaccggcgctaggaaatgacccgagaaccccgttggaagcgcagcagcgggagctaggggcgggggcggaggaggacacgaactggaagggggttcacggtcaaactgaaatggatttgcacgttggggagctggcggcggcggctgctgggcctccgccttcttttctacgtgaaatcagtgaggtgagacttcccagaccccggaggcgtggaggagaggagactgtttgatgtggtacaggggcagtcagtggagggcgagtggtttcggaaaaaaaaaaagaaaaaaagaaaaaaaaagaaaaaaaaaagatttttttcttctcttaatcggaatcgtgatggtgttggattatttcaatggtggggttaatatagcatgttatcctgtctatcttttaaagatttctgtataagactgttgagcagtttttaaaatagtgtaggataatataaaaagcagatagatggcgctatgtttgattcctacaacgaaattatcaccagctttttttcattcttaactctttaaaggattcaaacgcaactcaaatctgtgctggactttaaaaaaacaattcaggaccaaattttttctcagtgtgtgtgtttattccttataggtgtaaatgagaagacgtgtttttttccttcaccgatgctccatcctcgtatttctttttccttgtaaatgtaatcagatgccattttatatgtggacgtatttatactggccaaacatattttttcttttgtccctttttttctttcctttctttttacttcctttatttctttattccttccttttcctttttttcttttttttttctttttttttttttttttttggtagttgttgttacccacgccattttacgtctccttcactgaagggctagagttttaacttttaattttttatatttaaatgtagacttttgacacttttaaaaaacaaaaaaagacaagagagatgaaaacgtttgattattttctcagtgtatttttgtaaaaaatatataaagggggtgttaatcggtgtaaatcgctgtttggatttcctgattttataacagggcggctggttaatatctcacacagtttaaaaaatcagcccctaatttctccatgtttacacttcaatctgcaggcttcttaaagtgacagtatcccttaacctgccaccagtgtccaccctccggcccccgtcttgtaaaaaggggaggagaattagccaaacactgtaagcttttaagaaaaacaaagttttaaacgaaatactgctctgtccagaggctttaaaactggtgcaattacagcaaaaagggattctgtagctttaacttgtaaaccacatcttttttgcactttttttataagcaaaaacgtgccgtttaaaccactggatctatctaaatgccgatttgagttcgcgacactatgtactgcgtttttcattcttgtatttgactatttaatcctttctacttgtcgctaaatataattgttttagtcttatggcatgatgatagcatatgtgttcaggtttatagctgttgtgtttaaaaattgaaaaaagtggaaaacatctttgtacatttaagtctgtattataataagcaaaaagattgtgtgtatgtatgtttaatataacatgacaggcactaggacgtctgcctttttaaggcagttccgttaagggtttttgtttttaaacttttttttgccatccatcctgtgcaatatgccgtgtagaatatttgtcttaaaattcaaggccacaaaaacaatgtttgggggaaaaaaaagaaaaaatcatgccagctaatcatgtcaagttcactgcctgtcagattgttgatatataccttctgtaaataactttttttgagaaggaaataaaatcagctggaactgaaccctaaa

SEQ ID NO: 186392 - DNA, 1816 bp, Homo sapiens
  Payload ID: 16712
  Gene Symbol: SOX5
  Gene Name: SRY (sex determining region Y)-box 5
  ENST ID: ENST00000367206
  CDS Start-End: 45-1574
gaccagatgctgcggtgcacggggcagccaccatctctgcatgcatgtctgtgatgtcttccaagcgaccagcctctccgtatggggaagcagatggagaggtagccatggtgacaagcagacagaaagtggaagaagaggagagtgacgggctcccagcctttcaccttcccttgcatgtgagttttcccaacaagcctcactctgaggaatttcagccagtttctctgctgacgcaagagacttgtggccataggactcccacttctcagcacaatacaatggaagttgatggcaataaagttatgtcttcatttgccccacacaactcatctacctcacctcagaaggcagaagaaggtgggcgacagagtggcgagtccttgtctagtacagccctgggaactcctgaacggcgcaagggcagtttagctgatgttgttgacaccttgaagcagaggaaaatggaagagctcatcaaaaacgagccggaagaaacccccagtattgaaaaactactctcaaaggactggaaagacaagcttcttgcaatgggatcggggaactttggcgaaataaaagggactcccgagagcttagctgagaaagaaaggcaactcatgggtatgatcaaccagctgaccagcctccgagagcagctgttggctgcccacgatgagcagaagaaactagctgcctctcagattgagaaacagcgtcagcaaatggagctggccaagcagcaacaagaacaaattgcaagacagcagcagcagcttctacagcaacaacacaaaatcaatttgctccagcaacagatccaggttcaaggtcagctgccgccattaatgattcccgtattccctcctgatcaacggacactggctgcagctgcccagcaaggattcctcctccctccaggcttcagctataaggctggatgtagtgacccttaccctgttcagctgatcccaactaccatggcagctgctgccgcagcaacaccaggcttaggcccactccaactgcagcagttatatgctgcccagctagctgcaatgcaggtatctccaggagggaagctgccaggcataccccaaggcaaccttggtgctgctgtatctcctaccagcattcacacagacaagagcacaaacagcccaccacccaaaagcaaggatgaagtggcacagccactgaacctatcagctaaacccaagacctctgatggcaaatcacccacatcacccacctctccccatatgccagctctgagaataaacagtggggcaggccccctcaaagcctctgtcccagcagcgttagctagtccttcagccagagttagcacaataggttacttaaatgaccatgatgctgtcaccaaggcaatccaagaagctcggcaaatgaaggagcaactccgacgggaacaacaggtgcttgatgggaaggtggctgttgtgaatagtctgggtctcaataactgccgaacagaaaaggaagtgctggagtctcagagtcaagaatttatagggaatcccgagggcgtggtagcaatgaaccccacataaagcgtccaatgaatgccttcatggtgtgggctaaagatgaacggagaaagatccttcaagcctttcctgacatgcacaactccaacatcagcaagatattgggatctcgctggaaagctatgacaaacctagagaaacagccatattatgaggagcaagcccgtctcagcaagcagcacctggagaagtaccctgactataagtacaagcccaggccaaagcgcacctgcctggtggatggc

SEQ ID NO: 186393 - DNA, 3991 bp, Homo sapiens
  Payload ID: 16712
  Gene Symbol: SOX5
  Gene Name: SRY (sex determining region Y)-box 5
  Uniprot ID: P35711
  ENST ID: ENST00000381381
  CDS Start-End: 142-2070
gagaaaatcaattggtttagaaggtttggactcacttgacaggttcagttggagacgatcataggtggctgctgtgacaaagggaaattgtgcttttccagcatgcttactgaccctgatttacctcaggagtttgaaaggatgtcttccaagcgaccagcctctccgtatggggaagcagatggagaggtagccatggtgacaagcagacagaaagtggaagaagaggagagtgacgggctcccagcctttcaccttcccttgcatgtgagttttcccaacaagcctcactctgaggaatttcagccagtttctctgctgacgcaagagacttgtggccataggactcccacttctcagcacaatacaatggaagttgatggcaataaagttatgtcttcatttgccccacacaactcatctacctcacctcagaaggcagaagaaggtgggcgacagagtggcgagtccttgtctagtacagccctgggaactcctgaacggcgcaagggcagtttagctgatgttgttgacaccttgaagcagaggaaaatggaagagctcatcaaaaacgagccggaagaaacccccagtattgaaaaactactctcaaaggactggaaagacaagcttcttgcaatgggatcggggaactttggcgaaataaaagggactcccgagagcttagctgagaaagaaaggcaactcatgggtatgatcaaccagctgaccagcctccgagagcagctgttggctgcccacgatgagcagaagaaactagctgcctctcagattgagaaacagcgtcagcaaatggagctggccaagcagcaacaagaacaaattgcaagacagcagcagcagcttctacagcaacaacacaaaatcaatttgctccagcaacagatccaggttcaaggtcagctgccgccattaatgattcccgtattccctcctgatcaacggacactggctgcagctgcccagcaaggattcctcctccctccaggcttcagctataaggctggatgtagtgacccttaccctgttcagctgatcccaactaccatggcagctgctgccgcagcaacaccaggcttaggcccactccaactgcagcagttatatgctgcccagctagctgcaatgcaggtatctccaggagggaagctgccaggcataccccaaggcaaccttggtgctgctgtatctcctaccagcattcacacagacaagagcacaaacagcccaccacccaaaagcaaggaaaaaacaacactggagagtctgactcagcaactggcagttaaacagaatgaagaaggaaaatttagccatgcaatgatggatttcaatctgagtggagattctgatggaagtgctggagtctcagagtcaagaatttatagggaatcccgagggcgtggtagcaatgaaccccacataaagcgtccaatgaatgccttcatggtgtgggctaaagatgaacggagaaagatccttcaagcctttcctgacatgcacaactccaacatcagcaagatattgggatctcgctggaaagctatgacaaacctagagaaacagccatattatgaggagcaagcccgtctcagcaagcagcacctggagaagtaccctgactataagtacaagcccaggccaaagcgcacctgcctggtggatggcaaaaagctgcgcattggtgaatacaaggcaatcatgcgcaacaggcggcaggaaatgcggcagtacttcaatgttgggcaacaagcacagatccccattgccactgctggtgttgtgtaccctggagccatcgccatggctgggatgccctcccctcacctgccctcggagcactcaagcgtgtctagcagcccagagcctgggatgcctgttatccagagcacttacggtgtgaaaggagaggagccacatatcaaagaagagatacaggccgaggacatcaatggagaaatttatgatgagtacgacgaggaagaggatgatccagatgtagattatgggagtgacagtgaaaaccatattgcaggacaagccaactgataagggtcaaaagattgttgtgaccttaggacttaaagaagccctaactggttcatccttaccagtggccaagcacattaactttctcatacactgactgttactttaactgttagtcttaaatagttgggacatcagctgactaatagacctcagcctcaaaaggcttggaaagaaaaaacaaatacaacaagcaaacaacaatatcaacaacaagagattgaaataagctatgggtaaaataatgccagtaattcagctgctacatccaagcactgaagtcttacccgtcaacttttttttttttttaaataaactttatggctgtttgttctacaatgttctagaaattctcactcaggtacacagtgccaacaagtggcttgtgaatgtgttttgttgttttgtgctacaatttttaaaaagaaaaaagttttgttttgttttttggggtttctgggttttttccttttctttttctttcctttcattttttttctttgtaatgcacctgacagaaaaaaaagaaaaatgaatttctctttacttctctccaccttctccatctctctactttaaagatggaagtctgtgcatgaggggaaagagggaaaaagagcctgtttttaacttccttgctatccaccacaaaataagcaattattttctttagaggactttatctattgcacaccacactacatctttgagcaagtgccaaatttgtactgaagtgttgaccaagttcattttttctctttactttttccttttccttcttaagttaggacagtgttaaatcttagacaatcccttgaaaaacctgaaataccagcagctggtgagatttgacttttttttttaatggaaactgtaggtgctgttctcaggtgaaaagagagagagagagagagacataagaaatttagagaaaaatattttctgatcttggatttttgtgtgtatgtatgtatgtgattatggtactaataataggaataacgttggaccattgtgagttaaacccacatctggggatgaaatcccacatcctcccaagtgactggtctagaaataatcttgaccttgactttgcacttcaaatgacaacttaaccaagtatagggctcagaaattatatttttaaatgtctgattattattggatggatcaggtggccctgtgtaatagaggtgtgcatgtataacatggaagctactagcaaactgctcccagatgtcctttctccctggtcagttggttccattaacgtttgctacttagtgatttttgtttttcctgttgatattttgagcaaaacaatcattgttttcattgaatatatttggccattttttcagacaaatagaattagcttatttcttcaacattccatcctttcccgatcaggaaatgaaactgatgattttataaggtatttttcacccctccatgaagtgaggtggaggcctttagcatttcagaagtgtgggccatatgtagttcatgccataaaaagtaggatttaattaaaagtcattgcagcccaataaaatggagcctggctgcacccagggatccttgccactgctcttcccttgctgtcagattaatccactgaagtccaactttggttcaagcagagtatttgcaaagagcaacaactgaatgtgatgggactgcttatgtagattttgccagccaaatgccaaggcagttgtagggcctgtacaaataaatgcaaaatcatttcaagtcaattgccattatttgtattgaagtatcagatagatagtaaatactgcaactagtagcttgatgtgctatagttttcactccagtcatcattttcctatctcaccccccgaaacaccaccctaaagttggatttttacatataaataaaaaaagaatccctttt

SEQ ID NO: 186394 - DNA, 1379 bp, Homo sapiens
  Payload ID: 16712
  Gene Symbol: SOX5
  Gene Name: SRY (sex determining region Y)-box 5
  Uniprot ID: P35711
  ENST ID: ENST00000396007
  CDS Start-End: 61-1194
aaacagtcagttatagtgggttcaccagactgttggagatttgtgccataggagctgtgcatgcatgatgaagtggcacagccactgaacctatcagctaaacccaagacctctgatggcaaatcacccacatcacccacctctccccatatgccagctctgagaataaacagtggggcaggccccctcaaagcctctgtcccagcagcgttagctagtccttcagccagagttagcacaataggttacttaaatgaccatgatgctgtcaccaaggcaatccaagaagctcggcaaatgaaggagcaactccgacgggaacaacaggtgcttgatgggaaggtggctgttgtgaatagtctgggtctcaataactgccgaacagaaaaggaaaaaacaacactggagagtctgactcagcaactggcagttaaacagaatgaagaaggaaaatttagccatgcaatgatggatttcaatctgagtggagattctgatggaagtgctggagtctcagagtcaagaatttatagggaatcccgagggcgtggtagcaatgaaccccacataaagcgtccaatgaatgccttcatggtgtgggctaaagatgaacggagaaagatccttcaagcctttcctgacatgcacaactccaacatcagcaagatattgggatctcgctggaaagctatgacaaacctagagaaacagccatattatgaggagcaagcccgtctcagcaagcagcacctggagaagtaccctgactataagtacaagcccaggccaaagcgcacctgcctggtggatggcaaaaagctgcgcattggtgaatacaaggcaatcatgcgcaacaggcggcaggaaatgcggcagtacttcaatgttgggcaacaagcacagatccccattgccactgctggtgttgtgtaccctggagccatcgccatggctgggatgccctcccctcacctgccctcggagcactcaagcgtgtctagcagcccagagcctgggatgcctgttatccagagcacttacggtgtgaaaggagaggagccacatatcaaagaagagatacaggccgaggacatcaatggagaaatttatgatgagtacgacgaggaagaggatgatccagatgtagattatgggagtgacagtgaaaaccatattgcaggacaagccaactgataagggtcaaaagattgttgtgaccttaggacttaaagaagccctaactggttcatccttaccagtggccaagcacattaactttctcatacactgactgttactttaactgttagtcttaaatagttgggacatcagctgactaatagacctcagcctcaaaaggcttggaaagaaaaaacaaa

SEQ ID NO: 186395 - DNA, 638 bp, Homo sapiens
  Payload ID: 16712
  Gene Symbol: SOX5
  Gene Name: SRY (sex determining region Y)-box 5
  ENST ID: ENST00000441133
  CDS Start-End: 140-526
gagcgtgcgtgagtgagtgtgtgtgtgtgtgtgtgtgtgtgtgcatgcgtgtgtgaagaatgcacactatctcctgttggttcagttggagacgatcataggtggctgctgtgacaaagggaaattgtgcttttccagcatgcttactgaccctgatttacctcaggagtttgaaaggatgtcttccaagcgaccagcctctccgtatggggaagcagatggagaggtagccatggtgacaagcagacagaaagtggaagaagaggagagtgacgggctcccagcctttcaccttcccttgcatgaagttgatggcaataaagttatgtcttcatttgccccacacaactcatctacctcacctcagaaggcagaagaaggtgggcgacagagtggcgagtccttgtctagtacagccctgggaactcctgaacggcgcaagggcagtttagctgatgttgttgacaccttgaagcagaggaaaatggaagagctcatcaaaaacgagccggaaggctctcattaactttcaagtggaaacaaacaagtattttggcaatactaaacgtaaagtatttccagtgtttaattcacttcaggacaatcacatataaaaataaagcttatctaaatcttaa

SEQ ID NO: 186396 - DNA, 4261 bp, Homo sapiens
  Payload ID: 16712
  Gene Symbol: SOX5
  Gene Name: SRY (sex determining region Y)-box 5
  Uniprot ID: P35711
  ENST ID: ENST00000451604
  CDS Start-End: 103-2394
gagaaaatcaattggtttagaaggtttggactcacttgacaggttcagttggagacgatcataggtggctgctgtgacaaagggaaattgtgcttttccagcatgcttactgaccctgatttacctcaggagtttgaaaggatgtcttccaagcgaccagcctctccgtatggggaagcagatggagaggtagccatggtgacaagcagacagaaagtggaagaagaggagagtgacgggctcccagcctttcaccttcccttgcatgtgagttttcccaacaagcctcactctgaggaatttcagccagtttctctgctgacgcaagagacttgtggccataggactcccacttctcagcacaatacaatggaagttgatggcaataaagttatgtcttcatttgccccacacaactcatctacctcacctcagaaggcagaagaaggtgggcgacagagtggcgagtccttgtctagtacagccctgggaactcctgaacggcgcaagggcagtttagctgatgttgttgacaccttgaagcagaggaaaatggaagagctcatcaaaaacgagccggaagaaacccccagtattgaaaaactactctcaaaggactggaaagacaagcttcttgcaatgggatcggggaactttggcgaaataaaagggactcccgagagcttagctgagaaagaaaggcaactcatgggtatgatcaaccagctgaccagcctccgagagcagctgttggctgcccacgatgagcagaagaaactagctgcctctcagattgagaaacagcgtcagcaaatggagctggccaagcagcaacaagaacaaattgcaagacagcagcagcagcttctacagcaacaacacaaaatcaatttgctccagcaacagatccaggttcaaggtcagctgccgccattaatgattcccgtattccctcctgatcaacggacactggctgcagctgcccagcaaggattcctcctccctccaggcttcagctataaggctggatgtagtgacccttaccctgttcagctgatcccaactaccatggcagctgctgccgcagcaacaccaggcttaggcccactccaactgcagcagttatatgctgcccagctagctgcaatgcaggtatctccaggagggaagctgccaggcataccccaaggcaaccttggtgctgctgtatctcctaccagcattcacacagacaagagcacaaacagcccaccacccaaaagcaaggatgaagtggcacagccactgaacctatcagctaaacccaagacctctgatggcaaatcacccacatcacccacctctccccatatgccagctctgagaataaacagtggggcaggccccctcaaagcctctgtcccagcagcgttagctagtccttcagccagagttagcacaataggttacttaaatgaccatgatgctgtcaccaaggcaatccaagaagctcggcaaatgaaggagcaactccgacgggaacaacaggtgcttgatgggaaggtggctgttgtgaatagtctgggtctcaataactgccgaacagaaaaggaaaaaacaacactggagagtctgactcagcaactggcagttaaacagaatgaagaaggaaaatttagccatgcaatgatggatttcaatctgagtggagattctgatggaagtgctggagtctcagagtcaagaatttatagggaatcccgagggcgtggtagcaatgaaccccacataaagcgtccaatgaatgccttcatggtgtgggctaaagatgaacggagaaagatccttcaagcctttcctgacatgcacaactccaacatcagcaagatattgggatctcgctggaaagctatgacaaacctagagaaacagccatattatgaggagcaagcccgtctcagcaagcagcacctggagaagtaccctgactataagtacaagcccaggccaaagcgcacctgcctggtggatggcaaaaagctgcgcattggtgaatacaaggcaatcatgcgcaacaggcggcaggaaatgcggcagtacttcaatgttgggcaacaagcacagatccccattgccactgctggtgttgtgtaccctggagccatcgccatggctgggatgccctcccctcacctgccctcggagcactcaagcgtgtctagcagcccagagcctgggatgcctgttatccagagcacttacggtgtgaaaggagaggagccacatatcaaagaagagatacaggccgaggacatcaatggagaaatttatgatgagtacgacgaggaagaggatgatccagatgtagattatgggagtgacagtgaaaaccatattgcaggacaagccaactgataagggtcaaaagattgttgtgaccttaggacttaaagaagccctaactggttcatccttaccagtggccaagcacattaactttctcatacactgactgttactttaactgttagtcttaaatagttgggacatcagctgactaatagacctcagcctcaaaaggcttggaaagaaaaaacaaatacaacaagcaaacaacaatatcaacaacaagagattgaaataagctatgggtaaaataatgccagtaattcagctgctacatccaagcactgaagtcttacccgtcaacttttttttttttttaaataaactttatggctgtttgttctacaatgttctagaaattctcactcaggtacacagtgccaacaagtggcttgtgaatgtgttttgttgttttgtgctacaatttttaaaaagaaaaaagttttgttttgttttttggggtttctgggttttttccttttctttttctttcctttcattttttttctttgtaatgcacctgacagaaaaaaaagaaaaatgaatttctctttacttctctccaccttctccatctctctactttaaagatggaagtctgtgcatgaggggaaagagggaaaaagagcctgtttttaacttccttgctatccaccacaaaataagcaattattttctttagaggactttatctattgcacaccacactacatctttgagcaagtgccaaatttgtactgaagtgttgaccaagttcattttttctctttactttttccttttccttcttaagttaggacagtgttaaatcttagacaatcccttgaaaaacctgaaataccagcagctggtgagatttgacttttttttttaatggaaactgtaggtgctgttctcaggtgaaaagagagagagagagagagacataagaaatttagagaaaaatattttctgatcttggatttttgtgtgtatgtatgtatgtgattatggtactaataataggaataacgttggaccattgtgagttaaacccacatctggggatgaaatcccacatcctcccaagtgactggtctagaaataatcttgaccttgactttgcacttcaaatgacaacttaaccaagtatagggctcagaaattatatttttaaatgtctgattattattggatggatcaggtggccctgtgtaatagaggtgtgcatgtataacatggaagctactagcaaactgctcccagatgtcctttctccctggtcagttggttccattaacgtttgctacttagtgatttttgtttttcctgttgatattttgagcaaaacaatcattgttttcattgaatatatttggccattttttcagacaaatagaattagcttatttcttcaacattccatcctttcccgatcaggaaatgaaactgatgattttataaggtatttttcacccctccatgaagtgaggtggaggcctttagcatttcagaagtgtgggccatatgtagttcatgccataaaaagtaggatttaattaaaagtcattgcagcccaataaaatggagcctggctgcacccagggatccttgccactgctcttcccttgctgtcagattaatccactgaagtccaactttggttcaagcagagtatttgcaaagagcaacaactgaatgtgatgggactgcttatgtagattttgccagccaaatgccaaggcagttgtagggcctgtacaaataaatgcaaaatcatttcaagtcaattgccattatttgtattgaagtatcagatagatagtaaatactgcaactagtagcttgatgtgctatagttttcactccagtcatcattttcctatctcaccccccg

SEQ ID NO: 186397 - DNA, 6975 bp, Homo sapiens
  Payload ID: 16712
  Gene Symbol: SOX5
  Gene Name: SRY (sex determining region Y)-box 5
  Uniprot ID: P35711
  ENST ID: ENST00000546136
  CDS Start-End: 4-2256
aggatgtcttccaagcgaccagcctctccgtatggggaagcagatggagaggtagccatggtgacaagcagacagaaagtggaagaagaggagagtgacgggctcccagcctttcaccttcccttgcatgtgagttttcccaacaagcctcactctgaggaatttcagccagtttctctgctgacgcaagagacttgtggccataggactcccacttctcagcacaatacaatggaagttgatggcaataaagttatgtcttcatttgccccacacaactcatctacctcacctcagaaggcagaagaaggtgggcgacagagtggcgagtccttgtctagtacagccctgggaactcctgaacggcgcaagggcagtttagctgatgttgttgacaccttgaagcagaggaaaatggaagagctcatcaaaaacgagccggaagaaacccccagtattgaaaaactactctcaaaggactggaaagacaagcttcttgcaatgggatcggggaactttggcgaaataaaagggactcccgagagcttagctgagaaagaaaggcaactcatgggtatgatcaaccagctgaccagcctccgagagcagctgttggctgcccacgatgagcagaagaaactagctgcctctcagattgagaaacagcgtcagcaaatggagctggccaagcagcaacaagaacaaattgcaagacagcagcagcagcttctacagcaacaacacaaaatcaatttgctccagcaacagatccaggttcaaggtcagctgccgccattaatgattcccgtattccctcctgatcaacggacactggctgcagctgcccagcaaggattcctcctccctccaggcttcagctataaggctggatgtagtgacccttaccctgttcagctgatcccaactaccatggcagctgctgccgcagcaacaccaggcttaggcccactccaactgcagcagttatatgctgcccagctagctgcaatgcaggtatctccaggagggaagctgccaggcataccccaaggcaaccttggtgctgctgtatctcctaccagcattcacacagacaagagcacaaacagcccaccacccaaaagcaaggatgaagtggcacagccactgaacctatcagctaaacccaagacctctgatggcaaatcacccacatcacccacctctccccatatgccagctctgagaataaacagtggggcaggccccctcaaagcctctgtcccagcagcgttagctagtccttcagccagagttagcacaataggttacttaaatgaccatgatgctgtcaccaaggcaatccaagaagctcggcaaatgaaggagcaactccgacgggaacaacaggtgcttgatgggaaggtggctgttgtgaatagtctgggtctcaataactgccgaacagaaaaggaaaaaacaacactggagagtctgactcagcaactggcagttaaacagaatgaagaaggaaaatttagccatgcaatgatggatttcaatctgagtggagattctgatggaagtgctggagtctcagagtcaagaatttatagggaatcccgagggcgtggtagcaatgaaccccacataaagcgtccaatgaatgccttcatggtgtgggctaaagatgaacggagaaagatccttcaagcctttcctgacatgcacaactccaacatcagcaagatattgggatctcgctggaaagctatgacaaacctagagaaacagccatattatgaggagcaagcccgtctcagcaagcagcacctggagaagtaccctgactataagtacaagcccaggccaaagcgcacctgcctggtggatggcaaaaagctgcgcattggtgaatacaaggcaatcatgcgcaacaggcggcaggaaatgcggcagtacttcaatgttgggcaacaagcacagatccccattgccactgctggtgttgtgtaccctggagccatcgccatggctgggatgccctcccctcacctgccctcggagcactcaagcgtgtctagcagcccagagcctgggatgcctgttatccagagcacttacggtgtgaaaggagaggagccacatatcaaagaagagatacaggccgaggacatcaatggagaaatttatgatgagtacgacgaggaagaggatgatccagatgtagattatgggagtgacagtgaaaaccatattgcaggacaagccaactgataagggtcaaaagattgttgtgaccttaggacttaaagaagccctaactggttcatccttaccagtggccaagcacattaactttctcatacactgactgttactttaactgttagtcttaaatagttgggacatcagctgactaatagacctcagcctcaaaaggcttggaaagaaaaaacaaatacaacaagcaaacaacaatatcaacaacaagagattgaaataagctatgggtaaaataatgccagtaattcagctgctacatccaagcactgaagtcttacccgtcaacttttttttttttttaaataaactttatggctgtttgttctacaatgttctagaaattctcactcaggtacacagtgccaacaagtggcttgtgaatgtgttttgttgttttgtgctacaatttttaaaaagaaaaaagttttgttttgttttttggggtttctgggttttttccttttctttttctttcctttcattttttttctttgtaatgcacctgacagaaaaaaaagaaaaatgaatttctctttacttctctccaccttctccatctctctactttaaagatggaagtctgtgcatgaggggaaagagggaaaaagagcctgtttttaacttccttgctatccaccacaaaataagcaattattttctttagaggactttatctattgcacaccacactacatctttgagcaagtgccaaatttgtactgaagtgttgaccaagttcattttttctctttactttttccttttccttcttaagttaggacagtgttaaatcttagacaatcccttgaaaaacctgaaataccagcagctggtgagatttgacttttttttttaatggaaactgtaggtgctgttctcaggtgaaaagagagagagagagagagacataagaaatttagagaaaaatattttctgatcttggatttttgtgtgtatgtatgtatgtgattatggtactaataataggaataacgttggaccattgtgagttaaacccacatctggggatgaaatcccacatcctcccaagtgactggtctagaaataatcttgaccttgactttgcacttcaaatgacaacttaaccaagtatagggctcagaaattatatttttaaatgtctgattattattggatggatcaggtggccctgtgtaatagaggtgtgcatgtataacatggaagctactagcaaactgctcccagatgtcctttctccctggtcagttggttccattaacgtttgctacttagtgatttttgtttttcctgttgatattttgagcaaaacaatcattgttttcattgaatatatttggccattttttcagacaaatagaattagcttatttcttcaacattccatcctttcccgatcaggaaatgaaactgatgattttataaggtatttttcacccctccatgaagtgaggtggaggcctttagcatttcagaagtgtgggccatatgtagttcatgccataaaaagtaggatttaattaaaagtcattgcagcccaataaaatggagcctggctgcacccagggatccttgccactgctcttcccttgctgtcagattaatccactgaagtccaactttggttcaagcagagtatttgcaaagagcaacaactgaatgtgatgggactgcttatgtagattttgccagccaaatgccaaggcagttgtagggcctgtacaaataaatgcaaaatcatttcaagtcaattgccattatttgtattgaagtatcagatagatagtaaatactgcaactagtagcttgatgtgctatagttttcactccagtcatcattttcctatctcaccccccgaaacaccaccctaaagttggatttttacatataaataaaaaaagaatcccttttatttttctctctctcagaagacttgctctggggttttgcttggaggagctgatcatatcctgcatgtcagagatttcattttgtttgtttttctgtttgtttgtttttgatgactttatttacatttgaactgcctctttttgctagtgttgtaatgatgatgatgataaaataataataataatagtaataataataataatggtcagctgttcccagattagtaagttatgtataatttattttatttctccctttctattttattctgctctgatttggaagtgcagccaataagctgttagatatttaaaacaaatttccatctccaactcatatatgtatgtatatgtatatatatatatacatatatatacacacatatacacacacacacacacatttacccacaattttacttctctttccgtaagttttctcttttttaagaattttggccccaacaatatcagttctgatgtttaaaacaaaggagtgaattaataggagggtcgtgttcaatcttaattaacttatgctctcatcactcattttagttatttaattgccacagtcatctagagccaatttttttttgtttttgtttgttttgtttttaagcactctggataaggaaaaaatagacacttgtttttatatcatttttatgtacaatgtgaaaacagatttttaaaaaatttgttctctgtctttgttaacaaattccttccgatttatgtgggttcacctctcacgtttgctggatacttactttacaccatgttatgaaagatgctttgttttcatttcatgagtttgggctacaagaatactttgttttagctccaggtagatgccattgaaggcattcatggctgaaatcaattctaacacacttaccgatgaattgacaacactttggtgtttggtcttttttttgttatattttgttttatttgaaggggaaaacaaaattgttaatggtgacttttaactgctgaaattcaaaatttgattttagttaggtttatgtccgagactaaactgtgcatgaaccgaaacaaaaagcaagttcataccgctgcattctgttctcttgttctgacggttaattcactggacatcaaattttctttgccctagttttccccaaaagaaaacaaaagcaaaaatagttatattaatgttgaaagtgctttgaagtcacttgataaaaggtgctatgaatagcaacttactgtgttactacattgcctttttggcattggttgatttataattttggtaaaggatcctaaaaccctgtattctttttctgtgccccataatgaccaaaaaagataaagaaaatgagagtaagatcaaaagatcaaactaaaacataaacagtctccttcctgtctgctttcttacctatctgttcacactttatctctttccctttctctctctctctcacatgcgcgcgcgcgcgcgcgcacacacacacacacacacacttgccccaacactgagaaataatcttgccagaattctggtttttatagttgttgtagtccgtttctctaaaaatagtcctgttttcatatgaatctaagagaacattaccggagaaaataaagttactcatttatagttactaataataagttagtgattaacttaccacaattggataaaatataaaactattcttcagcacatttatacctaaattagtgaagtccatttgtgaagttcatttggcatctgcagttaagagttaaccatgtataaaatccctcccaaagaacataatcatcgttagaaccaaatcctcttataaagaacaaatataaaaaagttttctgtggtgaagctattttatagatttgatttccggagtagaattttaccttaattcacttaaagaaaattaaccattttttggtccaacttcagatattttcttaatccagaagctgtgactgttcccagaagaaacctcttatatcacatttaaaacataaaaaataattacactttcactcattctaatgggtaaattgttgaattgtaataaacaactgtatatttacaaacaggtttataaggtatttgtctatcaaattaataataaaataaaacttacggggtctgcaaggaaaactatgaaggccacttaaagtggttcaggtatccctttgtcttgtagggcatagctgttggtttagccaggcttttacagtatttaattttaaagtatcctataactatcaacttcccaggttgaagacgatgtgttgagtttcctactgattgattgattcctgtcctccccagtgtttccgtcactggttcactaaaacagtatttatatagctccactggctctaaagctcttagtccttctaatattttggattttacaagtaaaaatggaaaaaaaatagaaaagagacaatcaaatgcctggagcttaaaacaaagtatgtgcaacctaccatctcacttgaaatttaataaaataataagtaattatgtaaatataacatagagttatagatttatattttgttcataacacatagtgtaatataagttgtatattttcatgtttttggttttatgttatcattcatgccacaataaaaataaaacaggagtttatgtgctcttaaaaaaaagatgtgggttgccaccaacctgtttttcgtttttgttttttgtttattttattttatttttttgcattctcctttttcagtattactgccatgcaaggcaccaataaaaacagcaaatgtgttctttactta

SEQ ID NO: 186398 - DNA, 2769 bp, Homo sapiens
  Payload ID: 16712
  Gene Symbol: SOX5
  Gene Name: SRY (sex determining region Y)-box 5
  ENST ID: ENST00000537393
  CDS Start-End: 47-2233
gatcataggtggctgctgtgacaaagggaaattgtgcttttccagcatgcttactgaccctgatttacctcaggagtttgaaaggatgtcttccaagcgaccagcctctccgtatggggaagcagatggagaggtagccatggtgacaagcagacagaaagtggaagaagaggagagtgacgggctcccagcctttcaccttcccttgcatgaagttgatggcaataaagttatgtcttcatttgccccacacaactcatctacctcacctcagaaggcagaagaaggtgggcgacagagtggcgagtccttgtctagtacagccctgggaactcctgaacggcgcaagggcagtttagctgatgttgttgacaccttgaagcagaggaaaatggaagagctcatcaaaaacgagccggaagaaacccccagtattgaaaaactactctcaaaggactggaaagacaagcttcttgcaatgggatcggggaactttggcgaaataaaagggactcccgagagcttagctgagaaagaaaggcaactcatgggtatgatcaaccagctgaccagcctccgagagcagctgttggctgcccacgatgagcagaagaaactagctgcctctcagattgagaaacagcgtcagcaaatggagctggccaagcagcaacaagaacaaattgcaagacagcagcagcagcttctacagcaacaacacaaaatcaatttgctccagcaacagatccaggttcaaggtcagctgccgccattaatgattcccgtattccctcctgatcaacggacactggctgcagctgcccagcaaggattcctcctccctccaggcttcagctataaggctggatgtagtgacccttaccctgttcagctgatcccaactaccatggcagctgctgccgcagcaacaccaggcttaggcccactccaactgcagcagttatatgctgcccagctagctgcaatgcaggtatctccaggagggaagctgccaggcataccccaaggcaaccttggtgctgctgtatctcctaccagcattcacacagacaagagcacaaacagcccaccacccaaaagcaaggatgaagtggcacagccactgaacctatcagctaaacccaagacctctgatggcaaatcacccacatcacccacctctccccatatgccagctctgagaataaacagtggggcaggccccctcaaagcctctgtcccagcagcgttagctagtccttcagccagagttagcacaataggttacttaaatgaccatgatgctgtcaccaaggcaatccaagaagctcggcaaatgaaggagcaactccgacgggaacaacaggtgcttgatgggaaggtggctgttgtgaatagtctgggtctcaataactgccgaacagaaaaggaaaaaacaacactggagagtctgactcagcaactggcagttaaacagaatgaagaaggaaaatttagccatgcaatgatggatttcaatctgagtggagattctgatggaagtgctggagtctcagagtcaagaatttatagggaatcccgagggcgtggtagcaatgaaccccacataaagcgtccaatgaatgccttcatggtgtgggctaaagatgaacggagaaagatccttcaagcctttcctgacatgcacaactccaacatcagcaagatattgggatctcgctggaaagctatgacaaacctagagaaacagccatattatgaggagcaagcccgtctcagcaagcagcacctggagaagtaccctgactataagtacaagcccaggccaaagcgcacctgcctggtggatggcaaaaagctgcgcattggtgaatacaaggcaatcatgcgcaacaggcggcaggaaatgcggcagtacttcaatgttgggcaacaagcacagatccccattgccactgctggtgttgtgtaccctggagccatcgccatggctgggatgccctcccctcacctgccctcggagcactcaagcgtgtctagcagcccagagcctgggatgcctgttatccagagcacttacggtgtgaaaggagaggagccacatatcaaagaagagatacaggccgaggacatcaatggagaaatttatgatgagtacgacgaggaagaggatgatccagatgtagattatgggagtgacagtgaaaaccatattgcaggacaagccaactgataagggtcaaaagattgttgtgaccttaggacttaaagaagccctaactggttcatccttaccagtggccaagcacattaactttctcatacactgactgttactttaactgttagtcttaaatagttgggacatcagctgactaatagacctcagcctcaaaaggcttggaaagaaaaaacaaatacaacaagcaaacaacaatatcaacaacaagagattgaaataagctatgggtaaaataatgccagtaattcagctgctacatccaagcactgaagtcttacccgtcaacttttttttttttttaaataaactttatggctgtttgttctacaatgttctagaaattctcactcaggtacacagtgccaacaagtggcttgtgaatgtgttttgttgttttgtgctacaatttttaaaaagaaaaaagttttgttttgttttttggggtttctgggttttttccttttctttttctttcctttcattttttttctttgtaatgcacctgacagaaaaaaaagaaaaatgaa

SEQ ID NO: 186399 - DNA, 617 bp, Homo sapiens
  Payload ID: 16712
  Gene Symbol: SOX5
  Gene Name: SRY (sex determining region Y)-box 5
  ENST ID: ENST00000538083
  CDS Start-End: 184-617
ttcagtatccttttcccttggatcctgggagtaaaacctcagcagtactccctccctttgccagcctgaggagtcagagactcaaagttgttcccagctcttgcgccttcattgtagagctgcattctgctcagtgggctgccgagaaggaccagaccgaaacaagatttagaagaattctggatgtcttccaagcgaccagcctctccgtatggggaagcagatggagaggtagccatggtgacaagcagacagaaagtggaagaagaggagagtgacgggctcccagcctttcaccttcccttgcatgtgagttttcccaacaagcctcactctgaggaatttcagccagtttctctgctgacgcaagagacttgtggccataggactcccacttctcagcacaatacaatggaagttgatggcaataaagttatgtcttcatttgccccacacaactcatctacctcacctcagaaggcagaagaaggtgggcgacagagtggcgagtccttgtctagtacagccctgggaactcctgaacggcgcaagggcagtttagctgatgttgttgacaccttgaagcagaggaaaatggaagagctcatcaaaaacga

SEQ ID NO: 186400 - DNA, 2365 bp, Homo sapiens
  Payload ID: 16712
  Gene Symbol: SOX5
  Gene Name: SRY (sex determining region Y)-box 5
  Uniprot ID: P35711
  ENST ID: ENST00000541536
  CDS Start-End: 5-1933
caggatgtcttccaagcgaccagcctctccgtatggggaagcagatggagaggtagccatggtgacaagcagacagaaagtggaagaagaggagagtgacgggctcccagcctttcaccttcccttgcatgtgagttttcccaacaagcctcactctgaggaatttcagccagtttctctgctgacgcaagagacttgtggccataggactcccacttctcagcacaatacaatggaagttgatggcaataaagttatgtcttcatttgccccacacaactcatctacctcacctcagaaggcagaagaaggtgggcgacagagtggcgagtccttgtctagtacagccctgggaactcctgaacggcgcaagggcagtttagctgatgttgttgacaccttgaagcagaggaaaatggaagagctcatcaaaaacgagccggaagaaacccccagtattgaaaaactactctcaaaggactggaaagacaagcttcttgcaatgggatcggggaactttggcgaaataaaagggactcccgagagcttagctgagaaagaaaggcaactcatgggtatgatcaaccagctgaccagcctccgagagcagctgttggctgcccacgatgagcagaagaaactagctgcctctcagattgagaaacagcgtcagcaaatggagctggccaagcagcaacaagaacaaattgcaagacagcagcagcagcttctacagcaacaacacaaaatcaatttgctccagcaacagatccaggttcaaggtcagctgccgccattaatgattcccgtattccctcctgatcaacggacactggctgcagctgcccagcaaggattcctcctccctccaggcttcagctataaggctggatgtagtgacccttaccctgttcagctgatcccaactaccatggcagctgctgccgcagcaacaccaggcttaggcccactccaactgcagcagttatatgctgcccagctagctgcaatgcaggtatctccaggagggaagctgccaggcataccccaaggcaaccttggtgctgctgtatctcctaccagcattcacacagacaagagcacaaacagcccaccacccaaaagcaaggaaaaaacaacactggagagtctgactcagcaactggcagttaaacagaatgaagaaggaaaatttagccatgcaatgatggatttcaatctgagtggagattctgatggaagtgctggagtctcagagtcaagaatttatagggaatcccgagggcgtggtagcaatgaaccccacataaagcgtccaatgaatgccttcatggtgtgggctaaagatgaacggagaaagatccttcaagcctttcctgacatgcacaactccaacatcagcaagatattgggatctcgctggaaagctatgacaaacctagagaaacagccatattatgaggagcaagcccgtctcagcaagcagcacctggagaagtaccctgactataagtacaagcccaggccaaagcgcacctgcctggtggatggcaaaaagctgcgcattggtgaatacaaggcaatcatgcgcaacaggcggcaggaaatgcggcagtacttcaatgttgggcaacaagcacagatccccattgccactgctggtgttgtgtaccctggagccatcgccatggctgggatgccctcccctcacctgccctcggagcactcaagcgtgtctagcagcccagagcctgggatgcctgttatccagagcacttacggtgtgaaaggagaggagccacatatcaaagaagagatacaggccgaggacatcaatggagaaatttatgatgagtacgacgaggaagaggatgatccagatgtagattatgggagtgacagtgaaaaccatattgcaggacaagccaactgataagggtcaaaagattgttgtgaccttaggacttaaagaagccctaactggttcatccttaccagtggccaagcacattaactttctcatacactgactgttactttaactgttagtcttaaatagttgggacatcagctgactaatagacctcagcctcaaaaggcttggaaagaaaaaacaaatacaacaagcaaacaacaatatcaacaacaagagattgaaataagctatgggtaaaataatgccagtaattcagctgctacatccaagcactgaagtcttacccgtcaacttttttttttttttaaataaactttatggctgtttgttctacaatgttctagaaattctcactcaggtacacagtgccaacaagtggcttgtgaatgtgttttgttgttttgtgctacaatttttaaaaagaaaaaa

SEQ ID NO: 186401 - DNA, 758 bp, Homo sapiens
  Payload ID: 16712
  Gene Symbol: SOX5
  Gene Name: SRY (sex determining region Y)-box 5
  ENST ID: ENST00000541847
  CDS Start-End: 32-757
ggtgcacggggcagccaccatctctgcatgcatgtctgtgatgtcttccaagcgaccagcctctccgtatggggaagcagatggagaggtagccatggtgacaagcagacagaaagtggaagaagaggagagtgacgggctcccagcctttcaccttcccttgcatgtgagttttcccaacaagcctcactctgaggaatttcagccagtttctctgctgacgcaagagacttgtggccataggactcccacttctcagcacaatacaatggaagttgatggcaataaagttatgtcttcatttgccccacacaactcatctacctcacctcagaaggcagaagaaggtgggcgacagagtggcgagtccttgtctagtacagccctgggaactcctgaacggcgcaagggcagtttagctgatgttgttgacaccttgaagcagaggaaaatggaagagctcatcaaaaacgagccggaagaaacccccagtattgaaaaactactctcaaaggactggaaagacaagcttcttgcaatgggatcggggaactttggcgaaataaaagggactcccgagagcttagctgagaaagaaaggcaactcatgggtatgatcaaccagctgaccagcctccgagagcagctgttggctgcccacgatgagcagaagaaactagctgcctctcagattgagaaacagcgtcagcaaatggagctggccaagcagcaacaagaacaagtgagtaagaactagc

SEQ ID NO: 186402 - DNA, 2589 bp, Homo sapiens
  Payload ID: 16712
  Gene Symbol: SOX5
  Gene Name: SRY (sex determining region Y)-box 5
  Uniprot ID: P35711
  ENST ID: ENST00000545921
  CDS Start-End: 157-2418
agtaggagtggagagcgtgcgtgagtgagtgtgtgtgtgtgtgtgtgtgtgtgtgcatgcgtgtgtgaagaatgcacactatctcctgttggtaagtgtgtgcttactccctgaccagatgctgcggtgcacggggcagccaccatctctgcatgcatgtctgtgatgtcttccaagcgaccagcctctccgtatggggaagcagatggagaggtagccatggtgacaagcagacagaaagtggaagaagaggagagtgacgggctcccagcctttcaccttcccttgcatgtgagttttcccaacaagcctcactctgaggaatttcagccagtttctctgctgacgcaagagacttgtggccataggactcccacttctcagcacaatacaatggaagttgatggcaataaagttatgtcttcatttgccccacacaactcatctacctcacctcagaaggcagaagaaggtgggcgacagagtggcgagtccttgtctagtacagccctgggaactcctgaacggcgcaagggcagtttagctgatgttgttgacaccttgaagcagaggaaaatggaagagctcatcaaaaacgagccggaagaaacccccagtattgaaaaactactctcaaaggactggaaagacaagcttcttgcaatgggatcggggaactttggcgaaataaaagggactcccgagagcttagctgagaaagaaaggcaactcatgggtatgatcaaccagctgaccagcctccgagagcagctgttggctgcccacgatgagcagaagaaactagctgcctctcagattgagaaacagcgtcagcaaatggagctggccaagcagcaacaagaacaaattgcaagacagcagcagcagcttctacagcaacaacacaaaatcaatttgctccagcaacagatccaggttcaaggtcagctgccgccattaatgattcccgtattccctcctgatcaacggacactggctgcagctgcccagcaaggattcctcctccctccaggcttcagctataaggctggatgtagtgacccttaccctgttcagctgatcccaactaccatggcagctgctgccgcagcaacaccaggcttaggcccactccaactgcagcagttatatgctgcccagctagctgcaatgcaggtatctccaggagggaagctgccaggcataccccaaggcaaccttggtgctgctgtatctcctaccagcattcacacagacaagagcacaaacagcccaccacccaaaagcaaggatgaagtggcacagccactgaacctatcagctaaacccaagacctctgatggcaaatcacccacatcacccacctctccccatatgccagctctgagaataaacagtggggcaggccccctcaaagcctctgtcccagcagcgttagctagtccttcagccagagttagcacaataggttacttaaatgaccatgatgctgtcaccaaggcaatccaagaagctcggcaaatgaaggagcaactccgacgggaacaacaggtgcttgatgggaaggtggctgttgtgaatagtctgggtctcaataactgccgaacagaaaaggaaaaaacaacactggagagtctgactcagcaactggcagttaaacagaatgaagaaggaaaatttagccatgcaatgatggatttcaatctgagtggagattctgatggaagtgctggagtctcagagtcaagaatttatagggaatcccgagggcgtggtagcaatgaaccccacataaagcgtccaatgaatgccttcatggtgtgggctaaagatgaacggagaaagatccttcaagcctttcctgacatgcacaactccaacatcagcaagatattgggatctcgctggaaagctatgacaaacctagagaaacagccatattatgaggagcaagcccgtctcagcaagcagcacctggagaagtaccctgactataagtacaagcccaggccaaagcgcacctgcctggtggatggcaaaaagctgcgcattggtgaatacaaggcaatcatgcgcaacaggcggcaggaaatgcggcagtacttcaatgttgggcaacaagcacagatccccattgccactgctggtgttgtgtaccctggagccatcgccatggctgggatgccctcccctcacctgccctcggagcactcaagcgtgtctagcagcccagagcctgggatgcctgttatccagagcacttacggtgtgaaaggagaggagccacatatcaaagaagagatacaggccgaggacatcaatggagaaatttatgatgagtacgacgaggaagaggatgatccagatgtagattatgggagtgacagtgaaaaccatattgcaggacaagccaactgataagggtcaaaagattgttgtgaccttaggacttaaagaagccctaactggttcatccttaccagtggccaagcacattaactttctcatacactgactgttactttaactgttagtcttaaatagttgggacatcagctgactaatagacctcagcctcaaaaggcttgg

SEQ ID NO: 186403 - DNA, 8808 bp, Homo sapiens
  Payload ID: 16713
  Gene Symbol: SOX6
  Gene Name: SRY (sex determining region Y)-box 6
  Uniprot ID: P35712
  ENST ID: ENST00000316399
  CDS Start-End: 22-2448
ctgttttttttctgcagaagaatgtcttccaagcaagccacctctccatttgcctgtgcagctgatggagaggatgcaatgacccaggatttaacctcaagggaaaaggaagagggcagtgatcaacatgtggcctcccatctgcctctgcaccccataatgcacaacaaacctcactctgaggagctaccaacacttgtcagtaccattcaacaagatgctgactgggacagcgttctgtcatctcagcaaagaatggaatcagagaataataagttatgttccctatattccttccgaaatacctctacctcaccacataagcctgacgaagggagtcgggaccgtgagataatgaccagtgttacttttggaaccccagagcgccgcaaagggagtcttgccgatgtggtggacacactgaaacagaagaagcttgaggaaatgactcggactgaacaagaggattcctcctgcatggaaaaactactttcaaaagattggaaggaaaaaatggaaagactaaataccagtgaacttcttggagaaattaaaggtacacctgagagcctggcagaaaaagaacggcagctctccaccatgattacccagctgatcagtttacgggagcagctactggcagcgcatgatgaacagaaaaaactggcagcgtcacaaattgagaaacaacggcagcaaatggaccttgctcgccaacagcaagaacagattgcgagacaacagcagcaacttctgcaacagcagcacaaaattaatctcctgcagcaacagatccaggttcagggtcacatgcctccgctcatgatcccaatttttccacatgaccagcggactctggcagcagctgctgctgcccaacagggattcctcttcccccctggaataacatacaaaccaggtgataactaccccgtacagttcattccatcaacaatggcagctgctgctgcttctggactcagccctttacagctccagaagggtcatgtctcccacccacaaattaaccaaaggctaaagggcctaagtgaccgttttggcaggaatttggacacctttgaacatggtggtggccactcttacaaccacaaacagattgagcagctctatgccgctcagctggccagcatgcaggtgtcacctggagcaaagatgccatcaactccacagccaccaaacacagcagggacggtctcacctactgggataaaaaatgaaaagagagggaccagccctgtaactcaagttaaggatgaagcagcagcacagcctctgaatctctcatcccgacccaagacagcagagcctgtaaagtccccaacgtctcccacccagaacctcttcccagccagcaaaaccagccctgtcaatctgccaaacaaaagcagcatccctagccccattggaggaagcctgggaagaggatcctctttagatatcctatctagtctcaactcccctgccctttttggggatcaggatacagtgatgaaagccattcaggaggcgcggaagatgcgagagcagatccagcgggagcaacagcagcaacagccacatggtgttgacgggaaactgtcctccataaataatatggggctgaacagctgcaggaatgaaaaggaaagaacgcgctttgagaatttggggccccagttaacgggaaagtcaaatgaagatggaaaactgggcccaggtgtcatcgaccttactcggccagaagatgcagagggaggtgccactgtggctgaagcacgagtctacagggacgcccgcggccgtgccagcagcgagccacacattaagcgaccaatgaatgcattcatggtttgggcaaaggatgagaggagaaaaatccttcaggccttccccgacatgcataactccaacattagcaaaatcttaggatctcgctggaaatcaatgtccaaccaggagaagcaaccttattatgaagagcaggcccggctaagcaagatccacttagagaagtacccaaactataaatacaaaccccgaccgaaacgcacctgcattgttgatggcaaaaagcttcggattggggagtataagcaactgatgaggtctcggagacaggagatgaggcagttctttactgtggggcaacagcctcagattccaatcaccacaggaacaggtgttgtgtatcctggtgctatcactatggcaactaccacaccatcgcctcagatgacatctgactgctctagcacctcggccagcccggagcccagcctcccggtcatccagagcacttatggtatgaagacagatggcggaagcctagctggaaatgaaatgatcaatggagaggatgaaatggaaatgtatgatgactatgaagatgaccccaaatcagactatagcagtgaaaatgaagccccggaggctgtcagtgccaactgaggagtttttgtttgctgaattaaagtactctgacatttcacccccctccccaacaaagagttattaaagagcccgcatgcatttgtggctccacaattacatcagcagaatggtcttaattgtttcgtaaagtgtgagacagattaagttttccctgatttttcatgaacttgagttttttgttgttattgttattgttgttgttgttgtttttttaatttaggtgaagacatattaaatatgagacaccaggacttgaaacttatctcaacccgtagatgtcttacaagtcttatatttttgtcttactttttttttcttttggatgttgataaaggtttaagttactgttttagatggggttaaacattctcactcaggtatgctgtgccggcctacaggttgtgaatgtgtttttattctgaattattttagaaaacaactgaggatttcatattgtgaaacagaacaagtccacggcgtgtgcagctgcatgtagagcatattcaaaaggcctcggaattccaattttccatttgtagagttaaactttgaatgtgccaaactttttcgtaacttttgaatcttaatattttgaaagtcttaaaggagacactgcaaagtcttagacaatctttggcatcttaaaataaaatagcaaaccaacatttttttttccagaaaatggtaaggtactcaggaatctggagacaagatattgtaaggaatgaacaaggttgccacagtgcatggacccaattgtgtttgcctgttgacgtgccatcagtgcgtgatgtggtatgacatacacacaccagagcaaccgccacaccagatatcgacagagtggtcttctctgcctgagaccacctctcactacatccattatccctttgcctttaaccctgacattcagtcttaacacattttatcttaaataatttattcattccagaatgtcaagggtccacttgctatttattttttttcaattgttggtggcattaatttaataattcttgtttttcaccttccttccccgaagaacttttccgtccttttcacctccttctcctgtgtacatagtgattttatgtccccagaacgcctggaagcatttctgaaaccaagatattattaaaaacctattattgtttttaatcatgagtatgtatctggctgcagggctgtgtattgggatataggtatatagtcttacacttaaacaggtatgcccctgaggttcactgtgacctcaagtcttttgccagaattttcccctaattcagttcacaagtggtagggtctgcatcagtggcatttccccctgaattccattcagcagcaaggttcaacagtggtgactgccaggcaggagagtcctgcggccaaacctgaagcccaaggctcgtgggccatgcaggaatctcagtgaagctgtcatgggctggcacctttacactgagttgccttgtcccagctggcacatctagggagttcattgcaaaatccccaggatgcaaaaagccacatgacagcctcagagcaaagatggtggcaaatagtcatgatacatctagagaatgaaagaaaactgtaagggaggagaaggaggggaatacattccctatatgggatgttcctactgttaactctggggaacagatagctccgggggcagcagatgagttcctctggctgactctatctgtagccacatggggacctgcctacgtgtgaacaaaatgaactgcacttatcacacaaggatttctttgaagacatgctactggggtgggaagcagtgaggttttattccccatctcctaactacagggagctctgccatgtcattttggccttcctgaaactaggacaggttgtctatcggggggcttcccccagagaggtttagtgggagaatgtcagtgaatgggatagttcacctcatgggacaacccagaatctgatcaccaggacataggaatggccccatcagatttcttgagccattttgtcacttggaagaaaatagtgtacctttgtatttatttaagagtgctcaaggcctaatagcaataaacaggtctagccaagaaattacaagctattctgttagctgggagtgctctctataagctgattaaggtactgataggaactctttgttattcatgttggttggggattagaaatttgtttttgtacatttatttcaaatgaggaggaggtcattttttctctcaaaaaatgagtatttattattgtcttactgatttctttgattatatacctctcctcctcagttcactcttgttttttttctttctctttggcttttgcttttgctctctctcacttctttcttattttgttgcattggtagagtgttgtatggctagcattgtattgtatgtaattaattttgcacaaaagcaaacatttagcatagtaggttaattttgtttgtttttatgaccatgccaaaataatattctgggctggtggagaacaaaggactgttctttaggactgaaacttgattttgctcatagtaagtaaaaaaaaacaaaaaacacacacactcacagatgttgtttcgtaagtgttataagcactggatataaatggtattttttatcacttctgactaatgtgaaactgttgtacgaaaactacatgaacaaaagtcatctgtttcgactcgtgtgggcttgcctcacagttgccggatttgagtcatttttatgtcttgttatttcatttatttatgcaaaatacatgtgtgtatgaacactttgttttagctccagctctgcctcagtactggggttcatttacttttagccatgttcttaaaaatgaaaggctattcaggaatgatctgattgtaaacgtctttttcattggatcaaacagtaatgctgtatttgaatctaaattttgtgtataagcagtttatttattagccaagtttggctctaaatatccatggaaattaagaatgacaatcatagggatcaattcattttattttcagtggggcttaaacaaagtttatatgactttaccatctcattttagatttttctaattgtgtaaatataacatagaaatagaatttatttttggttcatgaatacttagtgagatataagttatgtatttcctttttgttctctatccatagatgttggtccaaactgaaagttgatgagtcactgtgcctctcggggtagtgagttatcagctacagtgagagagcagtgtttggcctgcagctgggacagcaaaacgtttcaccagggttctcatgcagttcagaacccactgtccacagatccagacatttcccttttttcttacagaaagttgatgattggacatactaaatttccactacagttaggagacagtcagtttgctttgggagtctacataaatcttctaagatagttctgtgaccatttaatagcaagaagcatgaatgccactacaaaggcaaaaatccacctctgagatcggccgttaataaacgtcccgtcatgtcagtttagattcaagaatgttaagcaactttgtttttgcggtgctccctatttcatagtatcttcaaatcaaaaataaaaattatctccattttgttaaagaacttacagggtcagggttctccttgtcacttagaattgggacactgccaggcaatcctctcccaaaaaaaaaaaaaaaaaaaaatagccatatggaatggaaggaaaaggagaaaagaaggaagaaaggaaaaaagtaggaagggagagagaaaaaaaaggtcgctttgcggatacgagccgctaggctgacaacttttctatttcattggcagatatgaagcagtgtcttttccagtaaggtacggaagctttgttgttttcatgtgtacccagctcagccttttagaagcacctcggtttgcttcattaggtatttgatactctccagccttgtcctcaggcctgatttgatttgccagggtcctgacaccaaagcccaggccaagttctaaattcaggtgtgggctcacagtgctattgagcttgtcgaattctggcctcccctgaacattagccccacgggagcctgagggtgtttgaaaagggcgtgatcactctagggctgaaattaaaggctgctttcttttccttctgaagccaggctgcttcttcggagtacaccctcctgagccaggagcacaagcactagcagaaagcagggattgtttcaggaaagcccatttaccctcagtaggaaggcagcctggtcacttgaacagcacagctgaggctgcttctctcaatttactcattttgcaaagaattgacctctaccaactcattagggagaggaaaaagaatcacttagtaattttaaatcatatgagaagtcctgtaccaagtgccaacaactgcaaagaaatgcagctagaggaatgtattgaaattactactgggtcttcctttttaatgagaaaatgacaaaaatggttgctgtagccctgcctgattttgtacacgtttgtctaagaattgagttggcacttaagctcacttctcaaagtataataatattgtatgacctcatttgtcctttcacaaaagcacttgcatcatttccttaagtcatctgctccctgacatgttttcttccctaataaacaacttctgtctgttattcctgccaatgatgttctgtttctgatgccatatcctattgagcgtgcccctgtactaatatcattgaaaatattgatatgcaaacacatttccttttcatccccattctatctttccctttggggacagattgctttccaaaagctcatgaacaaatatttggaatgctggtacctttggggcagaggtaagggtgggcggggtgggggcagaaaggtaatgcttaatgcagataactcttctaatcagtgtccatggcaatatgaacgcttgaagaaaactcagtgacatatcttgctcagtagtttcttattcctgaagaaccacaagcataaagtgaggcctcagtgctggtgctcttggagtatggggaatgtgcaaatatttaactgttttgtatgctgcacattgcaggtctgctcatgtgcattctccctttgtcttcctttgtcatatgtgtttttgcttttttgaaagtgcagtctttattgtaccctcctccagcttgtagcaaattagaatgcttagcatttatgttcattcattattgtatttgccatgtaaaatttttattaccttagacaagcttataagctgttactacataacttatcttactgtaactcttttatttcccccgacgttgtaatttgtttgtgatgtatattgtgaaattgtattctatgttaatttaatcagcacaattcactgacatgctggactgacatgctggctgctgtttcaaagtgtaaagtttgtgtagggctgttgggacaactgcaactctgttgtcaaggtactgtgctttggttcctatagcaacactgggtgtggcccttgaattgctaagggcatttaatacatcctggagcaaattttaactgcagattttctttgtagaaattctatgtataatgcaggtacctacttggcccatggctggtaactatttgggcaattagaaaaaaagaaaaaaacataaaaactagtgtctattgctgctttgaatatgtttgaaagtctgaaaatgtaaatagtttatcaaaaaaaaatcttgtacagtccagtgtaaagtttttaaatgaccttaagggttgccatcacatctttctcacactctcctcttgataataataataataaaaagtttgctaaggattaaagaaatgggaaaaataaaaaaaatctcttcaaatttacaggaatgaatcattgttcttagctttgttgcatacacaaacttcttggattttgttgtgcagtattgacgtgagataaagctcaacattgaataatctttcagtggtacttttcaaagtcttcccctcctctgcctcataattaagggaaaagacaaaattgaaagacacactgtctttatctatcctggtgtatgttggcaccttagctactttttttttttcctttttgcacaaggtgctttcctgatatgttcaacatgccatctttgggtgataatgtatatgccgtgatggggctcaggccccttaggggagtgtctataagaactgcctatttatgctcatttacctcaagactgtcctctctaccctaatctagttgtcatcactccatcttttgtactgctgttgacacttacaaattaaagataaattttgttttatga

SEQ ID NO: 186404 - DNA, 8865 bp, Homo sapiens
  Payload ID: 16713
  Gene Symbol: SOX6
  Gene Name: SRY (sex determining region Y)-box 6
  Uniprot ID: P35712
  ENST ID: ENST00000396356
  CDS Start-End: 79-2505
gtcactttcatgaattcaaaggcaatttaccagtgatttctgggtgctggggctgatattttttgtgcatatttaagaatgtcttccaagcaagccacctctccatttgcctgtgcagctgatggagaggatgcaatgacccaggatttaacctcaagggaaaaggaagagggcagtgatcaacatgtggcctcccatctgcctctgcaccccataatgcacaacaaacctcactctgaggagctaccaacacttgtcagtaccattcaacaagatgctgactgggacagcgttctgtcatctcagcaaagaatggaatcagagaataataagttatgttccctatattccttccgaaatacctctacctcaccacataagcctgacgaagggagtcgggaccgtgagataatgaccagtgttacttttggaaccccagagcgccgcaaagggagtcttgccgatgtggtggacacactgaaacagaagaagcttgaggaaatgactcggactgaacaagaggattcctcctgcatggaaaaactactttcaaaagattggaaggaaaaaatggaaagactaaataccagtgaacttcttggagaaattaaaggtacacctgagagcctggcagaaaaagaacggcagctctccaccatgattacccagctgatcagtttacgggagcagctactggcagcgcatgatgaacagaaaaaactggcagcgtcacaaattgagaaacaacggcagcaaatggaccttgctcgccaacagcaagaacagattgcgagacaacagcagcaacttctgcaacagcagcacaaaattaatctcctgcagcaacagatccaggttcagggtcacatgcctccgctcatgatcccaatttttccacatgaccagcggactctggcagcagctgctgctgcccaacagggattcctcttcccccctggaataacatacaaaccaggtgataactaccccgtacagttcattccatcaacaatggcagctgctgctgcttctggactcagccctttacagctccagaagggtcatgtctcccacccacaaattaaccaaaggctaaagggcctaagtgaccgttttggcaggaatttggacacctttgaacatggtggtggccactcttacaaccacaaacagattgagcagctctatgccgctcagctggccagcatgcaggtgtcacctggagcaaagatgccatcaactccacagccaccaaacacagcagggacggtctcacctactgggataaaaaatgaaaagagagggaccagccctgtaactcaagttaaggatgaagcagcagcacagcctctgaatctctcatcccgacccaagacagcagagcctgtaaagtccccaacgtctcccacccagaacctcttcccagccagcaaaaccagccctgtcaatctgccaaacaaaagcagcatccctagccccattggaggaagcctgggaagaggatcctctttagatatcctatctagtctcaactcccctgccctttttggggatcaggatacagtgatgaaagccattcaggaggcgcggaagatgcgagagcagatccagcgggagcaacagcagcaacagccacatggtgttgacgggaaactgtcctccataaataatatggggctgaacagctgcaggaatgaaaaggaaagaacgcgctttgagaatttggggccccagttaacgggaaagtcaaatgaagatggaaaactgggcccaggtgtcatcgaccttactcggccagaagatgcagagggaggtgccactgtggctgaagcacgagtctacagggacgcccgcggccgtgccagcagcgagccacacattaagcgaccaatgaatgcattcatggtttgggcaaaggatgagaggagaaaaatccttcaggccttccccgacatgcataactccaacattagcaaaatcttaggatctcgctggaaatcaatgtccaaccaggagaagcaaccttattatgaagagcaggcccggctaagcaagatccacttagagaagtacccaaactataaatacaaaccccgaccgaaacgcacctgcattgttgatggcaaaaagcttcggattggggagtataagcaactgatgaggtctcggagacaggagatgaggcagttctttactgtggggcaacagcctcagattccaatcaccacaggaacaggtgttgtgtatcctggtgctatcactatggcaactaccacaccatcgcctcagatgacatctgactgctctagcacctcggccagcccggagcccagcctcccggtcatccagagcacttatggtatgaagacagatggcggaagcctagctggaaatgaaatgatcaatggagaggatgaaatggaaatgtatgatgactatgaagatgaccccaaatcagactatagcagtgaaaatgaagccccggaggctgtcagtgccaactgaggagtttttgtttgctgaattaaagtactctgacatttcacccccctccccaacaaagagttattaaagagcccgcatgcatttgtggctccacaattacatcagcagaatggtcttaattgtttcgtaaagtgtgagacagattaagttttccctgatttttcatgaacttgagttttttgttgttattgttattgttgttgttgttgtttttttaatttaggtgaagacatattaaatatgagacaccaggacttgaaacttatctcaacccgtagatgtcttacaagtcttatatttttgtcttactttttttttcttttggatgttgataaaggtttaagttactgttttagatggggttaaacattctcactcaggtatgctgtgccggcctacaggttgtgaatgtgtttttattctgaattattttagaaaacaactgaggatttcatattgtgaaacagaacaagtccacggcgtgtgcagctgcatgtagagcatattcaaaaggcctcggaattccaattttccatttgtagagttaaactttgaatgtgccaaactttttcgtaacttttgaatcttaatattttgaaagtcttaaaggagacactgcaaagtcttagacaatctttggcatcttaaaataaaatagcaaaccaacatttttttttccagaaaatggtaaggtactcaggaatctggagacaagatattgtaaggaatgaacaaggttgccacagtgcatggacccaattgtgtttgcctgttgacgtgccatcagtgcgtgatgtggtatgacatacacacaccagagcaaccgccacaccagatatcgacagagtggtcttctctgcctgagaccacctctcactacatccattatccctttgcctttaaccctgacattcagtcttaacacattttatcttaaataatttattcattccagaatgtcaagggtccacttgctatttattttttttcaattgttggtggcattaatttaataattcttgtttttcaccttccttccccgaagaacttttccgtccttttcacctccttctcctgtgtacatagtgattttatgtccccagaacgcctggaagcatttctgaaaccaagatattattaaaaacctattattgtttttaatcatgagtatgtatctggctgcagggctgtgtattgggatataggtatatagtcttacacttaaacaggtatgcccctgaggttcactgtgacctcaagtcttttgccagaattttcccctaattcagttcacaagtggtagggtctgcatcagtggcatttccccctgaattccattcagcagcaaggttcaacagtggtgactgccaggcaggagagtcctgcggccaaacctgaagcccaaggctcgtgggccatgcaggaatctcagtgaagctgtcatgggctggcacctttacactgagttgccttgtcccagctggcacatctagggagttcattgcaaaatccccaggatgcaaaaagccacatgacagcctcagagcaaagatggtggcaaatagtcatgatacatctagagaatgaaagaaaactgtaagggaggagaaggaggggaatacattccctatatgggatgttcctactgttaactctggggaacagatagctccgggggcagcagatgagttcctctggctgactctatctgtagccacatggggacctgcctacgtgtgaacaaaatgaactgcacttatcacacaaggatttctttgaagacatgctactggggtgggaagcagtgaggttttattccccatctcctaactacagggagctctgccatgtcattttggccttcctgaaactaggacaggttgtctatcggggggcttcccccagagaggtttagtgggagaatgtcagtgaatgggatagttcacctcatgggacaacccagaatctgatcaccaggacataggaatggccccatcagatttcttgagccattttgtcacttggaagaaaatagtgtacctttgtatttatttaagagtgctcaaggcctaatagcaataaacaggtctagccaagaaattacaagctattctgttagctgggagtgctctctataagctgattaaggtactgataggaactctttgttattcatgttggttggggattagaaatttgtttttgtacatttatttcaaatgaggaggaggtcattttttctctcaaaaaatgagtatttattattgtcttactgatttctttgattatatacctctcctcctcagttcactcttgttttttttctttctctttggcttttgcttttgctctctctcacttctttcttattttgttgcattggtagagtgttgtatggctagcattgtattgtatgtaattaattttgcacaaaagcaaacatttagcatagtaggttaattttgtttgtttttatgaccatgccaaaataatattctgggctggtggagaacaaaggactgttctttaggactgaaacttgattttgctcatagtaagtaaaaaaaaacaaaaaacacacacactcacagatgttgtttcgtaagtgttataagcactggatataaatggtattttttatcacttctgactaatgtgaaactgttgtacgaaaactacatgaacaaaagtcatctgtttcgactcgtgtgggcttgcctcacagttgccggatttgagtcatttttatgtcttgttatttcatttatttatgcaaaatacatgtgtgtatgaacactttgttttagctccagctctgcctcagtactggggttcatttacttttagccatgttcttaaaaatgaaaggctattcaggaatgatctgattgtaaacgtctttttcattggatcaaacagtaatgctgtatttgaatctaaattttgtgtataagcagtttatttattagccaagtttggctctaaatatccatggaaattaagaatgacaatcatagggatcaattcattttattttcagtggggcttaaacaaagtttatatgactttaccatctcattttagatttttctaattgtgtaaatataacatagaaatagaatttatttttggttcatgaatacttagtgagatataagttatgtatttcctttttgttctctatccatagatgttggtccaaactgaaagttgatgagtcactgtgcctctcggggtagtgagttatcagctacagtgagagagcagtgtttggcctgcagctgggacagcaaaacgtttcaccagggttctcatgcagttcagaacccactgtccacagatccagacatttcccttttttcttacagaaagttgatgattggacatactaaatttccactacagttaggagacagtcagtttgctttgggagtctacataaatcttctaagatagttctgtgaccatttaatagcaagaagcatgaatgccactacaaaggcaaaaatccacctctgagatcggccgttaataaacgtcccgtcatgtcagtttagattcaagaatgttaagcaactttgtttttgcggtgctccctatttcatagtatcttcaaatcaaaaataaaaattatctccattttgttaaagaacttacagggtcagggttctccttgtcacttagaattgggacactgccaggcaatcctctcccaaaaaaaaaaaaaaaaaaaaatagccatatggaatggaaggaaaaggagaaaagaaggaagaaaggaaaaaagtaggaagggagagagaaaaaaaaggtcgctttgcggatacgagccgctaggctgacaacttttctatttcattggcagatatgaagcagtgtcttttccagtaaggtacggaagctttgttgttttcatgtgtacccagctcagccttttagaagcacctcggtttgcttcattaggtatttgatactctccagccttgtcctcaggcctgatttgatttgccagggtcctgacaccaaagcccaggccaagttctaaattcaggtgtgggctcacagtgctattgagcttgtcgaattctggcctcccctgaacattagccccacgggagcctgagggtgtttgaaaagggcgtgatcactctagggctgaaattaaaggctgctttcttttccttctgaagccaggctgcttcttcggagtacaccctcctgagccaggagcacaagcactagcagaaagcagggattgtttcaggaaagcccatttaccctcagtaggaaggcagcctggtcacttgaacagcacagctgaggctgcttctctcaatttactcattttgcaaagaattgacctctaccaactcattagggagaggaaaaagaatcacttagtaattttaaatcatatgagaagtcctgtaccaagtgccaacaactgcaaagaaatgcagctagaggaatgtattgaaattactactgggtcttcctttttaatgagaaaatgacaaaaatggttgctgtagccctgcctgattttgtacacgtttgtctaagaattgagttggcacttaagctcacttctcaaagtataataatattgtatgacctcatttgtcctttcacaaaagcacttgcatcatttccttaagtcatctgctccctgacatgttttcttccctaataaacaacttctgtctgttattcctgccaatgatgttctgtttctgatgccatatcctattgagcgtgcccctgtactaatatcattgaaaatattgatatgcaaacacatttccttttcatccccattctatctttccctttggggacagattgctttccaaaagctcatgaacaaatatttggaatgctggtacctttggggcagaggtaagggtgggcggggtgggggcagaaaggtaatgcttaatgcagataactcttctaatcagtgtccatggcaatatgaacgcttgaagaaaactcagtgacatatcttgctcagtagtttcttattcctgaagaaccacaagcataaagtgaggcctcagtgctggtgctcttggagtatggggaatgtgcaaatatttaactgttttgtatgctgcacattgcaggtctgctcatgtgcattctccctttgtcttcctttgtcatatgtgtttttgcttttttgaaagtgcagtctttattgtaccctcctccagcttgtagcaaattagaatgcttagcatttatgttcattcattattgtatttgccatgtaaaatttttattaccttagacaagcttataagctgttactacataacttatcttactgtaactcttttatttcccccgacgttgtaatttgtttgtgatgtatattgtgaaattgtattctatgttaatttaatcagcacaattcactgacatgctggactgacatgctggctgctgtttcaaagtgtaaagtttgtgtagggctgttgggacaactgcaactctgttgtcaaggtactgtgctttggttcctatagcaacactgggtgtggcccttgaattgctaagggcatttaatacatcctggagcaaattttaactgcagattttctttgtagaaattctatgtataatgcaggtacctacttggcccatggctggtaactatttgggcaattagaaaaaaagaaaaaaacataaaaactagtgtctattgctgctttgaatatgtttgaaagtctgaaaatgtaaatagtttatcaaaaaaaaatcttgtacagtccagtgtaaagtttttaaatgaccttaagggttgccatcacatctttctcacactctcctcttgataataataataataaaaagtttgctaaggattaaagaaatgggaaaaataaaaaaaatctcttcaaatttacaggaatgaatcattgttcttagctttgttgcatacacaaacttcttggattttgttgtgcagtattgacgtgagataaagctcaacattgaataatctttcagtggtacttttcaaagtcttcccctcctctgcctcataattaagggaaaagacaaaattgaaagacacactgtctttatctatcctggtgtatgttggcaccttagctactttttttttttcctttttgcacaaggtgctttcctgatatgttcaacatgccatctttgggtgataatgtatatgccgtgatggggctcaggccccttaggggagtgtctataagaactgcctatttatgctcatttacctcaagactgtcctctctaccctaatctagttgtcatcactccatcttttgtactgctgttgacacttacaaattaaagataaattttgttttatga

SEQ ID NO: 186405 - DNA, 2707 bp, Homo sapiens
  Payload ID: 16713
  Gene Symbol: SOX6
  Gene Name: SRY (sex determining region Y)-box 6
  Uniprot ID: P35712
  ENST ID: ENST00000528252
  CDS Start-End: 192-2597
ccttggggttagttttagtcatatttttatctctataaaacatcaggctgggaggtggtgtgtgcctgtagtctcaactgctagggagcctgaggcaggaagactccttgagcacaggagttcaaggccagcctgtgcaacatagtgagaccctatcactctggaaaaaaaaaaaaaatctgcggagaagaatgtcttccaagcaagccacctctccatttgcctgtgcagctgatggagaggatgcaatgacccaggatttaacctcaagggaaaaggaagagggcagtgatcaacatgtggcctcccatctgcctctgcaccccataatgcacaacaaacctcactctgaggagctaccaacacttgtcagtaccattcaacaagatgctgactgggacagcgttctgtcatctcagcaaagaatggaatcagagaataataagttatgttccctatattccttccgaaatacctctacctcaccacataagcctgacgaagggagtcgggaccgtgagataatgaccagtgttacttttggaaccccagagcgccgcaaagggagtcttgccgatgtggtggacacactgaaacagaagaagcttgaggaaatgactcggactgaacaagaggattcctcctgcatggaaaaactactttcaaaagattggaaggaaaaaatggaaagactaaataccagtgaacttcttggagaaattaaaggtacacctgagagcctggcagaaaaagaacggcagctctccaccatgattacccagctgatcagtttacgggagcagctactggcagcgcatgatgaacagaaaaaactggcagcgtcacaaattgagaaacaacggcagcaaatggaccttgctcgccaacagcaagaacagattgcgagacaacagcagcaacttctgcaacagcagcacaaaattaatctcctgcagcaacagatccaggttcagggtcacatgcctccgctcatgatcccaatttttccacatgaccagcggactctggcagcagctgctgctgcccaacagggattcctcttcccccctggaataacatacaaaccaggtgataactaccccgtacagttcattccatcaacaatggcagctgctgctgcttctggactcagccctttacagctccagcagctctatgccgctcagctggccagcatgcaggtgtcacctggagcaaagatgccatcaactccacagccaccaaacacagcagggacggtctcacctactgggataaaaaatgaaaagagagggaccagccctgtaactcaagttaaggatgaagcagcagcacagcctctgaatctctcatcccgacccaagacagcagagcctgtaaagtccccaacgtctcccacccagaacctcttcccagccagcaaaaccagccctgtcaatctgccaaacaaaagcagcatccctagccccattggaggaagcctgggaagaggatcctctttaggtaaatggaaaagtcaacaccaggaagagacttacgaattagatatcctatctagtctcaactcccctgccctttttggggatcaggatacagtgatgaaagccattcaggaggcgcggaagatgcgagagcagatccagcgggagcaacagcagcaacagccacatggtgttgacgggaaactgtcctccataaataatatggggctgaacagctgcaggaatgaaaaggaaagaacgcgctttgagaatttggggccccagttaacgggaaagtcaaatgaagatggaaaactgggcccaggtgtcatcgaccttactcggccagaagatgcagagggaagtaaagcaatgaatggctctgcagctaaactacagcagtattattgttggccaacaggaggtgccactgtggctgaagcacgagtctacagggacgcccgcggccgtgccagcagcgagccacacattaagcgaccaatgaatgcattcatggtttgggcaaaggatgagaggagaaaaatccttcaggccttccccgacatgcataactccaacattagcaaaatcttaggatctcgctggaaatcaatgtccaaccaggagaagcaaccttattatgaagagcaggcccggctaagcaagatccacttagagaagtacccaaactataaatacaaaccccgaccgaaacgcacctgcattgttgatggcaaaaagcttcggattggggagtataagcaactgatgaggtctcggagacaggagatgaggcagttctttactgtggggcaacagcctcagattccaatcaccacaggaacaggtgttgtgtatcctggtgctatcactatggcaactaccacaccatcgcctcagatgacatctgactgctctagcacctcggccagcccggagcccagcctcccggtcatccagagcacttatggtatgaagacagatggcggaagcctagctggaaatgaaatgatcaatggagaggatgaaatggaaatgtatgatgactatgaagatgaccccaaatcagactatagcagtgaaaatgaagccccggaggctgtcagtgccaactgaggagtttttgtttgctgaattaaagtactctgacatttcacccccctccccaacaaagagttattaaagagcccgcatgcatttgtggctccacaattacatcagcagaa

SEQ ID NO: 186406 - DNA, 1818 bp, Homo sapiens
  Payload ID: 16713
  Gene Symbol: SOX6
  Gene Name: SRY (sex determining region Y)-box 6
  ENST ID: ENST00000530378
  CDS Start-End: 688-1167
acagtcgtcaccgttgcggcccctcgccgccccggggcactttgggagttgtagttttctgattcattgcatactggcccgaataaaaaagatgtgtccgtgactaaaactacaattcccaggaagccccgaggctcaattcgcgctgtgtggcgggagtgccctcagaggccccgccttcggctggtggaggaagcgttcccgcggatgtgtatggcgaattgttggcacctggatggtaaatcttcaagttactgtgaaacaagatcacaaacgaaaaagtaacataggaaatactaaagactgggacattttatcagattttactcagtttcatatacagaaggctataggactgttttgccggattctaaatgacaacttttaaatcagagccttgaaatctacagaagtccaatatatactgaggaacaaagggaatgtggaaatgaaagagagagggagagagaggctggcagatgtaatgagacgcggtgaaggtgtacgcagactggcactcccactcctcccttctgctctcactgcagccctgggtaactcgcaggctaacacaaacagcttttctcccgcagcctgccctctgtcactgtcactttcatgaattcaaaggcaatttaccagtgatttctgggtgctggggctgatattttttgtgcatatttaagaatgtcttccaagcaagccacctctccatttgcctgtgcagctgatggagaggatgcaatgacccaggatttaacctcaagggaaaaggaagagggcagtgatcaacatgtggcctcccatctgcctctgcaccccataatgcacaacaaacctcactctgaggagctaccaacacttgtcagtaccattcaacaagatgctgactgggacagcgttctgtcatctcagcaaagaatggaatcagagaataataagttatgttccctatattccttccgaaatacctctacctcaccacataagcctgacgaagggagtcgggaccgtgagataatgaccagtgttacttttggaaccccagagcgccgcaaagggagtcttgccgatgtggtggacacactgaaacagaagaagcttgaggaaatgactcggactgaacaagaggcaagtctttctttcaagatttctggagtaccttagttattttaaaccataactgctgaaaggagaataacatgaatctagagaactttttaaaaagtaactgaaattatcgaacattagcagcattgaatagagtttcctctctgacataacaagaaaatatggacaaaatactctagttctaaagtgtacaacttacatatgaagaaatgctacaggaatttcccttaagatcaggaacaaggccaagctgcccactgtcaccactatattcaacatttttctgaaggagggtaaattcagcctccgtcttggctagaagtgggtaatccaagtaatgcaaattaaaactatattgagatgacaattctagctcattgaattgttgaaaattaaagatgtgaaacacattcttctgtcaaggttgtgaagaaacaggtattctattttggagggcatggaagttattataagtctttcagaaacaaatttcacagcatctgtcaaaacaacatatacactttcttttgatccagtagtcctcttcttggaatttaccctgaagatacaccttcagtgatatgaaaaaagatatgcaaaaagctgtttgttgacttattatttgtaattgcaaacaacctacatatgcatataggagagtgattaaataaattatgctgcagtccc

SEQ ID NO: 186407 - DNA, 549 bp, Homo sapiens
  Payload ID: 16713
  Gene Symbol: SOX6
  Gene Name: SRY (sex determining region Y)-box 6
  ENST ID: ENST00000529469
  CDS Start-End: 312-549
aaagaaagagcaagccccataatggcagcatctttatcttgcacactagtctgtctcttgtgcctgtaacaatgccaggaactttagtaactatttttttttgaattttgacaatcttggtcgacaagggtaaaaaaggacattccagaagcagaaaaacatgagcaaaagtatggagacatcaaaggtcatggcatatgttcgtttatcatggctggaatgaggggtatgaggaagatgactgagagtgtgtactttggagtcagtcagagcagagttgacttcattttatgctacctttatgattaagaatgtcttccaagcaagccacctctccatttgcctgtgcagctgatggagaggatgcaatgacccaggatttaacctcaagggaaaaggaagagggcagtgatcaacatgtggcctcccatctgcctctgcaccccataatgcacaacaaacctcactctgaggagctaccaacacttgtcagtaccattcaacaagatgctgactgggacagcgttctgtcatctcagcaaagaatgg

SEQ ID NO: 186408 - DNA, 2656 bp, Homo sapiens
  Payload ID: 16713
  Gene Symbol: SOX6
  Gene Name: SRY (sex determining region Y)-box 6
  Uniprot ID: P35712
  ENST ID: ENST00000528429
  CDS Start-End: 69-2555
gttaggagagaccattggggataggaaagatgaaaggtcatggtgagcttcaaggacatgaaagaagaatgtcttccaagcaagccacctctccatttgcctgtgcagctgatggagaggatgcaatgacccaggatttaacctcaagggaaaaggaagagggcagtgatcaacatgtggcctcccatctgcctctgcaccccataatgcacaacaaacctcactctgaggagctaccaacacttgtcagtaccattcaacaagatgctgactgggacagcgttctgtcatctcagcaaagaatggaatcagagaataataagttatgttccctatattccttccgaaatacctctacctcaccacataagcctgacgaagggagtcgggaccgtgagataatgaccagtgttacttttggaaccccagagcgccgcaaagggagtcttgccgatgtggtggacacactgaaacagaagaagcttgaggaaatgactcggactgaacaagaggattcctcctgcatggaaaaactactttcaaaagattggaaggaaaaaatggaaagactaaataccagtgaacttcttggagaaattaaaggtacacctgagagcctggcagaaaaagaacggcagctctccaccatgattacccagctgatcagtttacgggagcagctactggcagcgcatgatgaacagaaaaaactggcagcgtcacaaattgagaaacaacggcagcaaatggaccttgctcgccaacagcaagaacagattgcgagacaacagcagcaacttctgcaacagcagcacaaaattaatctcctgcagcaacagatccaggttcagggtcacatgcctccgctcatgatcccaatttttccacatgaccagcggactctggcagcagctgctgctgcccaacagggattcctcttcccccctggaataacatacaaaccaggtgataactaccccgtacagttcattccatcaacaatggcagctgctgctgcttctggactcagccctttacagctccagaagggtcatgtctcccacccacaaattaaccaaaggctaaagggcctaagtgaccgttttggcaggaatttggacacctttgaacatggtggtggccactcttacaaccacaaacagattgagcagctctatgccgctcagctggccagcatgcaggtgtcacctggagcaaagatgccatcaactccacagccaccaaacacagcagggacggtctcacctactgggataaaaaatgaaaagagagggaccagccctgtaactcaagttaaggatgaagcagcagcacagcctctgaatctctcatcccgacccaagacagcagagcctgtaaagtccccaacgtctcccacccagaacctcttcccagccagcaaaaccagccctgtcaatctgccaaacaaaagcagcatccctagccccattggaggaagcctgggaagaggatcctctttagatatcctatctagtctcaactcccctgccctttttggggatcaggatacagtgatgaaagccattcaggaggcgcggaagatgcgagagcagatccagcgggagcaacagcagcaacagccacatggtgttgacgggaaactgtcctccataaataatatggggctgaacagctgcaggaatgaaaaggaaagaacgcgctttgagaatttggggccccagttaacgggaaagtcaaatgaagatggaaaactgggcccaggtgtcatcgaccttactcggccagaagatgcagagggaagtaaagcaatgaatggctctgcagctaaactacagcagtattattgttggccaacaggaggtgccactgtggctgaagcacgagtctacagggacgcccgcggccgtgccagcagcgagccacacattaagcgaccaatgaatgcattcatggtttgggcaaaggatgagaggagaaaaatccttcaggccttccccgacatgcataactccaacattagcaaaatcttaggatctcgctggaaatcaatgtccaaccaggagaagcaaccttattatgaagagcaggcccggctaagcaagatccacttagagaagtacccaaactataaatacaaaccccgaccgaaacgcacctgcattgttgatggcaaaaagcttcggattggggagtataagcaactgatgaggtctcggagacaggagatgaggcagttctttactgtggggcaacagcctcagattccaatcaccacaggaacaggtgttgtgtatcctggtgctatcactatggcaactaccacaccatcgcctcagatgacatctgactgctctagcacctcggccagcccggagcccagcctcccggtcatccagagcacttatggtatgaagacagatggcggaagcctagctggaaatgaaatgatcaatggagaggatgaaatggaaatgtatgatgactatgaagatgaccccaaatcagactatagcagtgaaaatgaagccccggaggctgtcagtgccaactgaggagtttttgtttgctgaattaaagtactctgacatttcacccccctccccaacaaagagttattaaagagcccgcatgcatttgtggctccacaattaca

SEQ ID NO: 186409 - DNA, 2699 bp, Homo sapiens
  Payload ID: 16713
  Gene Symbol: SOX6
  Gene Name: SRY (sex determining region Y)-box 6
  Uniprot ID: P35712
  ENST ID: ENST00000527619
  CDS Start-End: 184-2598
gggataggaaagatgaaaggtcatggtgagcttcaaggacatgaaaggttgttgtctcatgtaacaatagtagattgttttttttcctaatatttctagccagcccctaagtcaggtgatggaacaaatacctacagtttagtcaggtgaaacaggagtgggtggaggaaggaaagaagaaaaatgggaagaatgtcttccaagcaagccacctctccatttgcctgtgcagctgatggagaggatgcaatgacccaggatttaacctcaagggaaaaggaagagggcagtgatcaacatgtggcctcccatctgcctctgcaccccataatgcacaacaaacctcactctgaggagctaccaacacttgtcagtaccattcaacaagatgctgactgggacagcgttctgtcatctcagcaaagaatggaatcagagaataataagttatgttccctatattccttccgaaatacctctacctcaccacataagcctgacgaagggagtcgggaccgtgagataatgaccagtgttacttttggaaccccagagcgccgcaaagggagtcttgccgatgtggtggacacactgaaacagaagaagcttgaggaaatgactcggactgaacaagaggattcctcctgcatggaaaaactactttcaaaagattggaaggaaaaaatggaaagactaaataccagtgaacttcttggagaaattaaaggtacacctgagagcctggcagaaaaagaacggcagctctccaccatgattacccagctgatcagtttacgggagcagctactggcagcgcatgatgaacagaaaaaactggcagcgtcacaaattgagaaacaacggcagcaaatggaccttgctcgccaacagcaagaacagattgcgagacaacagcagcaacttctgcaacagcagcacaaaattaatctcctgcagcaacagatccaggttcagggtcacatgcctccgctcatgatcccaatttttccacatgaccagcggactctggcagcagctgctgctgcccaacagggattcctcttcccccctggaataacatacaaaccaggtgataactaccccgtacagttcattccatcaacaatggcagctgctgctgcttctggactcagccctttacagctccagcagctctatgccgctcagctggccagcatgcaggtgtcacctggagcaaagatgccatcaactccacagccaccaaacacagcagggacggtctcacctactgggataaaaaatgaaaagagagggaccagccctgtaactcaagttaaggatgaagcagcagcacagcctctgaatctctcatcccgacccaagacagcagagcctgtaaagtccccaacgtctcccacccagaacctcttcccagccagcaaaaccagccctgtcaatctgccaaacaaaagcagcatccctagccccattggaggaagcctgggaagaggatcctctttaggtaaatggaaaagtcaacaccaggaagagacttacgaattagatatcctatctagtctcaactcccctgccctttttggggatcaggatacagtgatgaaagccattcaggaggcgcggaagatgcgagagcagatccagcgggagcaacagcagcaacagccacatggtgttgacgggaaactgtcctccataaataatatggggctgaacagctgcaggaatgaaaaggaaagaacgcgctttgagaatttggggccccagttaacgggaaagtcaaatgaagatggaaaactgggcccaggtgtcatcgaccttactcggccagaagatgcagagggaagtaaagcaatgaatggctctgcagctaaactacagcagtattattgttggccaacaggaggtgccactgtggctgaagcacgagtctacagggacgcccgcggccgtgccagcagcgagccacacattaagcgaccaatgaatgcattcatggtttgggcaaaggatgagaggagaaaaatccttcaggccttccccgacatgcataactccaacattagcaaaatcttaggatctcgctggaaatcaatgtccaaccaggagaagcaaccttattatgaagagcaggcccggctaagcaagatccacttagagaagtacccaaactataaatacaaaccccgaccgaaacgcacctgcattgttgatggcaaaaagcttcggattggggagtataagcaactgatgaggtctcggagacaggagatgaggcagttctttactgtggggcaacagcctcagattccaatcaccacaggaacaggtgttgtgtatcctggtgctatcactatggcaactaccacaccatcgcctcagatgacatctgactgctctagcacctcggccagcccggagcccagcctcccggtcatccagagcacttatggtatgaagacagatggcggaagcctagctggaaatgaaatgatcaatggagaggatgaaatggaaatgtatgatgactatgaagatgaccccaaatcagactatagcagtgaaaatgaagccccggaggctgtcagtgccaactgaggagtttttgtttgctgaattaaagtactctgacatttcacccccctccccaacaaagagttattaaagagcccgcatgcatttgtggctccacaattaca

SEQ ID NO: 186410 - DNA, 534 bp, Homo sapiens
  Payload ID: 16713
  Gene Symbol: SOX6
  Gene Name: SRY (sex determining region Y)-box 6
  ENST ID: ENST00000526673
  CDS Start-End: 116-534
gtggaggtagaggatgatttcaattagaaataatgacagcaatagacgcttccaatgaagatatcgtggccaccaaaggacaaaggcaagaagttaattcctgaagtcgagaagaatgtcttccaagcaagccacctctccatttgcctgtgcagctgatggagaggatgcaatgacccaggatttaacctcaagggaaaaggaagagggcagtgatcaacatgtggcctcccatctgcctctgcaccccataatgcacaacaaacctcactctgaggagctaccaacacttgtcagtaccattcaacaagatgctgactgggacagcgttctgtcatctcagcaaagaatggaatcagagaataataagttatgttccctatattccttccgaaatacctctacctcaccacataagcctgacgaagggagtcgggaccgtgagataatgaccagtgttacttttggaaccccagagcgccgcaaagggagtcttgccgatgtggtggacacactgaaacagaagaagcttga

SEQ ID NO: 186411 - DNA, 586 bp, Homo sapiens
  Payload ID: 16713
  Gene Symbol: SOX6
  Gene Name: SRY (sex determining region Y)-box 6
  ENST ID: ENST00000533411
  CDS Start-End: 110-586
gattattaatccagctagagaagaaatatgcttttacttagcaagaatgagtatccaaagagctgataatattgttaaggcagcggggtggaatggcagagcttgaagaatgtcttccaagcaagccacctctccatttgcctgtgcagctgatggagaggatgcaatgacccaggatttaacctcaagggaaaaggaagagggcagtgatcaacatgtggcctcccatctgcctctgcaccccataatgcacaacaaacctcactctgaggagctaccaacacttgtcagtaccattcaacaagatgctgactgggacagcgttctgtcatctcagcaaagaatggaatcagagaataataagttatgttccctatattccttccgaaatacctctacctcaccacataagcctgacgaagggagtcgggaccgtgagataatgaccagtgttacttttggaaccccagagcgccgcaaagggagtcttgccgatgtggtggacacactgaaacagaagaagcttgaggaaatgactcggactgaacaagaggattcctcctgcatggaaaaactactttcaaaa

SEQ ID NO: 186412 - DNA, 3216 bp, Homo sapiens
  Payload ID: 16714
  Gene Symbol: SOX7
  Gene Name: SRY (sex determining region Y)-box 7
  Uniprot ID: Q9BT81
  ENST ID: ENST00000304501
  CDS Start-End: 80-1246
aagttggacgccccgacccgtgcgagggccaggtccgcgcctgccccgccaggcgaagcgaggcgacccgcgtgcggccatggcttcgctgctgggagcctacccttggcccgagggtctcgagtgcccggccctggacgccgagctgtcggatggacaatcgccgccggccgtcccccggcccccgggggacaagggctccgagagccgtatccggcggcccatgaacgccttcatggtttgggccaaggacgagaggaaacggctggcagtgcagaacccggacctgcacaacgccgagctcagcaagatgctgggaaagtcgtggaaggcgctgacgctgtcccagaagaggccgtacgtggacgaggcggagcggctgcgcctgcagcacatgcaggactaccccaactacaagtaccggccgcgcaggaagaagcaggccaagcggctgtgcaagcgcgtggacccgggcttccttctgagctccctctcccgggaccagaacgccctgccggagaagagaagcggcagccggggggcgctgggggagaaggaggacaggggtgagtactcccccggcactgccctgcccagcctccggggctgctaccacgaggggccggctggtggtggcggcggcggcaccccgagcagtgtggacacgtacccgtacgggctgcccacacctcctgaaatgtctcccctggacgtgctggagccggagcagaccttcttctcctccccctgccaggaggagcatggccatccccgccgcatcccccacctgccagggcacccgtactcaccggagtacgccccaagccctctccactgtagccaccccctgggctccctggcccttggccagtcccccggcgtctccatgatgtcccctgtacccggctgtcccccatctcctgcctattactccccggccacctaccacccactccactccaacctccaagcccacctgggccagctttccccgcctcctgagcaccctggcttcgacgccctggatcaactgagccaggtggaactcctgggggacatggatcgcaatgaattcgaccagtatttgaacactcctggccacccagactccgccacaggggccatggccctcagtgggcatgttccggtctcccaggtgacaccaacgggtcccacagagaccagcctcatctccgtcctggctgatgccacggccacgtactacaacagctacagtgtgtcatagagctggaggcgccccgtccggtcagccctcgcgccctctccttcttgtgccttgagtggcagaggagccgtccagccacaccagctttcctcccaccgctcagggcagggaggtctgaactgcggccccagagcctttggcctaagctggactctccttatccgagtgccgcctctatccccttccccacgttccagcccctgcagcccacattttaagtatattccttcaagtgagttttcctccagcccctgagagttgctgtctcccagtggaatgttcactgacgtcttttcttggtagccatcatcgaaactaatggggggacagacttgatagccaaggtcccttctggtccagttttctgatttagggttctctcaagattaataaaggaagatggggaaatttgactcattaatgagctcgctaacctacgatctggtgataattttgtgtgcacagcccaaggaccacgaggctttctgcactttctgcacccccttccaaagtgaccacaaaatttcaaagggactcatacaatttgagaaaaaacagtcaacctgatttgagaaattaaccagtatggctaactatatcacagaaaatgggattgagttaaaactattttattttaaatatacattttaaagcagttctttttttttgttaatttgtttattatacacacacttcaagagaatatgcacagtctaggccgggcacggtggctcacgcctgtaatcccagcactttgggaggccgaggcatgtggatcacctgaggtcaggagtttgagaccagcctagacaacatggtgaaaccttgtctctatgaaaaatacaaaatttgctgggagtggtggtgcatgcctgtaatcccagctacttggaaggctgaggcaggagaatgtcttgaacctaggaggtggaggttgcagtgagctgagattgcaccattgcactccagcctgtgcaacaagagtgaaactccatttcaagaaaaaaaaaaaaaaaagaatatgcacagtctgaatgtataccaggagtgtgagagacacatgcccacttcatgcaactcctaaactcaaagtctaaatcagatatttttattaacaatgacaacttgttgccaactccctgtttctaatgaccaaagacccagggtacctaaaaggactttgcaaccaagcaaagtcactgtcttcaaatctggatacacactttcccctctgtagattcaaaaggtgcttccttcccggctgtctccagcttccttactctcttttctgggatttctttttctcttctttctgctcttcctccactgctgaactggtccctaactgaaacagcccctgacttatcccaagcatgcttcctttagctgctgtgagaatttgtcttcctcaccagccaggtcctcaggcaaagtcctcagccagtgctttagagcaacttcccgcaaatcagaaactcactgtgattccaaaaatgtttctgagccctggacccctgcccccaaaatattttcatctttcccccaaacctcctttaaaggagcatgcataacagtgtgctgaaagacagttgttggttttttgattttagcatattatttcctgtatgaaatatgttttatataatctcctattatttttatcttatgttttgtattgttgataaatcctttttgtccttctaagatgtcctattgtaaaatcacttataaggtatgattactctttatgctattactttatatgccatttggtaataaatagtaaattgttgatgatatgattgactgatgcgcagtccagagcatgtatgaataatctcataaaacagtatcacagacattaagctaaactgtttcgtttttttgaaagaacaactcatactttggaacagttgtcaatattaatttgttgcaaatatttaatttaaataaacatttttgtaccatga

SEQ ID NO: 186413 - DNA, 3049 bp, Homo sapiens
  Payload ID: 16715
  Gene Symbol: SOX8
  Gene Name: SRY (sex determining region Y)-box 8
  Uniprot ID: P57073
  ENST ID: ENST00000293894
  CDS Start-End: 116-1456
ggcgagggtcggggccaccgcgcggcgacctcgggtcccggagcgaccgcagggcagccccgggcgccggccccggtgcgcgtctcctgtgcgcgcccctccgcgcgcggccccgatgctggacatgagcgaggcccgctcccagccgccctgcagcccgtccggcaccgccagctccatgtcgcacgtggaggactcggactcggacgcgccgccgtctcccgccggctccgagggcctgggccgcgcgggggtcgcggtggggggcgcccggggcgacccggcggaggcggcggacgagcgcttcccggcctgcatccgcgacgccgtgtcgcaggtgctcaagggctacgactggagtctggtgcccatgccggtgcgcggcggcggcggcggcgcgctcaaagccaagccgcatgtgaagcggcccatgaacgcattcatggtgtgggcgcaggcggcgcgccgcaagctggccgaccagtacccgcacctgcacaacgccgagctcagcaagacgctgggcaagctgtggcgcttgctgagcgagagcgagaagcggcccttcgtggaggaggcagagcgccttcgcgtgcagcacaagaaggaccaccccgactacaagtaccagccacggcgcaggaagagcgccaaagccggccacagcgactccgactcgggcgcggagctgggaccccaccctggcggcggtgccgtgtacaaggctgaagcagggcttggagatgggcaccaccatggcgaccacacagggcagacccacgggccgcccaccccgcccaccacccccaagacggagctgcagcaggcgggcgccaagccggagctgaagctggagggacgccggccggtggacagcgggcgccagaacatcgacttcagcaacgtggacatctcggagctcagcagcgaggtcatgggcaccatggacgccttcgacgtccacgagttcgaccagtacctgcccctgggcggccccgccccacccgagccgggccaggcctatgggggcgcctacttccacgccggggcgtcccccgtgtgggcccacaagagtgccccgtcggcctccgcgtcgcccaccgagacgggtcccccacggccgcacatcaagacggagcagccgagccccggccactacggcgaccagccccgaggctcgcccgactacggttcctgcagcggccagtccagcgccaccccggccgcccccgccggccccttcgccggctcacagggcgactatggcgacctgcaggcctccagctactatggtgcctaccctggctacgcacccggcctctaccagtacccctgcttccactcgccgcgccggccctacgcctcacccctgctcaacggcctggccctgccgcccgcccacagccccaccagtcactgggaccagccggtgtacaccaccctgaccaggccctgagggcccagccgcggggagggactcgcaggcgtcagggggcagccttgtcccggcccagtgtgtgtgaccagggcgggaggggccccagtggctgagctccaagtgcctgctgaagtctgcagggaaacacgcttgctgcccgtggccctcggcctccagatggccacacctctgccgacgacggaccagctccctctcccttctatctttctttttgaggtggtgggattattccacaaagaagggctgccgtttggtccctcttccgtgaggactggcggcaccagcaccttcgctttgcatctcggtagaggagaaacggcagcacagcccaaggaccaaaggagggggtggcaggggccttgcagggcgctgtgaggtccaggccggtcttggcgccgagagcccctgcactcaaggccacattccctcgacaacggctgcacgggctgtccgggatccggggtgtctgtccgcagactgggatgagtctactcgagcatctccgggacctgcctgtcagatctgaggtgtctccttgctggcagagtgcgctcacgcgagggctggctgtgatgaacacatctctcttttatttttatgtttttgataatttttatttttgaagcttaaatgtgtttcttctgaaagctgttaaagatgtatttatgttctgtgttattttatctttaattaatgaggtaattcgggcaaagagtagaatttaagacaaaacggaagctgggaagcttcccttgagggcaggcaggaggtggagttgcagctgttggccggcatcacgttgctcgttgctcggcttatgggaggccgccctggagggcccggaggtcccaaggtccctgggaggactgggcccctcatgcctcgagcttggcaaccgaaaacccgagggaggagaagggacctgccttgtgacatctctgatcaggttggggtgccccagcacccagtaccagtttggggtttgggaagcaggactccgtccctgtccccgactgtgccacgtggtaggacacataggacacaggaattcctgggtccttgcccatgactgtgccatgtggtaggacacaggacacaggaattcctggaaagtggtggcttcagaagtgatcttggctcgcaggcaccagtgccacctaccaagctgtgaaactaaaccttctccactaaacgtcgttagggcctcagttctagacgagtcatacctgattcacctgcactgcttcccctgtgtgctgagcatagagcatacaatagcgcctacttcacggaaacttgtgcctttaaactttgtaaacttaaacacagccgagaagttgcttctttgtactttttctacttttcctacttttttgtagaaaaaaaagataatgcctctgcttctatttctctgggggtgggggtgggggccgggagccgtcgcagacccgtttcatgcagcgtctcccttggcaccgcgttcggaggacgcaccctcactcccctgctgccttcactcctttctgaccaagcaacgctaacttttgtacagatcgatttgataaaattaaacaaagtgctttttatgga

SEQ ID NO: 186414 - DNA, 3935 bp, Homo sapiens
  Payload ID: 16716
  Gene Symbol: SOX9
  Gene Name: SRY (sex determining region Y)-box 9
  Uniprot ID: P48436
  ENST ID: ENST00000245479
  CDS Start-End: 373-1902
ggagagccgaaagcggagctcgaaactgactggaaacttcagtggcgcggagactcgccagtttcaaccccggaaacttttctttgcaggaggagaagagaaggggtgcaagcgcccccacttttgctctttttcctcccctcctcctcctctccaattcgcctccccccacttggagcgggcagctgtgaactggccaccccgcgccttcctaagtgctcgccgcggtagccggccgacgcgccagcttccccgggagccgcttgctccgcatccgggcagccgaggggagaggagcccgcgcctcgagtccccgagccgccgcggcttctcgcctttcccggccaccagccccctgccccgggcccgcgtatgaatctcctggaccccttcatgaagatgaccgacgagcaggagaagggcctgtccggcgcccccagccccaccatgtccgaggactccgcgggctcgccctgcccgtcgggctccggctcggacaccgagaacacgcggccccaggagaacacgttccccaagggcgagcccgatctgaagaaggagagcgaggaggacaagttccccgtgtgcatccgcgaggcggtcagccaggtgctcaaaggctacgactggacgctggtgcccatgccggtgcgcgtcaacggctccagcaagaacaagccgcacgtcaagcggcccatgaacgccttcatggtgtgggcgcaggcggcgcgcaggaagctcgcggaccagtacccgcacttgcacaacgccgagctcagcaagacgctgggcaagctctggagacttctgaacgagagcgagaagcggcccttcgtggaggaggcggagcggctgcgcgtgcagcacaagaaggaccacccggattacaagtaccagccgcggcggaggaagtcggtgaagaacgggcaggcggaggcagaggaggccacggagcagacgcacatctcccccaacgccatcttcaaggcgctgcaggccgactcgccacactcctcctccggcatgagcgaggtgcactcccccggcgagcactcggggcaatcccagggcccaccgaccccacccaccacccccaaaaccgacgtgcagccgggcaaggctgacctgaagcgagaggggcgccccttgccagaggggggcagacagccccctatcgacttccgcgacgtggacatcggcgagctgagcagcgacgtcatctccaacatcgagaccttcgatgtcaacgagtttgaccagtacctgccgcccaacggccacccgggggtgccggccacgcacggccaggtcacctacacgggcagctacggcatcagcagcaccgcggccaccccggcgagcgcgggccacgtgtggatgtccaagcagcaggcgccgccgccacccccgcagcagcccccacaggccccgccggccccgcaggcgcccccgcagccgcaggcggcgcccccacagcagccggcggcacccccgcagcagccacaggcgcacacgctgaccacgctgagcagcgagccgggccagtcccagcgaacgcacatcaagacggagcagctgagccccagccactacagcgagcagcagcagcactcgccccaacagatcgcctacagccccttcaacctcccacactacagcccctcctacccgcccatcacccgctcacagtacgactacaccgaccaccagaactccagctcctactacagccacgcggcaggccagggcaccggcctctactccaccttcacctacatgaaccccgctcagcgccccatgtacacccccatcgccgacacctctggggtcccttccatcccgcagacccacagcccccagcactgggaacaacccgtctacacacagctcactcgaccttgaggaggcctcccacgaagggcgaagatggccgagatgatcctaaaaataaccgaagaaagagaggaccaaccagaattccctttggacatttgtgtttttttgtttttttattttgttttgttttttcttcttcttcttcttccttaaagacatttaagctaaaggcaactcgtacccaaatttccaagacacaaacatgacctatccaagcgcattacccacttgtggccaatcagtggccaggccaaccttggctaaatggagcagcgaaatcaacgagaaactggactttttaaaccctcttcagagcaagcgtggaggatgatggagaatcgtgtgatcagtgtgctaaatctctctgcctgtttggactttgtaattatttttttagcagtaattaaagaaaaaagtcctctgtgaggaatattctctattttaaatatttttagtatgtactgtgtatgattcattaccattttgaggggatttatacatatttttagataaaattaaatgctcttatttttccaacagctaaactactcttagttgaacagtgtgccctagcttttcttgcaaccagagtatttttgtacagatttgctttctcttacaaaaagaaaaaaaaaatcctgttgtattaacatttaaaaacagaattgtgttatgtgatcagttttgggggttaactttgcttaattcctcaggctttgcgatttaaggaggagctgccttaaaaaaaaataaaggccttattttgcaattatgggagtaaacaatagtctagagaagcatttggtaagctttatcatatatatattttttaaagaagagaaaaacaccttgagccttaaaacggtgctgctgggaaacatttgcactcttttagtgcatttcctcctgcctttgcttgttcactgcagtcttaagaaagaggtaaaaggcaagcaaaggagatgaaatctgttctgggaatgtttcagcagccaataagtgcccgagcacactgcccccggttgcctgcctgggccccatgtggaaggcagatgcctgctcgctctgtcacctgtgcctctcagaacaccagcagttaaccttcaagacattccacttgctaaaattatttattttgtaaggagaggttttaattaaaacaaaaaaaaattcttttttttttttttttccaattttaccttctttaaaataggttgttggagctttcctcaaagggtatggtcatctgttgttaaattatgttcttaactgtaaccagtttttttttatttatctctttaatctttttttattattaaaagcaagtttctttgtattcctcaccctagatttgtataaatgcctttttgtccatcccttttttctttgttgtttttgttgaaaacaaactggaaacttgtttctttttttgtataaatgagagattgcaaatgtagtgtatcactgagtcatttgcagtgttttctgccacagacctttgggctgccttatattgtgtgtgtgtgtgggtgtgtgtgtgttttgacacaaaaacaatgcaagcatgtgtcatccatatttctctgcatcttctcttggagtgagggaggctacctggaggggatcagcccactgacagaccttaatcttaattactgctgtggctagagagtttgaggattgctttttaaaaaagacagcaaacttttttttttatttaaaaaaagatatattaacagttttagaagtcagtagaataaaatcttaaagcactcataatatggcatccttcaatttctgtataaaagcagatctttttaaaaagatacttctgtaacttaagaaacctggcatttaaatcatattttgtctttaggtaaaagctttggtttgtgttcgtgttttgtttgtttcacttgtttccctcccagccccaaaccttttgttctctccgtgaaacttacctttccctttttctttctcttttttttttttgtatattattgtttacaataaatatacattgcattaaaaagaaa

SEQ ID NO: 186415 - DNA, 2561 bp, Homo sapiens
  Payload ID: 16717
  Gene Symbol: SSUH2
  Gene Name: ssu-2 homolog (C. elegans)
  Uniprot ID: Q9Y2M2
  ENST ID: ENST00000317371
  CDS Start-End: 1227-2288
ctcctaagaattctctcacctgccttctgcccttaggctctgctagattgcaaatgacctgctttctttctgatcctgggctgcgttcccacccctgtcagatagtaaatcccaagtaaggtacctgctttcggcagctctgagctttcttcttggacacctaaaacccacagtcctccaggctccgatagattgcaaatgacctgctttctttctgatcctgggctgcgttcagacccctgtgggatagtaaatcccaagtaaggtacttgccttccgcagatctgagctttcttcttagacacctaatacccacagtcctccaggctccgatagattgcaaatgacctgctttctttctgatcccgggctgctgagttcggacccctgttggatagtaaatcccaagtaaggtacctgccttcggcagctctgagatttcttcttggacacctaatacccacagtcctccaggggcaagaggatgctattactgcaaagagtacagaggatgtacacccgtctataatatagttggtgatttccagaggctgagaagatattactgacaatcccgtcaacatgctgtgtgaccaccgtggattgtaatatccaggaaaacgttactgctaatgtcacaggacgtgtagaccctgccatcaaattcgtaatatcctagcgggacttcactagtcatttcacaatgcgtgtgcaccctttgatattattcgtattgtcctgaagagatgttactactgatgtcccaatgcagttacctgtgtgtcccctgtggtacctatggaaaccagttgttgggaaatccttgttaagaaaatgggccttgtaatagtacctcttagggctgctgtgaaggaaggataacatggaagcaacatgcctatcatagtgctttgtgtatgcccctgtcaaccatcactctactttgtgtgtgtgagtttgaccacctgaatctttttggcaccatctcaagtataattcaaatcacgaggcatttgtgcatatcgacaatacacccatcgtggtgtggtggacctcagttttgaggccgagagtcctctggcgccccccacagagctcctggagagactgcccagctatgactggcttcttcaagggggcagaggacagatattcttcccacctttggaggccccagggaggccccaggagcaaaggtcctggccctcgttcctggaacacaggagatgccctccccagttggactgctgagggctttaccactaccgtggcctcagtttctcgcctgcacgttgaggaggctggctggcccgcgtgagtccacaggcccttcccagaagcccccgcctctctgttcggtcccctgcagagtccctgcgatgacggaggaggtggcccgggaagccctcctcagctttgtggactctaagtgctgctacagcagcacggtggctggagacctcgtcatccaggagctgaagcggcagaccctctgcaggtaccgtctggagacctttagtgaatccaggataagcgagtggacatttcaaccctttactaaccactctgtggatgggccgcaaagaggcgcctcccccaggctctgggacatcaaggttcaaggtcctccgatgtttcaggaagacaccaggaagttccaggtccctcactcgtcactggtcaaggaatgccacaaatgccatgggcgtgggcggtacaagtgcagcggctgccacggggcgggcacggtgcggtgcccatcctgctgcggagccaagcgcaaagccaagcagtcccggagatgtcagctgtgcgcggggtccggcaggcgaagatgcagcacttgctcagggagagggaacaagacctgcgccacctgcaagggggagaagaagctgttgcacttcatccagcttgtcatcatgtggaagaacagcttgtttgagtttgtgtctgagcaccggctcaactgccccagggagctccttgctaaagccaaaggagaaaacctctttaaggatgaaaactcggtggtgtaccccatcgtggacttccctctgcgagacatctctcttgcctcccagaggggcattgcagagcacagcgctgccttggcctcccgtgcccgcgtcctgcagcagcgccagaccattgagctgatccccctcacagaagttcactattggtaccaaggaaagacttatgtctactacatctatggcactgaccaccaggtgtatgcggtggactatcctgagcggtattgctgtggctgtaccatcgtgtgacatagcatggctgtccccagagcctgccattcacgtttgccaaggaagatggccgacactctctgagtgtgttcactgttggctgcattggacaatcacatacaaaccctggcatgtccttccagaaaaaccagcttatcatctatcaagctccaaccccttatacagctcctctggtggaatccatgactcatatgtttaacctacaataattcagctatacacattcctgtagaacaaatgagagaaataatttaaatggcaaggactttg

SEQ ID NO: 186416 - DNA, 1799 bp, Homo sapiens
  Payload ID: 16717
  Gene Symbol: SSUH2
  Gene Name: ssu-2 homolog (C. elegans)
  Uniprot ID: Q9Y2M2
  ENST ID: ENST00000341795
  CDS Start-End: 270-1331
atgcgggacacgctgtagaacagctcacactggctggcactgctaagcaggtgcggaggggagtcagagacccccggatggaggggtgtggtggacctcagttttgaggccgagagtcctctggcgccccccacagagctcctggagagactgcccagctatgactggcttcttcaagggggcagaggacagatattcttcccacctttggaggccccagggaggccccaggagcaaaggtcctggccctcgttcctggaacacaggagatgccctccccagttggactgctgagggctttaccactaccgtggcctcagtttctcgcctgcacgttgaggaggctggctggcccgcgtgagtccacaggcccttcccagaagcccccgcctctctgttcggtcccctgcagagtccctgcgatgacggaggaggtggcccgggaagccctcctcagctttgtggactctaagtgctgctacagcagcacggtggctggagacctcgtcatccaggagctgaagcggcagaccctctgcaggtaccgtctggagacctttagtgaatccaggataagcgagtggacatttcaaccctttactaaccactctgtggatgggccgcaaagaggcgcctcccccaggctctgggacatcaaggttcaaggtcctccgatgtttcaggaagacaccaggaagttccaggtccctcactcgtcactggtcaaggaatgccacaaatgccatgggcgtgggcggtacaagtgcagcggctgccacggggcgggcacggtgcggtgcccatcctgctgcggagccaagcgcaaagccaagcagtcccggagatgtcagctgtgcgcggggtccggcaggcgaagatgcagcacttgctcagggagagggaacaagacctgcgccacctgcaagggggagaagaagctgttgcacttcatccagcttgtcatcatgtggaagaacagcttgtttgagtttgtgtctgagcaccggctcaactgccccagggagctccttgctaaagccaaaggagaaaacctctttaaggatgaaaactcggtggtgtaccccatcgtggacttccctctgcgagacatctctcttgcctcccagaggggcattgcagagcacagcgctgccttggcctcccgtgcccgcgtcctgcagcagcgccagaccattgagctgatccccctcacagaagttcactattggtaccaaggaaagacttatgtctactacatctatggcactgaccaccaggtgtatgcggtggactatcctgagcggtattgctgtggctgtaccatcgtgtgacatagcatggctgtccccagagcctgccattcacgtttgccaaggaagatggccgacactctctgagtgtgttcactgttggctgcattggacaatcacatacaaaccctggcatgtccttccagaaaaaccagcttatcatctatcaagctccaaccccttatacagctcctctggtggaatccatgactcatatgtttaacctacaataattcagctatacacattcctgtagaacaaatgagagaaataatttaaatggcaaggactttgcctctggtctccaagttaatgccccgatgatgcgtgtgatttgattttgctttttccctttgtcggtcttggttctggtgtgcttcttctagtgggagcctcttgacgatctgagtattactgaaatgttcaaggatacacacaaatatctggccctaatgcacaataaatactgcacttaggcataaagtgcaa

SEQ ID NO: 186417 - DNA, 1874 bp, Homo sapiens
  Payload ID: 16717
  Gene Symbol: SSUH2
  Gene Name: ssu-2 homolog (C. elegans)
  ENST ID: ENST00000413305
  CDS Start-End: 37-507
gaagggcagacatctctttggcaggacgtctggaacatggacagggatctgaatgaagatgacagtgtggtggacctcagttttgaggccgagagtcctctggcgccccccacagagctcctggagagactgcccagctatgactggcttcttcaagggggcagaggacagatattcttcccacctttggaggccccagggaggccccaggagcaaaggtcctggccctcgttcctggaacacaggaagaaccctgcttcctccggggagtcatctctggcctctccagcccacagtgtctcttgtgctgccatccatggatctgaagacagacgggcccctctgtgtgccagggctggaggatgctggagatacaagtgtgcagaattgtggattaatggctctcagggctgccatggagaaatgcatgaagatgcaaggggaggaaggaggattctttcctcttggaggtgttggggccagaaagacttcaagtccctgcgatgacggaggaggtggcccgggaagccctcctcagctttgtggactctaagtgctgctacagcagcacggtggctggagacctcgtcatccaggagctgaagcggcagaccctctgcaggtaccgtctggagacctttagtgaatccaggataagcgagtggacatttcaaccctttactaaccactctgtggatgggccgcaaagaggcgcctcccccaggctctgggacatcaaggttcaaggtcctccgatgtttcaggaagacaccaggaagttccaggtccctcactcgtcactggtcaaggaatgccacaaatgccatgggcgtgggcggtacaagtgcagcggctgccacggggcgggcacggtgcggtgcccatcctgctgcggagccaagcgcaaagccaagcagtcccggagatgtcagctgtgcgcggggtccggcaggcgaagatgcagcacttgctcagggagagggaacaagacctgcgccacctgcaagggggagaagaagctgttgcacttcatccagcttgtcatcatgtggaagaacagcttgtttgagtttgtgtctgagcaccggctcaactgccccagggagctccttgctaaagccaaaggagaaaacctctttaaggatgaaaactcggtggtgtaccccatcgtggacttccctctgcgagacatctctcttgcctcccagaggggcattgcagagcacagcgctgccttggcctcccgtgcccgcgtcctgcagcagcgccagaccattgagctgatccccctcacagaagttcactattggtaccaaggaaagacttatgtctactacatctatggcactgaccaccaggtgtatgcggtggactatcctgagcggtattgctgtggctgtaccatcgtgtgacatagcatggctgtccccagagcctgccattcacgtttgccaaggaagatggccgacactctctgagtgtgttcactgttggctgcattggacaatcacatacaaaccctggcatgtccttccagaaaaaccagcttatcatctatcaagctccaaccccttatacagctcctctggtggaatccatgactcatatgtttaacctacaataattcagctatacacattcctgtagaacaaatgagagaaataatttaaatggcaaggactttgcctctggtctccaagttaatgccccgatgatgcgtgtgatttgattttgctttttccctttgtcggtcttggttctggtgtgcttcttctagtgggagcctcttgacgatctgagtattactgaaatgttcaaggatacacacaaatatctggccctaatgcacaataaatactgcacttaggcataaa

SEQ ID NO: 186418 - DNA, 3219 bp, Homo sapiens
  Payload ID: 16717
  Gene Symbol: SSUH2
  Gene Name: ssu-2 homolog (C. elegans)
  ENST ID: ENST00000455157
  CDS Start-End: 334-588
agtctagaaaaccccacagctcctaagaattctctcacctgccttctgcccttaggctccgatagattgcaaatgacctgctttctttctgatcccgggctgctgagttcggacccctgttggatagtaaatcccaagtaaggtacctgccttcggcagctctgagatttcttcttggacacctaatacccacagtcctccaggaaaacgttactgctaatgtcacaggacgtgtagaccctgccatcaaattcgtaatatcctagcgggacttcactagtcatttcacaatgcgtgtgcaccctttgatattattcgtattgtcctgaagagatgttactactgatgtcccaatgcagaaagcagttccctcctttgtgcagtgcagctagaagaaaacaacattgtcttgggacacgcatcattactaagaatttttccgtaaatttatctgtgtgccttctacagttacctgtgtgtcccctgtggtacctatggaaaccagttgttgggaaatccttgttaaggtatctgatgaatctccatatctcttacactgcacacaataaatacccattgaatgaatgaatacatatatggatggatggacagacggatgatgcatggtagatggatgaatactggatcccatgcccattgagggtttgggtcaggggactgatgtgagcagacacacagaagcacgggcagcccccggcctccagcagattcttccaacccagctggaaagacatgatatggacttgggaattctctaactctgaaaggccccctctgctgaggtgtcccatgttcacagacagtgtgcatgaccagagaaaatgggccttgtaatagtacctcttagggctgctgtgaaggaaggataacatggaagcaacatgcctatcatagtgctttgtgtatgcccctgtcaaccatcactctactttgtgtgtgtgagtttgaccacctgaatctttttggcaccatctcaagtataattcaaatcacgaggcatttgtgcatatcgacaatacacccatcgtggtgtggtggacctcagttttgaggccgagagtcctctggcgccccccacagagctcctggagagactgcccagctatgactggcttcttcaagggggcagaggacagatattcttcccacctttggaggccccagggaggccccaggagcaaaggtcctggccctcgttcctggaacacagagtccctgcgatgacggaggaggtggcccgggaagccctcctcagctttgtggactctaagtgctgctacagcagcacggtggctggagacctcgtcatccaggagctgaagcggcagaccctctgcaggtaccgtctggagacctttagtgaatccaggataagcgagtggacatttcaaccctttactaaccactctgtggatgggccgcaaagaggcgcctcccccaggctctgggacatcaaggttcaaggtcctccgatgtttcaggaagacaccaggaagttccaggtccctcactcgtcactggtcaaggaatgccacaaatgccatgggcgtgggcggtacaagtgcagcggctgccacggggcgggcacggtgcggtgcccatcctgctgcggagccaagcgcaaagccaagcagtcccggagatgtcagctgtgcgcggggtccggcaggcgaaggtaggggcatctccccagcaccgcggtgaagtgctcttgctttctggcttttcattgcctgcccatctggaaggcaaacaggaacccatctgtctcgtcactgctgtgtccccagagctctgcacgtagtaggtgctctgtggttatttgaagagtaggtgagcttttctcaaggcctggcatttctggacaaggctggaactcgtcatgcaatatatgtggaaagagtgtgaagaaagagccactgcagggaggaaacacagggacggggttaccaggaaaggagacctctcccgcccacgggttgggaagtgaatatcaaaaaccacctaaaggccagatttttaactcactgaggatcagttcctgggcaagcccctatttataactcattttggggtctgaatggaggaggagtcaaggaaagttggttgattgactaaacaataaacaaaatttcatcactgctcacagctttgcaaacactgggccattgcattttgtaaatcctatcctttagtgtatttataactttttaagggaaacaggaaaccgtgaggagtaaaaatactcaaggttgggttggttaatgatacttttgcctcattaaagcccaggccatccttctgacaagccagttggagaagctttggtggcaccttccatcgtggttggtagagacagtctctgactgggaaaaagacacttatttttctttcatttgcaagtgaaaggaatccaattcaaattggctttggcaaaaaaagtcgatttacaggcctagatgcagcacttgctcagggagagggaacaagacctgcgccacctgcaagggggagaagaagctgttgcacttcatccagcttgtcatcatgtggaagaacagcttgtttgagtttgtgtctgagcaccggctcaactgccccagggagctccttgctaaagccaaaggagaaaacctctttaaggatgaaaactcggtggtgtaccccatcgtggacttccctctgcgagacatctctcttgcctcccagaggggcattgcagagcacagcgctgccttggcctcccgtgcccgcgtcctgcagcagcgccagaccattgagctgatccccctcacagaagttcactattggtaccaaggaaagacttatgtctactacatctatggcactgaccaccaggtgtatgcggtggactatcctgagcggtattgctgtggctgtaccatcgtgtgacatagcatggctgtccccagagcctgccattcacgtttgccaaggaagatggccgacactctctgagtgtgttcactgttggctgcattggacaatcacatacaaaccctggcatgtccttccagaaaaaccagcttatcatctatcaagctccaaccccttatacagctcctctggtggaatccatgactcatatgtttaacctacaataattcagctatacacattcctgtagaacaaatgagagaaataatttaaatggcaaggactttgcctctggtctcc

SEQ ID NO: 186419 - DNA, 1634 bp, Homo sapiens
  Payload ID: 16717
  Gene Symbol: SSUH2
  Gene Name: ssu-2 homolog (C. elegans)
  ENST ID: ENST00000420394
  CDS Start-End: 148-267
tgtagaacagctcacactggctggcactgctaagcaggtgcggaggggagtcagagacccccggatggaggggtgtggtggacctcagttttgaggccgagagtcctctggcgccccccacagagctcctggagagactgcccagctatgactggcttcttcaagggggcagaggacagatattcttcccacctttggaggccccagggaggccccaggagcaaaggtcctggccctcgttcctggaacacagagtccctgcgatgacggaggaggtggcccgggaagccctcctcagctttgtggactctaagtgctgctacagcagcacggtggctggagacctcgtcatccaggagctgaagcggcagaccctctgcaggtaccgtctggagacctttagtgaatccaggataagcgagtggacatttcaaccctttactaaccactctgtggatgggccgcaaagaggcgcctcccccaggctctgggacatcaaggttcaaggtcctccgatgtttcaggaagacaccaggaagttccaggtccctcactcgtcactggtcaaggaatgccacaaatgccatgggcgtgggcggtacaagtgcagcggctgccacggggcgggcacggtgcggtgcccatcctgctgcggagccaagcgcaaagccaagcagtcccggagatgtcagctgtgcgcggggtccggcaggcgaagatgcagcacttgctcagggagagggaacaagacctgcgccacctgcaagggggagaagaagctgttgcacttcatccagcttgtcatcatgtggaagaacagcttgtttgagtttgtgtctgagcaccggctcaactgccccagggagctccttgctaaagccaaaggagaaaacctctttaaggatgaaaactcggtggtgtaccccatcgtggacttccctctgcgagacatctctcttgcctcccagaggggcattgcagagcacagcgctgccttggcctcccgtgcccgcgtcctgcagcagcgccagaccattgagctgatccccctcacagaagttcactattggtaccaaggaaagacttatgtctactacatctatggcactgaccaccaggtgtatgcggtggactatcctgagcggtattgctgtggctgtaccatcgtgtgacatagcatggctgtccccagagcctgccattcacgtttgccaaggaagatggccgacactctctgagtgtgttcactgttggctgcattggacaatcacatacaaaccctggcatgtccttccagaaaaaccagcttatcatctatcaagctccaaccccttatacagctcctctggtggaatccatgactcatatgtttaacctacaataattcagctatacacattcctgtagaacaaatgagagaaataatttaaatggcaaggactttgcctctggtctccaagttaatgccccgatgatgcgtgtgatttgattttgctttttccctttgtcggtcttggttctggtgtgcttcttctagtgggagcctcttgacgatctgagtattactgaaatgttcaaggatacacacaaatatctggccctaatgcacaataaatactgcacttaggcataaa

SEQ ID NO: 186420 - DNA, 559 bp, Homo sapiens
  Payload ID: 16717
  Gene Symbol: SSUH2
  Gene Name: ssu-2 homolog (C. elegans)
  ENST ID: ENST00000427408
  CDS Start-End: 41-559
actcgaagggcagacatctctttggcaggacgtctggaacatggacagggatctgaatgaagatgacagtgtggtggacctcagttttgaggccgagagtcctctggcgccccccacagagctcctggagagactgcccagctatgactggcttcttcaagggggcagaggacagatattcttcccacctttggaggccccagggaggccccaggagcaaaggtcctggccctcgttcctggaacacagagtccctgcgatgacggaggaggtggcccgggaagccctcctcagctttgtggactctaagtgctgctacagcagcacggtggctggagacctcgtcatccaggagctgaagcggcagaccctctgcaggtaccgtctggagacctttagtgaatccaggataagcgagtggacatttcaaccctttactaaccactctgtggatgggccgcaaagaggcgcctcccccaggctctgggacatcaaggttcaaggtcctccgatgtttcaggaagacaccaggaagttccaggtccctcactcgtcactg

SEQ ID NO: 186421 - DNA, 1645 bp, Homo sapiens
  Payload ID: 16717
  Gene Symbol: SSUH2
  Gene Name: ssu-2 homolog (C. elegans)
  ENST ID: ENST00000415132
  CDS Start-End: 227-1174
ataacatggaagcaacatgcctatcatagtgctttgtgtatggtgtggtggacctcagttttgaggccgagagtcctctggcgccccccacagagctcctggagagactgcccagctatgactggcttcttcaagggggcagaggacagatattcttcccacctttggaggccccagggaggccccaggagcaaaggtcctggccctcgttcctggaacacaggagatgccctccccagttggactgctgagggctttaccactaccgtggcctcagtttctcgcctgcacgttgaggaggctggctggcccgcgtgagtccacaggcccttcccagaagcccccgcctctctgttcggtcccctgcagagtccctgcgatgacggaggaggtggcccgggaagccctcctcagctttgtggactctaagtgctgctacagcagcacggtggctggagacctcgtcatccaggagctgaagcggcagaccctctgcaggtaccgtctggagacctttagtgaatccaggataagcgagtggacatttcaaccctttactaaccactctgtggatgggccgcaaagaggcgcctcccccaggctctgggacatcaaggttcaaggtcctccgatgtttcaggaagacaccaggaagttccaggtccctcactcgtcactggtcaaggaatgccacaaatgccatgggcgtgggcggtacaagtgcagcggctgccacggggcgggcacggtgcggtgcccatcctgctgcggagccaagcgcaaagccaagcagtcccggagatgtcagctgtgcgcggggtccggcaggcgaagatgcagcacttgctcagggagagggaacaagacctgcgccacctgcaagggggagaagaagctgttgcacttcatccagcttgtcatcatgtggaagaacagcttgtttgagtttgtgtctgagcaccggctcaactgccccagggagctccttgctaaagccaaaggagaaaacctctttaaggatgaaaactcggtggtgtaccccatcgtggacttccctctgcgagacatctctcttgcctcccagaggggcattgcagagcacagcgctgccttggcctcccgtgcccgcgtcctgcagcaggtgagccagggcggaggggccatctggctctgacgtctcttcctgggctgctgagccctctttcctgagaacgtcggagcggaaggatgaggacgtagagcgccagaccattgagctgatccccctcacagaagttcactattggtaccaaggaaagacttatgtctactacatctatggcactgaccaccaggtgtatgcggtggactatcctgagcggtattgctgtggctgtaccatcgtgtgacatagcatggctgtccccagagcctgccattcacgtttgccaaggaagatggccgacactctctgagtgtgttcactgttggctgcattggacaatcacatacaaaccctggcatgtccttccagaaaaaccagcttatcatctatcaagctccaaccccttatacagctcctctggtggaatccatgactcatatgtttaacctacaataattcagctatacacattcctgtagaacaaatgagagaaataattta

SEQ ID NO: 186422 - DNA, 2632 bp, Homo sapiens
  Payload ID: 16717
  Gene Symbol: SSUH2
  Gene Name: ssu-2 homolog (C. elegans)
  ENST ID: ENST00000435138
  CDS Start-End: 268-525
atgtttcaccatgaggtttagaggggacacagatccagaccatatcatcgccccagggattccgactccccaagtctggagtggggcctaaggctctgtatttctaacaagctccctgttgagcccaagctgctgctgttcctaggcaccgctgaccaacacaacacgctcgttcaaccccctcaaggtgctctgaagattcctcgaaaatacatctgagaaattcttttgacatcccggattattctccagcctacttagttataaatgagtctgcgtgtgtctcagtctgtgctgataagacggatggagtcctcctttccttacagtaacggtctcactctgttgctcactgacgctggtcttgatcttctgggctcaagcagtcttctcacctcagcctcccaaagtgctgggatcacagacgtgagctaccgatcccagctaccattgttcttaatcaatggtatcaatgtttttttaaatggaggaagaggtaacatttgccagttatatctttgttgaatgcacgggctctgaggattagacaccaggcattgtgctaaacacatcgtatccgctgtcactggatcgccaccatgactctcagaagaagaagggatgctcattccacccactgagatggctttcaaatcgacagtagaatccagcacatattctgtctttggaaaattgctccaggtgtatcctcagaacaatccagccccgtcgtcactttccacagccactgcttggcacctgcggtagctctgagaggctccgttatgcgtgtggcatcagcctttttttctagcagccttgggctccgatagattgcaaatgacctgctttctttctgatcccgggctgctgagttcggacccctgttggatagtaaatcccaagtaaggtacctgccttcggcagctctgagatttcttcttggacacctaatacccacagtcctccagttacctgtgtgtcccctgtggtacctatggaaaccagttgttgggaaatccttgttaagaaaatgggccttgtaatagtacctcttagggctgctgtgaaggaaggataacatggaagcaacatgcctatcatagtgctttgtgtatggtgtggtggacctcagttttgaggccgagagtcctctggcgccccccacagagctcctggagagactgcccagctatgactggcttcttcaagggggcagaggacagatattcttcccacctttggaggccccagggaggccccaggagcaaaggtcctggccctcgttcctggaacacaggagatgccctccccagttggactgctgagggctttaccactaccgtggcctcagtttctcgcctgcacgttgaggaggctggctggcccgcgtgagtccacaggcccttcccagaagcccccgcctctctgttcggtcccctgcagagtccctgcgatgacggaggaggtggcccgggaagccctcctcagctttgtggactctaagtgctgctacagcagcacggtggctggagacctcgtcatccaggagctgaagcggcagaccctctgcaggtaccgtctggagacctttagtgaatccaggataagcgagtggacatttcaaccctttactaaccactctgtggatgggccgcaaagaggcgcctcccccaggctctgggacatcaaggttcaaggtcctccgatgtttcaggaagacaccaggaagttccaggtccctcactcgtcactggtcaaggaatgccacaaatgccatgggcgtgggcggtacaagtgcagcggctgccacggggcgggcacggtgcggtgcccatcctgctgcggagccaagcgcaaagccaagcagtcccggagatgtcagctgtgcgcggggtccggcaggcgaagatgcagcacttgctcagggagagggaacaagacctgcgccacctgcaagggggagaagaagctgttgcacttcatccagcttgtcatcatgtggaagaacagcttgtttgagtttgtgtctgagcaccggctcaactgccccagggagctccttgctaaagccaaaggagaaaacctctttaaggatgaaaactcggtggtgtaccccatcgtggacttccctctgcgagacatctctcttgcctcccagaggggcattgcagagcacagcgctgccttggcctcccgtgcccgcgtcctgcagcagcgccagaccattgagctgatccccctcacagaagttcactattggtaccaaggaaagacttatgtctactacatctatggcactgaccaccaggtgtatgcggtggactatcctgagcggtattgctgtggctgtaccatcgtgtgacatagcatggctgtccccagagcctgccattcacgtttgccaaggaagatggccgacactctctgagtgtgttcactgttggctgcattggacaatcacatacaaaccctggcatgtccttccagaaaaaccagcttatcatctatcaagctccaaccccttatacagctcctctggtggaatccatgactcatatgtttaacctacaataattcagctatacacattcctgtagaacaaatgagagaaataatttaaatggcaagg

SEQ ID NO: 186423 - DNA, 1636 bp, Homo sapiens
  Payload ID: 16717
  Gene Symbol: SSUH2
  Gene Name: ssu-2 homolog (C. elegans)
  Uniprot ID: Q9Y2M2
  ENST ID: ENST00000544814
  CDS Start-End: 41-1168
actcgaagggcagacatctctttggcaggacgtctggaacatggacagggatctgaatgaagatgacagtgtggtggacctcagttttgaggccgagagtcctctggcgccccccacagagctcctggagagactgcccagctatgactggcttcttcaagggggcagaggacagatattcttcccacctttggaggccccagggaggccccaggagcaaaggtcctggccctcgttcctggaacacagagtccctgcgatgacggaggaggtggcccgggaagccctcctcagctttgtggactctaagtgctgctacagcagcacggtggctggagacctcgtcatccaggagctgaagcggcagaccctctgcaggtaccgtctggagacctttagtgaatccaggataagcgagtggacatttcaaccctttactaaccactctgtggatgggccgcaaagaggcgcctcccccaggctctgggacatcaaggttcaaggtcctccgatgtttcaggaagacaccaggaagttccaggtccctcactcgtcactggtcaaggaatgccacaaatgccatgggcgtgggcggtacaagtgcagcggctgccacggggcgggcacggtgcggtgcccatcctgctgcggagccaagcgcaaagccaagcagtcccggagatgtcagctgtgcgcggggtccggcaggcgaagatgcagcacttgctcagggagagggaacaagacctgcgccacctgcaagggggagaagaagctgttgcacttcatccagcttgtcatcatgtggaagaacagcttgtttgagtttgtgtctgagcaccggctcaactgccccagggagctccttgctaaagccaaaggagaaaacctctttaaggatgaaaactcggtggtgtaccccatcgtggacttccctctgcgagacatctctcttgcctcccagaggggcattgcagagcacagcgctgccttggcctcccgtgcccgcgtcctgcagcagcgccagaccattgagctgatccccctcacagaagttcactattggtaccaaggaaagacttatgtctactacatctatggcactgaccaccaggtgtatgcggtggactatcctgagcggtattgctgtggctgtaccatcgtgtgacatagcatggctgtccccagagcctgccattcacgtttgccaaggaagatggccgacactctctgagtgtgttcactgttggctgcattggacaatcacatacaaaccctggcatgtccttccagaaaaaccagcttatcatctatcaagctccaaccccttatacagctcctctggtggaatccatgactcatatgtttaacctacaataattcagctatacacattcctgtagaacaaatgagagaaataatttaaatggcaaggactttgcctctggtctccaagttaatgccccgatgatgcgtgtgatttgattttgctttttccctttgtcggtcttggttctggtgtgcttcttctagtgggagcctcttgacgatctgagtattactgaaatgttcaaggatacacacaaatatctggccctaatgcacaataaatactgcacttaggcataaagtgcaa

SEQ ID NO: 186424 - DNA, 1290 bp, Homo sapiens
  Payload ID: 16718
  Gene Symbol: SSU72
  Gene Name: SSU72 homolog, RNA polymerase II CTD phosphatase
  Uniprot ID: Q9NP77
  ENST ID: ENST00000291386
  CDS Start-End: 313-897
ggcgccgtgacgctcagccgggccttgtggagtgcgggtctctgctgcggacgccgggggccggcgcggcgttggccgcccccggcctcgccgagtgcagcgcgcccgaaggccagtgcctgcgctccgtccgcggcccggcgcccagggtgggcggggaggccgccgcgcagtcgccgcacgctacaccgccggcgccgtcgtttcgcgtcgcccgcttccggccaccgcggccgccattttgttcgcgcggaagcgccgcggtagggtgggaacccaagcgggagagccgcgggatttgcggccgccgccatgccgtcgtccccgctgcgggtggcggtggtgtgctcgagcaaccagaaccggagcatggaggcgcacaacatcctcagcaaacggggattcagcgtccgatcctttggaacagggactcacgtgaagcttccaggaccagctcccgacaagcccaatgtttatgatttcaaaaccacatatgaccagatgtacaatgatcttcttaggaaagacaaagaactctatacacagaatgggattttacatatgctggacagaaataagagaatcaagccccggccagaaagattccagaactgcaaagacctgtttgatctgatcctcacttgcgaagagagagtgtatgaccaggtggtggaagatctgaattccagagaacaggagacctgccagcctgtgcacgtggtcaatgtggacatccaggacaaccacgaggaggccaccctgggggcgtttctcatctgtgagctctgccagtgtatccagcacacggaagacatggagaacgagatcgacgagctgctgcaggagttcgaggagaagagtggccgcacctttctgcacaccgtctgcttctactgagcccagcgcccgcatggagccgcctctggagcttcctgttgttcatactttttccttcctgacatttgtttttacttacaggtgttctgctggtgacggtagcattacccaaataaactgtgcatatgaaatgggagaggagatgccaaaacgccagatgaaagcaatcaagtttcttcttttccacttttacttatgagcaggatattgattacaaagtttttcttctttaaccaaaaaggaaagacaacggtttgtgtgcacttcccgacatacctgtgtcttcgtgtgcctgccttccctccctcctccccaccgggccggactgtacagagccctgctgcggcgtgttaggaatgacctggaattgtcaataaacagatgctgctgtca

SEQ ID NO: 186425 - DNA, 4176 bp, Homo sapiens
  Payload ID: 16718
  Gene Symbol: SSU72
  Gene Name: SSU72 homolog, RNA polymerase II CTD phosphatase
  Uniprot ID: Q9NP77
  ENST ID: ENST00000359060
  CDS Start-End: 28-489
agagccgcgggatttgcggccgccgccatgccgtcgtccccgctgcgggtggcggtggtgtgctcgagcaaccagaaccggagcatggaggcgcacaacatcctcagcaaacggggattcagcgtccgatcctttggaacagggactcacgtgaagcttccaggaccagctcccgacaagcccaatgtttatgatttcaaaaccacatatgaccagatgtacaatgatcttcttaggaaagacaaagaactgtatcccagcgggttgccctttaaaaaccccccgtgtggtcctccctggaaggtgttacgtgtggctcgggcacaggaggcgtgtcaccctgtgcagtgcacacactggctcctctgtctttgcgagagcttggtttctattcctggtgcacgtcggatcgtccacgggttagttccagtgccacccatggcagtaggcgtggtgaggcgcacagacacggtgtggggttcaccctgacgtggttcagcagagggtcgtgacatagcgtagaccagggatgcttaggtgaggaggtggaacccacaaaatcccattgcttttcacactgcagggctgccccgttatttcctttgcaggttggtgtgcgtgcgtgtgtgcgtgcgtgcctgatacacatggagccgggctgcttcacacatctggtgaggtcgttagaaggtcagataaagaagagggcggagcttgctaaccaagctgttagaagaaataatgggagagaacattccttcatttcaggaggacacagagcaggctaggtctgccgcgaagactcctatagagagaagagtattcttaaactagattctgatggacgcaacaccagttgcataatggttatgacaatcagtgcccgggtttttgaccaggcatttcatggtcacccccacgctaatggaaagtttctggatcttattttgttatagtgagtgatttgtagttttcagaacggaggccaggccaaacgtattccaaatgaaaagagaataggtgtcaaatgctaaaccttttatcttcgtgttggcactgttgccatccccgccctctcccgacatccccgcccttgaccagcatctctggccttgcccagcattgtctatgtattggcactcttgccatccccgccctttcccagcagagtctcactgtgtcaccccggctggagtgcagtggcgagatcttggctcactgcagactcactgcaacatccacctcccgggttccagtgattctcctgcttcagcctcctgggtagctgggattacaggcacgcgccaccacacctggctaatttttgtatttttagtagtcacagggtttcaccatgttggccaggctggtcttaaactcctgacttcaggtgatccaccctcctcgtcctcccaaagtgctgggattacaggcgtgagccaccatgctcagccctactcttgtatttttttttttttttttttttgagatggagtcagagtctcaccctgttgcccaaggtggagtgtagcggcttgatctcagctcactgcaacctccccctcccaagttcaagcgattctctgcctcagcctcccgaatagctgggattacaggcatccgctgtcatgcctggctaatttttgtatttttagtagagacgggggtttcaccatcttgaccaaactggtcttgaactcttgacctcgtgatccagctgcctcggcctctcagagtgttgggattacaggcgtgagccaccatgcctggcctcttggaatatttaataagctaaaaaattcttatacacaggtagattaattaggtagccaggagtggcccctgaaagtatgtctggcaaaacctagaactgcatcctagccatcactgtaccttctgccctccctgctgtctcctctgccagttacagttaaaaggttgtgggtgaggacgctgggcagagtcccaggcgtctgctgtcagctccccagcccggcctgcctgccgagccatctgggcgtcccacggtggagagtgtggtgcttgtgacgcggtggtgctgggagccatcctggtggcagatgtgggctctcactgcaagtcagtgtaagtccccagggactgtcagcagcacgtcctgctgcccctctctctgcagaagccctggtaacctgcgtttggaaaaatctctaaggatttctgaggagctgtcaggccatgtccttgtccaccctgtgtggggcacggcttcgacatggctctgctcccgtcgtgggctgagaaggagcaggtggggctgtgccttggaaaggaggccctcccgacatgcctttgtgcgaggtccctgtccatgctgtctccatcccggagccttacggcgatgggtggccacagagcctattccaagagtctggtttagggctgggtcttcccatcttcacctctgagtcttaggcgatgcgtgaccacgcagccccttccaggagtctggtttagggctgggtcttcccatcttcacctctgagtcttaggcggtgcatgaccacgcagccccttcccggagtctggtttagggctgcgtgctcaagagtctggtttggggctgggtcttcccatcgccctggaggaggcttttgtctcatctcatgattcacattaaactctgtgccatgaagcttagcctgacatcctgtttttgacaattactcttcagttagcactgtttatttttaagttcttgtatattcagtaagagaaagaaaagcagagagtgacgcacatcctcacactcccttgattggtgtaagctcagccccttcatgtcagcccactgtgacctcctgggttccagacctgggaagtacttgccacgttctgcaaggactgagtccagcttcagcagtctcatccggaaggacttggtataggcagaggatgagcctgtctctggtcattctaaaagaaggagctgagcccagtgtcccagaattcggaagctcctcctttacagagggactgtaggggttggtgatctcccaggaagcatcggcccagaagaaccccgcgtgcgtgtgtgtgctcttggtgtgtggtggggggaaggagtggcagcaggggtggcgctgggacactgtcagccacgggctctgctttggggacctcgtgtgggaaaggcattgcctgtggtggcccctcaggaggctctaggaggagcgtgccttcattaccttatttcactcggggggcgtctttgccccctaggtgggggcagaaggtgcagaatgggaagcctgccacttagctaaagctcttgcacatgatgcccttggcctggagaggagtgaagtccccaggcagttccctgtggacactggcacgatgccgggtggggcctcaggggtgttgagatgtgcaggtcgggaggaccccgataacgtttcctggttagtgatgggtgcaggggggccgcgggaagtgactgttacaagtgagagcccgaaagcaaatctgccccacagcagccggtgcgttggcagaagtcatcgccgtaaactgcagtggaagcaagacggggttcaagatgcggcccaaagataagacgcagcacttggtcgagtgttcacagcgtcaagacaaaggacgggccggcgcggtgactcaggcctgtaatcccagcactttgggaggccgaggtgggtggatcatgaggtcagaagttagagaccagcctggccaacatagtgaaaccccatttctactaaaaatacaaaaattagccgggcatggtggtgcacgcctgtagtcccagctacttgggaggctgaggcaggagagttgcttgaacctgggaggcagagcctgcagtgagccgagatcgcgctacggcactccagcctgggtgacagagtgagactctgtctcaaaaaaataaaaaaggaaggacagtgtgacttgggaggaaaatgctgcttgttcagaggcagggccggggtcgagggggaccccaccactgccatctgcctacttgccatgtggccagggcttaggtttctctgtgcatgcccacctcgcagaatttctgataattaaataaattaggacatgcacacactgagcccgagacagtgttttaaagccttcaataaattttggccagttgtcctattagtattgaaa

SEQ ID NO: 186426 - DNA, 859 bp, Homo sapiens
  Payload ID: 16719
  Gene Symbol: ST20-MTHFS
  Gene Name: ST20-MTHFS readthrough
  ENST ID: ENST00000479961
  CDS Start-End: 305-844
ggagggaagatggctgcagagaccggatattggcgctgcctccccgaatcccggacctgcgctgaggaggcggttcatctgtggccagcggtgcttcgggacccgcgctgggggaaccctggcgacggggcctggccctgctatatgcgggggcctcggctggagtgagcggcgtggacgcctctttcctccggctcttcccttgttgctgcgagagcgagagggccgcgggcggcggaggcagcggggccgggatggaggacgttaactctaacgtgaacgcggaccaggaggctggagtgcaatggcgcgatctcggctcactgcaacctctgtctcccaggttcaggtgattgcccacagtgagtatcaaaagtccaaaagaatttccatctttctgagcatgcaagatgaaattgagacagaagagatcatcaaggacattttccaacgaggcaaaatctgcttcatccctcggtaccggttccagagcaatcacatggatatggtgagaatagaatcaccagaggaaatttctttacttcccaaaacatcctggaatatccctcagcctggtgagggtgatgttcgggaggaggccttgtccacagggggacttgatctcatcttcatgccaggccttgggtttgacaaacatggcaaccgactggggaggggcaagggctactatgatgcctatctgaagcgctgtttgcagcatcaggaagtgaagccctacaccctggcgttggctttcaaagaacagatttgcctccaggtcccagtgaatgaaaacgacatgaaggtagatgaagtcctttacgaagactcgtcaacagcttaaatctggattactaca

SEQ ID NO: 186427 - DNA, 632 bp, Homo sapiens
  Payload ID: 16719
  Gene Symbol: ST20-MTHFS
  Gene Name: ST20-MTHFS readthrough
  ENST ID: ENST00000494999
  CDS Start-End: 265-632
gcggagggacggagggaagatggctgcagagaccggatattggcgctgcctccccgaatcccggacctgcgctgaggaggcggttcatctgtggccagcggtgcttcgggacccgcgctgggggaaccctggcgacggggcctggccctgctatatgcgggggcctcggctggagtgagcggcgtggacgcctctttcctccggctcttcccttgttgctgcgagagcgagagggccgcgggcggcggaggcagcggggccgggatggaggacgttaactctaacgtgaacgcggaccaggaggtgattgcccacagtgagtatcaaaagtccaaaagaatttccatctttctgagcatgcaagatgaaattgagacagaagagatcatcaaggacattttccaacgaggcaaaatctgcttcatccctcggtaccggttccagagcaatcacatggatatggtgagaatagaatcaccagaggaaatttctttacttcccaaaacatcctggaatatccctcagcctggtgagggtgatgttcgggaggaggccttgtccacagggggacttgatctcatcttcatgccaggccttgggtttgacaaacatggcaaccgactggggagggg

SEQ ID NO: 186428 - DNA, 679 bp, Homo sapiens
  Payload ID: 16719
  Gene Symbol: ST20-MTHFS
  Gene Name: ST20-MTHFS readthrough
  ENST ID: ENST00000615374
  CDS Start-End: 80-619
gccccggtggcggaggacgtcccggaggatccctctggtcgggcgcctggctttgtgtagccagccaggctggagtgcaatggcgcgatctcggctcactgcaacctctgtctcccaggttcaggtgattgcccacagtgagtatcaaaagtccaaaagaatttccatctttctgagcatgcaagatgaaattgagacagaagagatcatcaaggacattttccaacgaggcaaaatctgcttcatccctcggtaccggttccagagcaatcacatggatatggtgagaatagaatcaccagaggaaatttctttacttcccaaaacatcctggaatatccctcagcctggtgagggtgatgttcgggaggaggccttgtccacagggggacttgatctcatcttcatgccaggccttgggtttgacaaacatggcaaccgactggggaggggcaagggctactatgatgcctatctgaagcgctgtttgcagcatcaggaagtgaagccctacaccctggcgttggctttcaaagaacagatttgcctccaggtcccagtgaatgaaaacgacatgaaggtagatgaagtcctttacgaagactcgtcaacagcttaaatctggattactacagccaaataatcagtgttttatatgagagtaaagcaaagtatgtgt

SEQ ID NO: 186429 - DNA, 6764 bp, Homo sapiens
  Payload ID: 16720
  Gene Symbol: ST3GAL1
  Gene Name: ST3 beta-galactoside alpha-2,3-sialyltransferase 1
  Uniprot ID: Q11201
  ENST ID: ENST00000399640
  CDS Start-End: 826-1848
cccgcctcctcgcttcctcggctccagcctccgccggcggagcccactatgccagacagtttcgacactttgcaaagacaaagagccctagaccggagggaggaggaggaggaagaagagcggagagagaaggaagaggcgatgtgagctgggaagggggcaagtgtccgggacacccacacccctgtattctcctccgaaccccttcatgcccaaatcccggaaactccagcgtgtctccagccgtgttggtaccattttcagatttcatcttcctaaactggaaatgtcaatgagaggaaattaacacccccaagagctgcagtgagcaaatgcattgagcttgggtcaggacaattccatttggggaccagagatggacggtcactcagcctatggaggtaaagtgactaatctgaacaaagcagagactccactgatgagaaaagcagatgacagacaaccttctgtgccttcatcaagctggttgtgtacccaccatgtccctggcgacaggatgggaaagaaaaagccctaattaaggatcgtcagaaaccacagttggaggaggacggcagagacagtttccctccccgctataccaacacccttccttcgaggtcctcgctcctgagggaccctggactgtcacagagattaatgaccccttatcttctttggatgtgaaaggaaatcactggttaaagcttgatcgagagacattatcagctctttaaggattgcagaagaataggctactttattttctgaaaaggagggagttcctgctacccatcgtgggaggccaccatcaggactgcgaagatggtgaccctgcggaagaggaccctgaaagtgctcaccttcctcgtgctcttcatcttcctcacctccttcttcctgaactactcccacaccatggtggccaccacctggttccccaagcagatggtcctggagctctccgagaacctgaagagactgatcaagcacaggccttgcacctgcacccactgcatcgggcagcgcaagctctcggcctggttcgatgagaggttcaaccagaccatgcagccgctgctgaccgcccagaacgcgctcttggaggacgacacctaccgatggtggctgaggctccagcgggagaagaagcccaataacttgaatgacaccatcaaggagctgttcagagtggtgcctgggaatgtggaccctatgctggagaagaggtcggtgggctgccggcgctgcgccgttgtgggcaactcgggcaacctgagggagtcttcttatgggcctgagatagacagtcacgactttgtcctcaggatgaacaaggcgcccacggcagggtttgaagctgatgttgggaccaagaccacccaccatctggtgtaccctgagagcttccgggagctgggagataatgtcagcatgatcctggtgcccttcaagaccatcgacttggagtgggtggtgagcgccatcaccacgggcaccatttcccacacctacatcccggttcctgcaaagatcagagtgaaacaggataagatcctgatctaccacccagccttcatcaagtatgtctttgacaactggctgcaagggcacgggcgatacccatctaccggcatcctctcggtcatcttctcaatgcatgtctgcgatgaggtggacttgtacggcttcggggcagacagcaaagggaactggcaccactactgggagaacaacccatccgcgggggcttttcgcaagacgggggtgcacgatgcagactttgagtctaacgtgacggccaccttggcctccatcaataaaatccggatcttcaaggggagatgacgcagtgaagggctgaggatggacgcactgtcacacctctgcatttccagccccagcatcttgctggagccgttccatcccggagcttggaggggcagcctcaggtgtgtgcctgggcaccgctcacagcctcttgcacccagccgttggcagcatctactcagcaaggtcactaagctctgccagcgtggcagagcatgtcttggaacctgtcttgagtggggacaacgtccccccactgctgccctagagctggggagacgctgggaaaggttcaacctccacacactaaaatcattttggctcctggggcaagcttggggaatgaatgtggaagatgcctatattctgagagacaggacagtttcccaggaagatgggcagagacttgagtggcgattacctccagcacagagacgtgccaggcggtgttggcgctcggggcgagatgctgcccttctttgcacgaagcctggcctcttgcttggcgtgataaccctgtcatcttcccaaagctcatttatgagccaccagaggctcctaccccaaagattttcacagaaacttgaggccaggtgccgtggctcacacctgtaatctgaacactttgggaggccgaggcgggaggatcacttgagcccaggagttcaagaccagcctgggcaacatagtgagactcctgtctctacaaaaataaaagatttaaaaaaattagccaggcacggtggcacacacttgtagccccagctactagggaggctgaggagggaggatctcttgtgcctaggagttcgaggctgcagtgggctgtgatcacaccactgcactccagcctgggcaacagagtgagaccctgtctctgaaaaaaaaaaaaaaagaaaagaaaaaaaaccccaaacttggcaccgtgtttctgactcctgcagatgcctcttcccaagcagttgttcctttgagtagtcagtctcatggttctaatcgtggcgagagcggatctgaccacttccatgtgcctttgtatttgggaaagaaaagcatgcattggctgaaatgaaacaaaagcccttacttgggaaaagggacccccaccagcggccctgcttgctccgtagctgggaacatcttttctggtttcctgagccagcacctgaattgcaacgaagctctgaggatactcaacaccacccagcagtgcgtcagaatggaacgtacattctcattctcagactgttcaatatggtgcccgtaacctccaaagccacacaggaggctgccagcagcattttccccaagggcctgagctcagggtcaagtccctgctggccatcttggggctgtcactgggggtctgggtcaaggacatcccaggaatggtaactgccacatacctcatcttcttactccccagctactctcttttcctcattagccttcctgattatttattgatttcttttttttattcaactgacattgtttgcaccctggctctgttggtggtcctggtgttttaatgaagcttgcctcacccagtagctgggaaattaggtgggggtgcttaagggaggtttgtaggagtcctcggacgtgggatattgggggtatctagggcttggatggtttgtggaatgtcctcagcatcctcccgtcccaacccaaccttccttcttcctcattgtggacttggatttattctcaggctaggagtctccaaaactccgtgaaaccttattgctgctgggtgtggagtggagagtgacaggaatgtgggggacggtgattgttggctccagttactaatgtttaagcagaaaaaccactttcttgttgaaaatatccctgaaaaggtcgctgctgctttgaggaggcgtgactttttcctggtggagtgtgacggaggcatggggcctgtgctcccaggctcgggggagccccctctgcacacggggagggaggaacttggggacatcagtcatgggtcacaggtggcttcaggccattcacaagagtccccggaagttgcgtgccaagtttggttttttccctgaatctctgcatatgagcatttttctggagaaaggaccatagcttttattagattctcaaaggttcagaatggggaatgtgttaaacaaaccgaaaacctgtttcagctttaaaatcctccaaaactttaaagacttttcttttttctgagaaaggctggtaaatcactgagtcatcattcagaacatacagcctcgaagggcagagctcacacccatatatgacgttaagagctcaacaaatgtttgttgagtgactgagtgaccccaggggcagactccagatcatcagacactgatacagagagcgatgctatctcctcaactctccctcttctcctaaaagctgagtctatatagggatgacaggctcaggctgagcagtcgacttctctgggttttgctgtgtaagaataggtccctcaacatgaagatgtgtctgcgtctgagccagatgctgcctgggtcggttgcctggcctccgtctggtctccctccctcctactagggtggtcaagctgtgagatctcttccagcctccaaatccagctttcccattttactgatgagaaaatcaaggccacattgcagctgggtggggagtggagcgtgacaggcacgggagaggacagcgattgttgactctagttcctgatgtttaatcagaaaaaccacttttcctgtagagcacatttcctaaaaggctgctgctgtgtagggaggtgtggccttttcctggtgcagtgtgaaggagggaagtgacgggcagtcgtgaactgtctgggacagatagcacaagtcagagtttgagcaaaactagggtgttaccggcgctatgttgaaattgtctggaggcgggctttcccagcgagtctccattcagcatctggaaaaagtgtaaccagaatggaggtgtctgactctcctgtgctctctcagcgccgagctctagctgcaggctgcctgggtggccttctcacaccctcccgtgcaggagactgcatttctctttcccacagcccagcagatagctcattggcttagcaatgggcacttaacagaatccagttgttgcagccagaattaaatgcaccagtctggcttaaaccaactggaactcatccctggggtgaaggtggctgggaattagacaagagtgtgtgttagccaaaaggcacatgcatgctgtcagcaggagaatgaggagcactggttctgggcaggcagtggcaggggctccctcaggcccctgattcccagcccacagctctttctactctgcagacagagttccttggagactggccctgcattcaggcagggagcagaggggtccctgcctgcagcacccagagctgaacctgaagctacaaagatgggctgatgaggtggcccatgaggtgtcagcaacatcccaaccccctgggtctccccagtgagtcagggcactgatttgctatagctggagctacatgcacctctcctcccctcagccaccttttaggggagaaaggagggcagatttgtaacctctggttctctgcagggatcctgggctggaagaaagttcataaatggatgaatgccttttaaaactccagcttttccaagcatcattcaccaaagcatttggttaggcttagagagaaaagctggatatgagaaaatagaatgtaaaataggagggaaaaaaaaaaagaaggtggagagggcagttaagatctgggtgattctttagggaaacggctggttgagaggctttgatggaatcccattctctgctgtggccagaaggtggtgctagaggccagtcccacttggatgtgaccctggcctctgccaggattcaaaccacaaagaacatttggaactgggatgtttgctttgaagcagcccgaaaacaagtgaaaggaaaccaagataactctctctccctccgctggcaaggatcaaaaataccttgtgcagggaagcccgagcctcgaggggccactgcccagctaaagatgactggacaccagccatgcaccatcaggaaccagcacctgtcctcacccctgagaagagccccgggggtatcattatatccatcgcagacatctggtttgcagcaaatgtggctacacgccatcaggattatcctgccctgtggactgggctagctagttttgagatagagtcaacctccccatttttgtttgtcatgaaaacaccagctcctgcacccctggggtgctacctgacacctgtgcaaagaaaaggaggaaaacttagaagaaaaggcagagacaggcaagacagcatctcacagcttgtcaggatcagggcattaccgactattttttcttaccaaaagagcactgaatttcctaggggaaggtgagccacctttacacctcctgtcctccctcccagcccgtcaagcgatcccatcacccagcctcatcactcagcttcttcctagtacaaaactgccatcggttgtacgtcctgagctgtgggacgtcagctttaaccctagcctgtctcagggcctcgccctccagccccccgccccttagggtgatcgtgggtttcttcccttcctcctgcacaatcgcttcccttcactgaattcccttcaaagccaaagtttcttgagcactttttcttgtgtgcagtcttgtgtgtttgggtgttggtgtttttaaatttgctttctattcccccctgcctctctccatgtcgttacgcagctgagcactggttgggatgcattcgaatgacttcagcaagatcctgctttcctcagcccccgctctgttttatttattgtttaatatttccaatgatccaaatcaaagtgaataaacaaagagctattttattgtt

SEQ ID NO: 186430 - DNA, 665 bp, Homo sapiens
  Payload ID: 16720
  Gene Symbol: ST3GAL1
  Gene Name: ST3 beta-galactoside alpha-2,3-sialyltransferase 1
  ENST ID: ENST00000517668
  CDS Start-End: 526-665
cctcggctccagcctccgccggcggagcccactatgccagacagtttcgacactttgcaaagacaaagagccctagaccggagggaggaggaggaggaagaagagcggagagagaaggaagaggcgatgtgagctgggaagggggcaagtgtccgggacacccacacccctgtattctcctccgaaccccttcatgcccaaatcccggaaactccagcgtgtctccagccgtgttggtaccattttcagatttcatcttcctaaactggaaatgtcaatgagaggaaattaacacccccaagagctgcagtgagcaaatgcattgagcttgggtcaggacaattccatttggggaccagagatggacggtcactcagcctatggagatgaagaaactgaggttcagagaggttaagagactccactgaggtcacacagccgaggctccagcgggagaagaagcccaataacttgaatgacaccatcaaggagctgttcagagtggtgcctgggaatgtggaccctatgctggagaagaggtcggtgggctgccggcgctgcgccgttgtgggcaactcgggcaacctgagggagtcttcttatgggcctgagatagacagtcacgactttgtcctcaggatgaacaaggcgcccacggcagggtt

SEQ ID NO: 186431 - DNA, 741 bp, Homo sapiens
  Payload ID: 16720
  Gene Symbol: ST3GAL1
  Gene Name: ST3 beta-galactoside alpha-2,3-sialyltransferase 1
  ENST ID: ENST00000523855
  CDS Start-End: 601-741
ggtgactctcttctctccccacactgagtggcttgaaagggctcagaggcttcacatgagcacttaacatttactgtgtatatctgagccaagtagggaaagaaactgtctcaccaatcctcacgccctctccccatgctaagtctcccgagtattttcttctgtttttcagatgaagaaactgaggttcagagaggttaagagactccactgaggtcacacagccgatgacagacaaccttctgtgccttcatcaagctggttgtgtacccaccatgtccctggcgacaggatgggaaagaaaaagccctaattaaggatcgtcagaaaccacagttggaggaggacggcagagacagtttccctccccgctataccaacacccttccttcgaggtcctcgctcctgagggaccctggactgtcacagagattaatgaccccttatcttctttggatgtgaaaggaaatcactggttaaagcttgatcgagagacattatcagctctttaaggattgcagaagaataggctactttattttctgaaaaggagggagttcctgctacccatcgtgggaggccaccatcaggactgcgaagatggtgaccctgcggaagaggaccctgaaagtgctcaccttcctcgtgctcttcatcttcctcacctccttcttcctgaactactcccacaccatggtggccaccacctggttccccaagcagatggtcctggagctctcc

SEQ ID NO: 186432 - DNA, 6951 bp, Homo sapiens
  Payload ID: 16720
  Gene Symbol: ST3GAL1
  Gene Name: ST3 beta-galactoside alpha-2,3-sialyltransferase 1
  Uniprot ID: Q11201
  ENST ID: ENST00000521180
  CDS Start-End: 1018-2040
cctcggctccagcctccgccggcggagcccactatgccagacagtttcgacactttgcaaagacaaagagccctagaccggagggaggaggaggaggaagaagagcggagagagaaggaagaggcgatgtgagctgggaagggggcaagtgtccgggacacccacacccctgtattctcctccgaaccccttcatgcccaaatcccggaaactccagcgtgtctccagccgtgttggtaccattttcagatttcatcttcctaaactggaaatgtcaatgagaggaaattaacacccccaagagctgcagtgagcaaatgcattgagcttgggtcaggacaattccatttggggaccagagatggacggtcactcagcctatggagatgaagaaactgaggttcagagaggttaagagactccactgaggtcacacagccgatgacagacaaccttctgtgccttcatcaagctggttgtgtacccaccatgtccctggcgacaggatgggaaagaaaaagccctaattaaggatcgtcagaaaccacagttggaggaggacggcagagacagtttccctccccgctataccaacacccttccttcgaggtcctcgctcctgagggaccctggactgtcacagagattaatgaccccttatcttctttggatgtgaaaggaaatcactggttaaagcttgatcgagagacattatcagctctttaaggattgcagaagaataggctactttattttctgaaaaggtaaatatatgcaagcaaagccaacatgccacgaatggcgttggtctaccacacagccgtgtctgggacacagttgggggtcatcccccagcaggagtgaagtcgagcttagcggcccttgtgtcctcccttggaattcctgccatcccttttgattgagcctccacctctgggatttttcttccatttttctcctctcttaggagggagttcctgctacccatcgtgggaggccaccatcaggactgcgaagatggtgaccctgcggaagaggaccctgaaagtgctcaccttcctcgtgctcttcatcttcctcacctccttcttcctgaactactcccacaccatggtggccaccacctggttccccaagcagatggtcctggagctctccgagaacctgaagagactgatcaagcacaggccttgcacctgcacccactgcatcgggcagcgcaagctctcggcctggttcgatgagaggttcaaccagaccatgcagccgctgctgaccgcccagaacgcgctcttggaggacgacacctaccgatggtggctgaggctccagcgggagaagaagcccaataacttgaatgacaccatcaaggagctgttcagagtggtgcctgggaatgtggaccctatgctggagaagaggtcggtgggctgccggcgctgcgccgttgtgggcaactcgggcaacctgagggagtcttcttatgggcctgagatagacagtcacgactttgtcctcaggatgaacaaggcgcccacggcagggtttgaagctgatgttgggaccaagaccacccaccatctggtgtaccctgagagcttccgggagctgggagataatgtcagcatgatcctggtgcccttcaagaccatcgacttggagtgggtggtgagcgccatcaccacgggcaccatttcccacacctacatcccggttcctgcaaagatcagagtgaaacaggataagatcctgatctaccacccagccttcatcaagtatgtctttgacaactggctgcaagggcacgggcgatacccatctaccggcatcctctcggtcatcttctcaatgcatgtctgcgatgaggtggacttgtacggcttcggggcagacagcaaagggaactggcaccactactgggagaacaacccatccgcgggggcttttcgcaagacgggggtgcacgatgcagactttgagtctaacgtgacggccaccttggcctccatcaataaaatccggatcttcaaggggagatgacgcagtgaagggctgaggatggacgcactgtcacacctctgcatttccagccccagcatcttgctggagccgttccatcccggagcttggaggggcagcctcaggtgtgtgcctgggcaccgctcacagcctcttgcacccagccgttggcagcatctactcagcaaggtcactaagctctgccagcgtggcagagcatgtcttggaacctgtcttgagtggggacaacgtccccccactgctgccctagagctggggagacgctgggaaaggttcaacctccacacactaaaatcattttggctcctggggcaagcttggggaatgaatgtggaagatgcctatattctgagagacaggacagtttcccaggaagatgggcagagacttgagtggcgattacctccagcacagagacgtgccaggcggtgttggcgctcggggcgagatgctgcccttctttgcacgaagcctggcctcttgcttggcgtgataaccctgtcatcttcccaaagctcatttatgagccaccagaggctcctaccccaaagattttcacagaaacttgaggccaggtgccgtggctcacacctgtaatctgaacactttgggaggccgaggcgggaggatcacttgagcccaggagttcaagaccagcctgggcaacatagtgagactcctgtctctacaaaaataaaagatttaaaaaaattagccaggcacggtggcacacacttgtagccccagctactagggaggctgaggagggaggatctcttgtgcctaggagttcgaggctgcagtgggctgtgatcacaccactgcactccagcctgggcaacagagtgagaccctgtctctgaaaaaaaaaaaaaaagaaaagaaaaaaaaccccaaacttggcaccgtgtttctgactcctgcagatgcctcttcccaagcagttgttcctttgagtagtcagtctcatggttctaatcgtggcgagagcggatctgaccacttccatgtgcctttgtatttgggaaagaaaagcatgcattggctgaaatgaaacaaaagcccttacttgggaaaagggacccccaccagcggccctgcttgctccgtagctgggaacatcttttctggtttcctgagccagcacctgaattgcaacgaagctctgaggatactcaacaccacccagcagtgcgtcagaatggaacgtacattctcattctcagactgttcaatatggtgcccgtaacctccaaagccacacaggaggctgccagcagcattttccccaagggcctgagctcagggtcaagtccctgctggccatcttggggctgtcactgggggtctgggtcaaggacatcccaggaatggtaactgccacatacctcatcttcttactccccagctactctcttttcctcattagccttcctgattatttattgatttcttttttttattcaactgacattgtttgcaccctggctctgttggtggtcctggtgttttaatgaagcttgcctcacccagtagctgggaaattaggtgggggtgcttaagggaggtttgtaggagtcctcggacgtgggatattgggggtatctagggcttggatggtttgtggaatgtcctcagcatcctcccgtcccaacccaaccttccttcttcctcattgtggacttggatttattctcaggctaggagtctccaaaactccgtgaaaccttattgctgctgggtgtggagtggagagtgacaggaatgtgggggacggtgattgttggctccagttactaatgtttaagcagaaaaaccactttcttgttgaaaatatccctgaaaaggtcgctgctgctttgaggaggcgtgactttttcctggtggagtgtgacggaggcatggggcctgtgctcccaggctcgggggagccccctctgcacacggggagggaggaacttggggacatcagtcatgggtcacaggtggcttcaggccattcacaagagtccccggaagttgcgtgccaagtttggttttttccctgaatctctgcatatgagcatttttctggagaaaggaccatagcttttattagattctcaaaggttcagaatggggaatgtgttaaacaaaccgaaaacctgtttcagctttaaaatcctccaaaactttaaagacttttcttttttctgagaaaggctggtaaatcactgagtcatcattcagaacatacagcctcgaagggcagagctcacacccatatatgacgttaagagctcaacaaatgtttgttgagtgactgagtgaccccaggggcagactccagatcatcagacactgatacagagagcgatgctatctcctcaactctccctcttctcctaaaagctgagtctatatagggatgacaggctcaggctgagcagtcgacttctctgggttttgctgtgtaagaataggtccctcaacatgaagatgtgtctgcgtctgagccagatgctgcctgggtcggttgcctggcctccgtctggtctccctccctcctactagggtggtcaagctgtgagatctcttccagcctccaaatccagctttcccattttactgatgagaaaatcaaggccacattgcagctgggtggggagtggagcgtgacaggcacgggagaggacagcgattgttgactctagttcctgatgtttaatcagaaaaaccacttttcctgtagagcacatttcctaaaaggctgctgctgtgtagggaggtgtggccttttcctggtgcagtgtgaaggagggaagtgacgggcagtcgtgaactgtctgggacagatagcacaagtcagagtttgagcaaaactagggtgttaccggcgctatgttgaaattgtctggaggcgggctttcccagcgagtctccattcagcatctggaaaaagtgtaaccagaatggaggtgtctgactctcctgtgctctctcagcgccgagctctagctgcaggctgcctgggtggccttctcacaccctcccgtgcaggagactgcatttctctttcccacagcccagcagatagctcattggcttagcaatgggcacttaacagaatccagttgttgcagccagaattaaatgcaccagtctggcttaaaccaactggaactcatccctggggtgaaggtggctgggaattagacaagagtgtgtgttagccaaaaggcacatgcatgctgtcagcaggagaatgaggagcactggttctgggcaggcagtggcaggggctccctcaggcccctgattcccagcccacagctctttctactctgcagacagagttccttggagactggccctgcattcaggcagggagcagaggggtccctgcctgcagcacccagagctgaacctgaagctacaaagatgggctgatgaggtggcccatgaggtgtcagcaacatcccaaccccctgggtctccccagtgagtcagggcactgatttgctatagctggagctacatgcacctctcctcccctcagccaccttttaggggagaaaggagggcagatttgtaacctctggttctctgcagggatcctgggctggaagaaagttcataaatggatgaatgccttttaaaactccagcttttccaagcatcattcaccaaagcatttggttaggcttagagagaaaagctggatatgagaaaatagaatgtaaaataggagggaaaaaaaaaaagaaggtggagagggcagttaagatctgggtgattctttagggaaacggctggttgagaggctttgatggaatcccattctctgctgtggccagaaggtggtgctagaggccagtcccacttggatgtgaccctggcctctgccaggattcaaaccacaaagaacatttggaactgggatgtttgctttgaagcagcccgaaaacaagtgaaaggaaaccaagataactctctctccctccgctggcaaggatcaaaaataccttgtgcagggaagcccgagcctcgaggggccactgcccagctaaagatgactggacaccagccatgcaccatcaggaaccagcacctgtcctcacccctgagaagagccccgggggtatcattatatccatcgcagacatctggtttgcagcaaatgtggctacacgccatcaggattatcctgccctgtggactgggctagctagttttgagatagagtcaacctccccatttttgtttgtcatgaaaacaccagctcctgcacccctggggtgctacctgacacctgtgcaaagaaaaggaggaaaacttagaagaaaaggcagagacaggcaagacagcatctcacagcttgtcaggatcagggcattaccgactattttttcttaccaaaagagcactgaatttcctaggggaaggtgagccacctttacacctcctgtcctccctcccagcccgtcaagcgatcccatcacccagcctcatcactcagcttcttcctagtacaaaactgccatcggttgtacgtcctgagctgtgggacgtcagctttaaccctagcctgtctcagggcctcgccctccagccccccgccccttagggtgatcgtgggtttcttcccttcctcctgcacaatcgcttcccttcactgaattcccttcaaagccaaagtttcttgagcactttttcttgtgtgcagtcttgtgtgtttgggtgttggtgtttttaaatttgctttctattcccccctgcctctctccatgtcgttacgcagctgagcactggttgggatgcattcgaatgacttcagcaagatcctgctttcctcagcccccgctctgttttatttattgtttaatatttccaatgatccaaatcaaagtgaataaacaaagagctatttta

SEQ ID NO: 186433 - DNA, 626 bp, Homo sapiens
  Payload ID: 16720
  Gene Symbol: ST3GAL1
  Gene Name: ST3 beta-galactoside alpha-2,3-sialyltransferase 1
  ENST ID: ENST00000523854
  CDS Start-End: 334-626
ggctcccatccagtgctctttaggtgactctcttctctccccacactgagtggcttgaaagggctcagaggcttcacatgagcacttaacatttactgtgtatatctgagccaagtagggaaagaaactgtctcaccaatcctcacgccctctccccatgctaagtctcccgagtattttcttctgtttttcagatgaagaaactgaggttcagagaggttaagagactccactgaggtcacacagccgaggctccagcgggagaagaagcccaataacttgaatgacaccatcaaggagctgttcagagtggtgcctgggaatgtggaccctatgctggagaagaggtcggtgggctgccggcgctgcgccgttgtgggcaactcgggcaacctgagggagtcttcttatgggcctgagatagacagtcacgactttgtcctcaggatgaacaaggcgcccacggcagggtttgaagctgatgttgggaccaagaccacccaccatctggtgtaccctgagagcttccgggagctgggagataatgtcagcatgatcctggtgcccttcaagaccatcgacttggagtgggtggtgagcgccatcaccacgggcaccatttccca

SEQ ID NO: 186434 - DNA, 895 bp, Homo sapiens
  Payload ID: 16720
  Gene Symbol: ST3GAL1
  Gene Name: ST3 beta-galactoside alpha-2,3-sialyltransferase 1
  ENST ID: ENST00000523634
  CDS Start-End: 680-895
ggaatgtgttgaacttggctgagtggtgcaagggatcccctggtgccatccctgccaaagaccctatcagtgtcatgagcctgaggatgaaatctcccgatggatgacagacaaccttctgtgccttcatcaagctggttgtgtacccaccatgtccctggcgacaggatgggaaagaaaaagccctaattaaggatcgtcagaaaccacagttggaggaggacggcagagacagtttccctccccgctataccaacacccttccttcgaggtcctcgctcctgagggaccctggactgtcacagagattaatgaccccttatcttctttggatgtgaaaggaaatcactggttaaagcttgatcgagagacattatcagctctttaaggattgcagaagaataggctactttattttctgaaaaggtaaatatatgcaagcaaagccaacatgccacgaatggcgttggtctaccacacagccgtgtctgggacacagttgggggtcatcccccagcaggagtgaagtcgagcttagcggcccttgtgtcctcccttggaattcctgccatcccttttgattgagcctccacctctgggatttttcttccatttttctcctctcttaggagggagttcctgctacccatcgtgggaggccaccatcaggactgcgaagatggtgaccctgcggaagaggaccctgaaagtgctcaccttcctcgtgctcttcatcttcctcacctccttcttcctgaactactcccacaccatggtggccaccacctggttccccaagcagatggtcctggagctctccgagaacctgaagagactgatcaagcacaggccttgcacctgcacccactgcatcgggcagcgcaagctctcggcc

SEQ ID NO: 186435 - DNA, 684 bp, Homo sapiens
  Payload ID: 16720
  Gene Symbol: ST3GAL1
  Gene Name: ST3 beta-galactoside alpha-2,3-sialyltransferase 1
  ENST ID: ENST00000519924
  CDS Start-End: 537-684
gatgctgtcatcagggagcttgggggacaggcttcttggagtgtccccctggtgggacctggaatgtgttgaacttggctgagtggtgcaagggatcccctggtgccatccctgccaaagaccctatcagtgtcatgagcctgaggatgaaatctcccgatggatgacagacaaccttctgtgccttcatcaagctggttgtgtacccaccatgtccctggcgacaggatgggaaagaaaaagccctaattaaggatcgtcagaaaccacagttggaggaggacggcagagacagtttccctccccgctataccaacacccttccttcgaggtcctcgctcctgagggaccctggactgtcacagagattaatgaccccttatcttctttggatgtgaaaggaaatcactggttaaagcttgatcgagagacattatcagctctttaaggattgcagaagaataggctactttattttctgaaaaggagggagttcctgctacccatcgtgggaggccaccatcaggactgcgaagatggtgaccctgcggaagaggaccctgaaagtgctcaccttcctcgtgctcttcatcttcctcacctccttcttcctgaactactcccacaccatggtggccaccacctggttccccaagcagatggtcctggagctctccgagaacc

SEQ ID NO: 186436 - DNA, 2580 bp, Homo sapiens
  Payload ID: 16720
  Gene Symbol: ST3GAL1
  Gene Name: ST3 beta-galactoside alpha-2,3-sialyltransferase 1
  Uniprot ID: Q11201
  ENST ID: ENST00000522652
  CDS Start-End: 739-1761
accggagggaggaggaggaggaagaagagcggagagagaaggaagaggcgatgtgagctgggaagggggcaagtgtccgggacacccacacccctgtattctcctccgaaccccttcatgcccaaatcccggaaactccagcgtgtctccagccgtgttggtaccattttcagatttcatcttcctaaactggaaatgtcaatgagaggaaattaacacccccaagagctgcagtgagcaaatgcattgagcttgggtcaggacaattccatttggggaccagagatggacggtcactcagcctatggagatgaagaaactgaggttcagagaggttaagagactccactgaggtcacacagccgatgacagacaaccttctgtgccttcatcaagctggttgtgtacccaccatgtccctggcgacaggatgggaaagaaaaagccctaattaaggatcgtcagaaaccacagttggaggaggacggcagagacagtttccctccccgctataccaacacccttccttcgaggtcctcgctcctgagggaccctggactgtcacagagattaatgaccccttatcttctttggatgtgaaaggaaatcactggttaaagcttgatcgagagacattatcagctctttaaggattgcagaagaataggctactttattttctgaaaaggagggagttcctgctacccatcgtgggaggccaccatcaggactgcgaagatggtgaccctgcggaagaggaccctgaaagtgctcaccttcctcgtgctcttcatcttcctcacctccttcttcctgaactactcccacaccatggtggccaccacctggttccccaagcagatggtcctggagctctccgagaacctgaagagactgatcaagcacaggccttgcacctgcacccactgcatcgggcagcgcaagctctcggcctggttcgatgagaggttcaaccagaccatgcagccgctgctgaccgcccagaacgcgctcttggaggacgacacctaccgatggtggctgaggctccagcgggagaagaagcccaataacttgaatgacaccatcaaggagctgttcagagtggtgcctgggaatgtggaccctatgctggagaagaggtcggtgggctgccggcgctgcgccgttgtgggcaactcgggcaacctgagggagtcttcttatgggcctgagatagacagtcacgactttgtcctcaggatgaacaaggcgcccacggcagggtttgaagctgatgttgggaccaagaccacccaccatctggtgtaccctgagagcttccgggagctgggagataatgtcagcatgatcctggtgcccttcaagaccatcgacttggagtgggtggtgagcgccatcaccacgggcaccatttcccacacctacatcccggttcctgcaaagatcagagtgaaacaggataagatcctgatctaccacccagccttcatcaagtatgtctttgacaactggctgcaagggcacgggcgatacccatctaccggcatcctctcggtcatcttctcaatgcatgtctgcgatgaggtggacttgtacggcttcggggcagacagcaaagggaactggcaccactactgggagaacaacccatccgcgggggcttttcgcaagacgggggtgcacgatgcagactttgagtctaacgtgacggccaccttggcctccatcaataaaatccggatcttcaaggggagatgacgcagtgaagggctgaggatggacgcactgtcacacctctgcatttccagccccagcatcttgctggagccgttccatcccggagcttggaggggcagcctcaggtgtgtgcctgggcaccgctcacagcctcttgcacccagccgttggcagcatctactcagcaaggtcactaagctctgccagcgtggcagagcatgtcttggaacctgtcttgagtggggacaacgtccccccactgctgccctagagctggggagacgctgggaaaggttcaacctccacacactaaaatcattttggctcctggggcaagcttggggaatgaatgtggaagatgcctatattctgagagacaggacagtttcccaggaagatgggcagagacttgagtggcgattacctccagcacagagacgtgccaggcggtgttggcgctcggggcgagatgctgcccttctttgcacgaagcctggcctcttgcttggcgtgataaccctgtcatcttcccaaagctcatttatgagccaccagaggctcctaccccaaagattttcacagaaacttgaggccaggtgccgtggctcacacctgtaatctgaacactttgggaggccgaggcgggaggatcacttgagcccaggagttcaagaccagcctgggcaacatagtgagactcctgtctctacaaaaataaaagatttaaaaaaattagccaggcacggtggcacacacttgtagccccagctactagggaggctgaggagggaggatctcttgtgcctaggagttcgaggctgcagtgggctgtgatcacac

SEQ ID NO: 186437 - DNA, 4450 bp, Homo sapiens
  Payload ID: 16721
  Gene Symbol: ST3GAL2
  Gene Name: ST3 beta-galactoside alpha-2,3-sialyltransferase 2
  Uniprot ID: Q16842
  ENST ID: ENST00000342907
  CDS Start-End: 1144-2196
cgggcggacgagagagctgcgagctaacgggtccggacgacggcggcggcggcggcggcggcggcgacggctttctgcgcgggcggcggcggcggccggagcggcgagcatggcccgcgcggcgccgggcgctgactgagggtcgtgctgcggcagcctggcgcccgacatgtgaaggggaacctgccaggggattactgtgagctcacagcaggataggctggccccgggggagtggggatgggcagaacctgggccaggagtattaggaaggagacctggaccctggtagggagctcagcacaagctcgcctgacccagatggtattggacacagtgccccgctgaacagcagctgttcccagcgccagaggaccccacagccacagtaggagctttgcgacccctacgcaactgcagctggggctggggccaccaggagaagggaccagcacctcagatgggaagcagaagggcaagacctactgcggaaaggatctcgatctctgcagcggagttttcccacactcacagagcttcctgtttttgtcctctcagggttggggtctggctcccctcctctggcagaggttttgggccaggaggtgggacaacacttgcatggaacccaagtcccctgaagcccctgtgctctctgttgtgattggagttctagggcttccccgctgccgggaacgaggggccgcctcattgtctgctcatgaaccacaaggaccccgactgctccagactggattatttcaagccgccaaagagggggacccctagagctggcagccagcaatcccaagggactagagggctgcaatggactgacctccccctcaccagggtggcaggagaggcagagcctctgtggcctagctagtgacggagagacccgatgaagccctaagcaggggccccgcctgactcagggacaggacagccactcctgccaacgtgtgttctccctacatgagggagggcgtggcaagggacccctgccactgtcccctgctgcagcacgtgcccctatgccctttgcatgtggtgccagaataggcaggctacgccgtggctggcccctcagcgggctgggaaaagagtggccacggtgaccgtcacccgcctgccggcaccatgaagtgctccctgcgggtgtggttcctctccgtggccttcctgctggtgttcatcatgtccctgctcttcacctactcgcaccacagcatggccacgctcccctacctggactcaggggccctggatgggacgcaccgggtgaagctggtgcccggctatgccggcctgcagcgcctcagcaaggagaggctctcgggcaagagctgtgcctgtcgccgctgcatgggcgatgccggtgcctccgactggtttgacagccactttgacggtaacatttcccccgtctggacccgagagaacatggatcttccaccggacgtccagaggtggtggatgatgctgcagccccagttcaagtcacacaacaccaatgaggtgctggagaagctgttccagatagtgcctggcgagaacccctaccgcttccgggacccccaccagtgccggcgctgtgccgtggtggggaactcgggcaacctgcggggctctggctatgggcaggacgtggacgggcacaacttcatcatgaggatgaatcaggcgccaaccgtgggctttgagcaggatgttggcagccgaaccacccaccatttcatgtaccctgagagtgccaagaacctgcccgccaacgtcagcttcgtgctggtgcccttcaaggtcctggaccttctgtggatcgccagcgccttgtccacggggcagatccgattcacctacgccccagtgaagtccttccttcgagtggataaagaaaaggtccagatctacaacccagccttcttcaagtatatccacgacaggtggacagagcatcacgggcggtacccttccacggggatgctggtgcttttctttgccctgcatgtgtgtgatgaggtgaacgtgtacgggttcggggccgacagccggggcaactggcaccactactgggagaacaaccggtacgcgggcgagttccggaagactggcgtgcacgacgcggacttcgaggcccacatcatcgacatgctggccaaggccagcaagatcgaagtctaccggggcaactgagccgggcctcgccgcgacccttccggcccatctatcgggcaccggggctccggcccgggacccaggaccagcaacccgcgaccaatcatgctgcagcccaggggcgtctgctgtgccccgccaatcacgagactgggggaccggccgggcctggcaccaatctgcgctgcggtcgggcggagcttctgtttctcccagccaatcatgtgactcaaggaaaacttccggcgctgtgtccagtctcctccaatcaatggccttcgggggcgggccagcggccgctcaatccccactccctcatgctttgggttagggttttctttcacgctttctgaggaggagagcatggcgcgggcctcggcgaagcacttccgtcagcctcgggcggaggatcgtcttagtagctggccagacctggaggagagcgggcggtctttgcgggcctcaggagataggtggccgcccggcccctttccccgcctgcccggataggtgcgtgcagacccaccaaagaaaagcggtcgctgcgggacccccagtcccacctcggccgcgctgtgggatggctgcgcccccagggcttcctgcgtctccaggaagccgggagtggcgccctctgcggggtggggtgctcccgggccgaactccggacaggtggaggggacagggcagagctcgaggaagccctgtccccttcagtgcaaggtgctgtcactcacgtgtgccctcgaccctcccgttcacccgcagccttctcagcgcctctccctgggccggaggcctcctcaccagcctacctgttgctctggaaaaaaatcccgtcccccgactccgtccctacccccagtcttcggccggctctggcccctggggagggggctgcacggcggaaggaggctggctatgggcccggctgcccgctgcatgtacctcctcctccacccatcgcctcttgcctgggggtaactttgcctggggctcattctttggttaagctgaagctgccgtgggtggccaaaccgcagattctttgcaaattctgagctggcagagctcgcagccgggagccggccggggaagaggagacttgcgcgccgcaagccgcctgcctccaccctgctctccatctcccgctctagaagggctgggaagctcgcggccggggttccacctggaagctgcttgcatggctgaacccagcttaggtccctgacggggctgctggtggaattctcccccttcgaagctggggaggtttaggagggggaaggcttctgtgaagctctcaaaccactaatagagccccctccccaacagtgacggcgcagatgctcccccttttcttagttgacaccaccaggcagcttcctggccgttggtaggttcctgcagctggctgagggaacagggaccggcaggggactttgttaggggagggttgggatgggcagtgggcccctgaaagttaatatattggaacctagctcgagtgtcgttctttccaattccgaaagtagaaagagtaaaaataggggtgattggggtggggttagtagaatgcctctctcagggcgctcccccctcccccaccgttttagagagctaggcctcagccagtcttgccactcccatctcagtgcttcctgaagaggctgttttgagtgttgatgaaaagcaatgcaattatgccaaacagtattgagcagaataatttatttcttttttttcttttgctttaaatcatgaatcccgccaggtacggtggctcacacctgtcatcccagcactttgggaggccaaggcgggcggattacttaatacttaaggtcaggagttcgagaccagcctggccaatatggtgaaacctcgtctctaccaaaaaaaaaaaaaaatacaaaaattagccaggcgcagtggtgcgcacctgtaatcccagctacttggaaggctgaggcaggagaatcccttgaaccgaggaggcgaaggttgcagtgagccgagattgtgccactgcactccagcctgggcgacagagcaagaccctgtctcaaaaaaattaaatcatgaatccccatcctggaagaggtaggtcccagcatccagccagattttctgcaatagtaatttaaacacacttttttatttccttccctttctgaattaaaaggaacaaaaaactgtctagtccttcattgttctgaaatgggcatgatggaagaaggcgggtctggtaggatagctgtgactgataatg

SEQ ID NO: 186438 - DNA, 8872 bp, Homo sapiens
  Payload ID: 16721
  Gene Symbol: ST3GAL2
  Gene Name: ST3 beta-galactoside alpha-2,3-sialyltransferase 2
  Uniprot ID: Q16842
  ENST ID: ENST00000393640
  CDS Start-End: 2109-3161
aatatgctcgttccattccctgctggctttgtggccacaaatggaggggcagctacgtttcttgaacacagagcctgagaggccttgtatgcagctgctggaagcagccaggagaccccaaaagtgggctggagacttcaacaaggacagggaacagggctgcactgagaggcccaggggctaggtcagcagcaccgctaggcagatttggaggggagctggggagaggcgaggcagccagctttgcaagattcccacggcacacagccagtgctcaggggttcccttctcagcgttcctctcacctggtgtggctccctcacgcttggcatggatctgagctcctttccttatggctgagacccaaactgcctacaagtggccttttctccctgttcttgcctgcaagggcagcatggggcctcaggctgtcagtgctaccagggacgctggcattcactttgtccataatgtacagatggatgtagacaactgccctcagggctgtccgggggcaggaccaagcccagcaaccacacctcctgacacagccaggttctcccccaacggcggagctgacaggactgttcatggttcattgagtggacccagcaatacctcatcgataatccacagtcgagagaagaggggcggtcagagaccggccagccctcccttctgattgggagaggcctctgcaggcactgacaggctccagagagtgctgtggggggcagtcagtgtccatagtcccctggaatcttctctgggctgttttctctgacttttcacctgaaattaactgtacatagctgggctaggaactctctaaatctgaaagcatgtggcttagggaaaatcacttgactcgtttaccttctggctaagaagtgaagactctgggctaatctagtcctccaggccctggagtcccacacagtgatgctatctgtgcagctagagggcagagcccttggtcatgtccaccctctgattaagtgggcatctcctctcctgctagctttggggcttggggtggggctgggacaaagcctggtgcccgtgtgattcatccgcacattatttctcctctctgccattctagggtcgtgctgcggcagcctggcgcccgacatgtgaaggggaacctgccaggggattactgtgagctcacagcaggataggctggccccgggggagtggggatgggcagaacctgggccaggagtattaggaaggagacctggaccctggtagggagctcagcacaagctcgcctgacccagatggtattggacacagtgccccgctgaacagcagctgttcccagcgccagaggaccccacagccacagtaggagctttgcgacccctacgcaactgcagctggggctggggccaccaggagaagggaccagcacctcagatgggaagcagaagggcaagacctactgcggaaaggatctcgatctctgcagcggagttttcccacactcacagagcttcctgtttttgtcctctcagggttggggtctggctcccctcctctggcagaggttttgggccaggaggtgggacaacacttgcatggaacccaagtcccctgaagcccctgtgctctctgttgtgattggagttctagggcttccccgctgccgggaacgaggggccgcctcattgtctgctcatgaaccacaaggaccccgactgctccagactggattatttcaagccgccaaagagggggacccctagagctggcagccagcaatcccaagggactagagggctgcaatggactgacctccccctcaccagggtggcaggagaggcagagcctctgtggcctagctagtgacggagagacccgatgaagccctaagcaggggccccgcctgactcagggacaggacagccactcctgccaacgtgtgttctccctacatgagggagggcgtggcaagggacccctgccactgtcccctgctgcagcacgtgcccctatgccctttgcatgtggtgccagaataggcaggctacgccgtggctggcccctcagcgggctgggaaaagagtggccacggtgaccgtcacccgcctgccggcaccatgaagtgctccctgcgggtgtggttcctctccgtggccttcctgctggtgttcatcatgtccctgctcttcacctactcgcaccacagcatggccacgctcccctacctggactcaggggccctggatgggacgcaccgggtgaagctggtgcccggctatgccggcctgcagcgcctcagcaaggagaggctctcgggcaagagctgtgcctgtcgccgctgcatgggcgatgccggtgcctccgactggtttgacagccactttgacggtaacatttcccccgtctggacccgagagaacatggatcttccaccggacgtccagaggtggtggatgatgctgcagccccagttcaagtcacacaacaccaatgaggtgctggagaagctgttccagatagtgcctggcgagaacccctaccgcttccgggacccccaccagtgccggcgctgtgccgtggtggggaactcgggcaacctgcggggctctggctatgggcaggacgtggacgggcacaacttcatcatgaggatgaatcaggcgccaaccgtgggctttgagcaggatgttggcagccgaaccacccaccatttcatgtaccctgagagtgccaagaacctgcccgccaacgtcagcttcgtgctggtgcccttcaaggtcctggaccttctgtggatcgccagcgccttgtccacggggcagatccgattcacctacgccccagtgaagtccttccttcgagtggataaagaaaaggtccagatctacaacccagccttcttcaagtatatccacgacaggtggacagagcatcacgggcggtacccttccacggggatgctggtgcttttctttgccctgcatgtgtgtgatgaggtgaacgtgtacgggttcggggccgacagccggggcaactggcaccactactgggagaacaaccggtacgcgggcgagttccggaagactggcgtgcacgacgcggacttcgaggcccacatcatcgacatgctggccaaggccagcaagatcgaagtctaccggggcaactgagccgggcctcgccgcgacccttccggcccatctatcgggcaccggggctccggcccgggacccaggaccagcaacccgcgaccaatcatgctgcagcccaggggcgtctgctgtgccccgccaatcacgagactgggggaccggccgggcctggcaccaatctgcgctgcggtcgggcggagcttctgtttctcccagccaatcatgtgactcaaggaaaacttccggcgctgtgtccagtctcctccaatcaatggccttcgggggcgggccagcggccgctcaatccccactccctcatgctttgggttagggttttctttcacgctttctgaggaggagagcatggcgcgggcctcggcgaagcacttccgtcagcctcgggcggaggatcgtcttagtagctggccagacctggaggagagcgggcggtctttgcgggcctcaggagataggtggccgcccggcccctttccccgcctgcccggataggtgcgtgcagacccaccaaagaaaagcggtcgctgcgggacccccagtcccacctcggccgcgctgtgggatggctgcgcccccagggcttcctgcgtctccaggaagccgggagtggcgccctctgcggggtggggtgctcccgggccgaactccggacaggtggaggggacagggcagagctcgaggaagccctgtccccttcagtgcaaggtgctgtcactcacgtgtgccctcgaccctcccgttcacccgcagccttctcagcgcctctccctgggccggaggcctcctcaccagcctacctgttgctctggaaaaaaatcccgtcccccgactccgtccctacccccagtcttcggccggctctggcccctggggagggggctgcacggcggaaggaggctggctatgggcccggctgcccgctgcatgtacctcctcctccacccatcgcctcttgcctgggggtaactttgcctggggctcattctttggttaagctgaagctgccgtgggtggccaaaccgcagattctttgcaaattctgagctggcagagctcgcagccgggagccggccggggaagaggagacttgcgcgccgcaagccgcctgcctccaccctgctctccatctcccgctctagaagggctgggaagctcgcggccggggttccacctggaagctgcttgcatggctgaacccagcttaggtccctgacggggctgctggtggaattctcccccttcgaagctggggaggtttaggagggggaaggcttctgtgaagctctcaaaccactaatagagccccctccccaacagtgacggcgcagatgctcccccttttcttagttgacaccaccaggcagcttcctggccgttggtaggttcctgcagctggctgagggaacagggaccggcaggggactttgttaggggagggttgggatgggcagtgggcccctgaaagttaatatattggaacctagctcgagtgtcgttctttccaattccgaaagtagaaagagtaaaaataggggtgattggggtggggttagtagaatgcctctctcagggcgctcccccctcccccaccgttttagagagctaggcctcagccagtcttgccactcccatctcagtgcttcctgaagaggctgttttgagtgttgatgaaaagcaatgcaattatgccaaacagtattgagcagaataatttatttcttttttttcttttgctttaaatcatgaatcccgccaggtacggtggctcacacctgtcatcccagcactttgggaggccaaggcgggcggattacttaatacttaaggtcaggagttcgagaccagcctggccaatatggtgaaacctcgtctctaccaaaaaaaaaaaaaaatacaaaaattagccaggcgcagtggtgcgcacctgtaatcccagctacttggaaggctgaggcaggagaatcccttgaaccgaggaggcgaaggttgcagtgagccgagattgtgccactgcactccagcctgggcgacagagcaagaccctgtctcaaaaaaattaaatcatgaatccccatcctggaagaggtaggtcccagcatccagccagattttctgcaatagtaatttaaacacacttttttatttccttccctttctgaattaaaaggaacaaaaaactgtctagtccttcattgttctgaaatgggcatgatggaagaaggcgggtctggtaggatagctgtgactgataatggctgagaacgttgggggatatgggaggggcgagatgactcccagataccctcccccacctatacaggaggcacctcattcctggactctgcgctccaagacactgaaatctgagcgggtacaagcattttggttaaaaatcagctcgttgtcgcctcttgagtttcctccaggagaggagttcattggagaggattcctggtagcagctcctcgcagtggctgtcctgtaaccactttggcctctgtcaacatgatgtctccaggtatccatcaggctccgatacatttgggtggccacaggctgggctgtccccacctctcagggaagtgcatctaagtcaggttttcccctctggcacagccctgcctccacagcccaatttccaccatgccacaggcaacccgcatttttatttatttaatttatttatttattgagacagagtcttgttctgttacccaggctggagtgcaatggcccgatgtcggctcatcccaacctccacctcctgggttcaagcgattcttctgcctcaggagagtagggagtagctgggattacaggcatgcaccaccactcccggataattttatatttttagtagagacgggttttctccatgttggtcaggctagtcttgaactccagacctcaggtgatctgcccgcctcggcctcccaaagtgctgggattacaggcgtgagccagtgtgcctggccgattttttttttttgagactgattctcactctcgcccaggctggagtgcagtggtgggatctcggctcattgcaagctccgcctcccgggttcacgccattctcctgcctcagtctcccgagtagctgagactacaggtgaccgccacgatgcccggcagtttttttgtatttttagtagagacggggtttcactgttagccaggatggtctccatctcctgacctcgtgatctccccgcctcagcctcccaaagtgctgggattacaggcgtgagccaccgcgcctggcttttttttttttttttttttgagatggagtcttgctctgtcacccaggctggagtgcagtggcgcgatcttggctcactgcaacctccgcctcccaagttcacccacctcaacctcccgagtagctggaattacaggggtgtgccaccacacccagctaatttttgtatttttagtagagacggggtttcaccatgttggccaggctggtctcgaactcctgaccacaggtcatccaccccctttggcctcccaatgtttgaccacacccagcccataatagatttttaaaactcctataaatatcattctacttccctttattgctaaaatgggagctttttcatccagttttttgggtgtgttccaaatattttgttaaatttcccgtctattgctgttattgtttccatttatttgcccatgtgagttgatacctttttcattcctttcccatagctttagtgacgttgtgggaagggaagttaggtaagtgatgtttcatcttgtacttactagacacctttttcttccttgatttcctgagttccctgcctccacaggtgtgtttcactcctggttgcttatatttttttatttttgagatggagttttgctctgttgaccaggctggagtgcagtggcatgatctcggctcactgcaacctgtgcctcctgggttcaagcgattctcctgcctcagccacccaaatagctgggattacagatgcgcaccaccatgcccagctaatttttgtatttttagtagagacggggtttcaccatgttggccaggctggtcttgaactcctgacctcgtgatctgcccaccttggcctcccaaggtgctggcattacaggtgtgagccaccgtgcccggcctctggttgcttatttaacccctttgtcacgatggaggcttttctcttttttttttttttttttcagatggagtctctctccattgcccaggctggaatgcagtggtgctatgtccgctcactgcaagctccgcctcccgggttcacaccattctcctgtctcagcctcctgagtagctgggattacaggcatgcactaccacgcccggctaattttgtatttttagtagagacggggtttctccatgttggtcaggctggtcttgaactcctgacgtcaggtgatccgcctgccttggcctcccaaatggtaggattacaggcgtgagccaccagaccctttttttttttttttttttttttttaagagacagggtctcctgtcgcccagactggtgcagagctcactgcagcctcaaaaactcctggattcaagtgatcctcccacctcagcctccagagcagctagagcctagctaaaaaattttttaaaaacattttatggccaggcacggtggctcatgcctataatcccagcattttgggaggctgaggcaggtgaatcacgaggtcaggagttcaagaccagcctggccaagatggtgaaaccccgtctctactaaaaatacaaaaaattggccaggcttagtggcagacggctgtgatcccagctactcgggagaccgaggcagagaattgcttgaacctgggaggtggaagttgtggtgagccgagattgagccactgcactccagcctgagcgacagagtaagactccgtctcaaaaaaaaaaaagtattttacccatccacaggcagcagacaaggaagtaccttctgtgactgtctggcaaggtcagaggcatcagggaaggtaaaatactgaaactatatttttaaaaataaaagtattcccttttgagtgtgaattaggaatcaatgccccttctcactacttttgtgaaaaaaatcacagctcctgcagcaagtctatgcctgggtaacaaccaacccacaaaatccaagaggaggtccccctctcccgcctctgtgaggcttgaggagcagtatgtatctgggccagcctggtcctcagagtgtggaattaacacctttcctctagcaactgtttgtgctgctgagaacagcacagactctctggcagcctggttctctccagagggaagcctgtgaagcagaagaaacatatggcatctgcactcagggcgcccagttccatccggccttgctataaaatgactttgcctttccttttttaaaattacaaaaataattcaaccaatacataaacatatgaagtgaatcacggagggccttcctgcgatatctttttttgcctaccatttgtcatggaatgggtaaaggggaccacagagggaagagacgctgccccttcgcagggccatggcagtcccctgggctgcgtctccacggtgcttcctgtgaaacgctgttaccacgggcaccgcactggagaccatgaaagggaagagtttgacatctcagctgtctttgctataaatagaaataaataaaccttaactaa

SEQ ID NO: 186439 - DNA, 2470 bp, Homo sapiens
  Payload ID: 16722
  Gene Symbol: ST3GAL3
  Gene Name: ST3 beta-galactoside alpha-2,3-sialyltransferase 3
  Uniprot ID: Q11203
  ENST ID: ENST00000262915
  CDS Start-End: 192-1526
gccgctgcgtccccactatggcggcgcccatgcagcccagcgcgttgtgggctcccgccggggtcccccgcggctgtcgccgccgcctacgccgctgcctccgccttcctgccccgcgtcgggccgggcgccacctcccccctgcctccctctccgctgtggtcatttaggaaatcgtaaatcatgtgaagatgggactcttggtatttgtgcgcaatctgctgctagccctctgcctctttctggtactgggatttttgtattattctgcgtggaagctacacttactccagtgggaggaggactccagtaagtatagtcactctagctcaccccaggagaagcctgttgcagattcagtggttctttcctttgactccgctggacaaacactaggctcagagtatgatcggttgggcttcctcctgaatctggactctaaactctcaccgaggactctctgcacggtggtttttggccttgactgcatattggaatcacctggagagcctaaaaaattactgatgcctgcatcccaccctctagagattttgaagtcactgagcgaggacacagcctttgcattaggatttttaaagctgcccaggcctgctgaattagccaccaagtacgcaaacttttcagagggagcttgcaagcctggctatgcttcagccttgatgacggccatcttcccccggttctccaagccagcacccatgttcctggatgactcctttcgcaagtgggctagaatccgggagttcgtgccgccttttgggatcaaaggtcaagacaatctgatcaaagccatcttgtcagtcaccaaagagtaccgcctgacccctgccttggacagcctccgctgccgccgctgcatcatcgtgggcaatggaggcgttcttgccaacaagtctctggggtcacgaattgacgactatgacattgtggtgagactgaattcagcaccagtgaaaggctttgagaaggacgtgggcagcaaaacgacactgcgcatcacctaccccgagggcgccatgcagcggcctgagcagtacgagcgcgattctctctttgtcctcgccggcttcaagtggcaggactttaagtggttgaaatacatcgtctacaaggagagagtgagtgcatcggatggcttctggaaatctgtggccactcgagtgcccaaggagccccctgagattcgaatcctcaacccatatttcatccaggaggccgccttcaccctcattggcctgcccttcaacaatggcctcatgggccgggggaacatccctacccttggcagtgtggcagtgaccatggcactacacggctgtgacgaggtggcagtcgcaggatttggctatgacatgagcacacccaacgcacccctgcactactatgagaccgttcgcatggcagccatcaaagagtcctggacgcacaatatccagcgagagaaagagtttctgcggaagctggtgaaagctcgcgtcatcactgatctaagcagtggcatctgagtgggcccagcacatggccatagaggcccaggcaccaccaggagcagcagccagcaccacctacacaggagtcttcagacccagagaaggacggtgccaagggccccaggggcagcaaggccttggtggagcagccagagctgtgcctgctcagcagccagtctcagagaccagcactcagcctcattcagcatgggtccttgatgccagagggccagcaggctcctggctgtgcccagcaggcccagcatgcaggtggtgggacactgggcagcaaggctgctgccggaatcacttctccaatcagtgtttggtgtattatcattttgtgaatttgggtaggggggagggtagggataatttatttttaaataaggttggagatgtcaagttgggttcacttgccatgcaggaagaggcccactagagggcccatcaggcagtgttacctgttagctccctgtggggcaggagtgccaggaccagcctgtaccttgctgtggggctacaggatggtgggcaggatctcaagccagccccctccagctcatgacactgtttggcctttcttggggagaaggcggggtattcccactcaccagccctagctgtcccatggggaaaccctggagccatcccttcggagccaacaagaccgccccagggctatagcagaaagaactttaaagctcaggagggtgacgcccagctccgcctgctgggaagagctcccctccacagctgcagctgatccataggactaccgcaggcccggactcaccaacttgccacatgttctaggtttcagcaacaagactgccaggtggttgggttctgcctttagcctggaccaaagggaagtgaggcccaaggagcttacccaagctgtggcagccgtcccaggccacccccatggaagcaataaagctcttccctgagcctgg

SEQ ID NO: 186440 - DNA, 2377 bp, Homo sapiens
  Payload ID: 16722
  Gene Symbol: ST3GAL3
  Gene Name: ST3 beta-galactoside alpha-2,3-sialyltransferase 3
  Uniprot ID: Q11203
  ENST ID: ENST00000351035
  CDS Start-End: 192-1433
gccgctgcgtccccactatggcggcgcccatgcagcccagcgcgttgtgggctcccgccggggtcccccgcggctgtcgccgccgcctacgccgctgcctccgccttcctgccccgcgtcgggccgggcgccacctcccccctgcctccctctccgctgtggtcatttaggaaatcgtaaatcatgtgaagatgggactcttggtatttgtgcgcaatctgctgctagccctctgcctctttctggtactgggatttttgtattattctgcgtggaagctacacttactccagtgggaggaggactccaagtatgatcggttgggcttcctcctgaatctggactctaaactctcaccgaggactctctgcacggtggtttttggccttgactgcatattggaatcacctggagagcctaaaaaattactgatgcctgcatcccaccctctagagattttgaagtcactgagcgaggacacagcctttgcattaggatttttaaagctgcccaggcctgctgaattagccaccaagtacgcaaacttttcagagggagcttgcaagcctggctatgcttcagccttgatgacggccatcttcccccggttctccaagccagcacccatgttcctggatgactcctttcgcaagtgggctagaatccgggagttcgtgccgccttttgggatcaaaggtcaagacaatctgatcaaagccatcttgtcagtcaccaaagagtaccgcctgacccctgccttggacagcctccgctgccgccgctgcatcatcgtgggcaatggaggcgttcttgccaacaagtctctggggtcacgaattgacgactatgacattgtggtgagactgaattcagcaccagtgaaaggctttgagaaggacgtgggcagcaaaacgacactgcgcatcacctaccccgagggcgccatgcagcggcctgagcagtacgagcgcgattctctctttgtcctcgccggcttcaagtggcaggactttaagtggttgaaatacatcgtctacaaggagagagtgagtgcatcggatggcttctggaaatctgtggccactcgagtgcccaaggagccccctgagattcgaatcctcaacccatatttcatccaggaggccgccttcaccctcattggcctgcccttcaacaatggcctcatgggccgggggaacatccctacccttggcagtgtggcagtgaccatggcactacacggctgtgacgaggtggcagtcgcaggatttggctatgacatgagcacacccaacgcacccctgcactactatgagaccgttcgcatggcagccatcaaagagtcctggacgcacaatatccagcgagagaaagagtttctgcggaagctggtgaaagctcgcgtcatcactgatctaagcagtggcatctgagtgggcccagcacatggccatagaggcccaggcaccaccaggagcagcagccagcaccacctacacaggagtcttcagacccagagaaggacggtgccaagggccccaggggcagcaaggccttggtggagcagccagagctgtgcctgctcagcagccagtctcagagaccagcactcagcctcattcagcatgggtccttgatgccagagggccagcaggctcctggctgtgcccagcaggcccagcatgcaggtggtgggacactgggcagcaaggctgctgccggaatcacttctccaatcagtgtttggtgtattatcattttgtgaatttgggtaggggggagggtagggataatttatttttaaataaggttggagatgtcaagttgggttcacttgccatgcaggaagaggcccactagagggcccatcaggcagtgttacctgttagctccctgtggggcaggagtgccaggaccagcctgtaccttgctgtggggctacaggatggtgggcaggatctcaagccagccccctccagctcatgacactgtttggcctttcttggggagaaggcggggtattcccactcaccagccctagctgtcccatggggaaaccctggagccatcccttcggagccaacaagaccgccccagggctatagcagaaagaactttaaagctcaggagggtgacgcccagctccgcctgctgggaagagctcccctccacagctgcagctgatccataggactaccgcaggcccggactcaccaacttgccacatgttctaggtttcagcaacaagactgccaggtggttgggttctgcctttagcctggaccaaagggaagtgaggcccaaggagcttacccaagctgtggcagccgtcccaggccacccccatggaagcaataaagctcttccctgagcctgg

SEQ ID NO: 186441 - DNA, 1324 bp, Homo sapiens
  Payload ID: 16722
  Gene Symbol: ST3GAL3
  Gene Name: ST3 beta-galactoside alpha-2,3-sialyltransferase 3
  Uniprot ID: Q11203
  ENST ID: ENST00000347631
  CDS Start-End: 152-1324
cgcgttgtgggctcccgccggggtcccccgcggctgtcgccgccgcctacgccgctgcctccgccttcctgccccgcgtcgggccgggcgccacctcccccctgcctccctctccgctgtggtcatttaggaaatcgtaaatcatgtgaagatgggactcttggtatttgtgcgcaatctgctgctagccctctgcctctttctggtactgggatttttgtattattctgcgtggaagctacacttactccagtgggaggaggactccagtaagtatagtcactctagctcaccccaggagaagcctgttgcagattcagtggttctttcctttgactccgctggacaaacactaggctcagagtatgatcggttgggcttcctcctgaatctggactctaaactgcctgctgaattagccaccaagtacgcaaacttttcagagggagcttgcaagcctggctatgcttcagccttgatgacggccatcttcccccggttctccaagccagcacccatgttcctggatgactcctttcgcaagtgggctagaatccgggagttcgtgccgccttttgggatcaaaggtcaagacaatctgatcaaagccatcttgtcagtcaccaaagagtaccgcctgacccctgccttggacagcctccgctgccgccgctgcatcatcgtgggcaatggaggcgttcttgccaacaagtctctggggtcacgaattgacgactatgacattgtggtgagactgaattcagcaccagtgaaaggctttgagaaggacgtgggcagcaaaacgacactgcgcatcacctaccccgagggcgccatgcagcggcctgagcagtacgagcgcgattctctctttgtcctcgccggcttcaagtggcaggactttaagtggttgaaatacatcgtctacaaggagagagtgagtgcatcggatggcttctggaaatctgtggccactcgagtgcccaaggagccccctgagattcgaatcctcaacccatatttcatccaggaggccgccttcaccctcattggcctgcccttcaacaatggcctcatgggccgggggaacatccctacccttggcagtgtggcagtgaccatggcactacacggctgtgacgaggtggcagtcgcaggatttggctatgacatgagcacacccaacgcacccctgcactactatgagaccgttcgcatggcagccatcaaagagtcctggacgcacaatatccagcgagagaaagagtttctgcggaagctggtgaaagctcgcgtcatcactgatctaagcagtggcatctga

SEQ ID NO: 186442 - DNA, 1035 bp, Homo sapiens
  Payload ID: 16722
  Gene Symbol: ST3GAL3
  Gene Name: ST3 beta-galactoside alpha-2,3-sialyltransferase 3
  Uniprot ID: Q11203
  ENST ID: ENST00000332628
  CDS Start-End: 1-1035
atgggactcttggtatttgtgcgcaatctgctgctagccctctgcctctttctggtactgggatttttgtattattctgcgtggaagctacacttactccagtgggaggaggactccaattcagtggttctttcctttgactccgctggacaaacactaggctcagagtatgatcggttgggcttcctcctgaatctggactctaaactgttctccaagccagcacccatgttcctggatgactcctttcgcaagtgggctagaatccgggagttcgtgccgccttttgggatcaaaggtcaagacaatctgatcaaagccatcttgtcagtcaccaaagagtaccgcctgacccctgccttggacagcctccgctgccgccgctgcatcatcgtgggcaatggaggcgttcttgccaacaagtctctggggtcacgaattgacgactatgacattgtggtgagactgaattcagcaccagtgaaaggctttgagaaggacgtgggcagcaaaacgacactgcgcatcacctaccccgagggcgccatgcagcggcctgagcagtacgagcgcgattctctctttgtcctcgccggcttcaagtggcaggactttaagtggttgaaatacatcgtctacaaggagagagtgagtgcatcggatggcttctggaaatctgtggccactcgagtgcccaaggagccccctgagattcgaatcctcaacccatatttcatccaggaggccgccttcaccctcattggcctgcccttcaacaatggcctcatgggccgggggaacatccctacccttggcagtgtggcagtgaccatggcactacacggctgtgacgaggtggcagtcgcaggatttggctatgacatgagcacacccaacgcacccctgcactactatgagaccgttcgcatggcagccatcaaagagtcctggacgcacaatatccagcgagagaaagagtttctgcggaagctggtgaaagctcgcgtcatcactgatctaagcagtggcatctga

SEQ ID NO: 186443 - DNA, 1969 bp, Homo sapiens
  Payload ID: 16722
  Gene Symbol: ST3GAL3
  Gene Name: ST3 beta-galactoside alpha-2,3-sialyltransferase 3
  Uniprot ID: Q11203
  ENST ID: ENST00000353126
  CDS Start-End: 192-1025
gccgctgcgtccccactatggcggcgcccatgcagcccagcgcgttgtgggctcccgccggggtcccccgcggctgtcgccgccgcctacgccgctgcctccgccttcctgccccgcgtcgggccgggcgccacctcccccctgcctccctctccgctgtggtcatttaggaaatcgtaaatcatgtgaagatgggactcttggtatttgtgcgcaatctgctgctagccctctgcctctttctggtactgggatttttgtattattctgcgtggaagctacacttactccagtgggaggaggactccaattcagtggttctttcctttgactccgctggacaaacactaggctcagagtatgatcggttgggcttcctcctgaatctggactctaaactgcctgctgaattagccaccaagtacgcaaacttttcagagggagcttgcaagcctggctatgcttcagccttgatgacggccatcttcccccggttctccaagccagcacccatgttcctggatgactcctttcgcaagtgggctagaatccgggagttcgtgccgccttttgggatcaaaggtcaagacaatctgatcaaagccatcttgtcagtcaccaaagagtaccgcctgacccctgccttggacagcctccgctgccgccgctgcatcatcgtgggcaatggaggcgttcttgccaacaagtctctggggtcacgaattgacgactatgacattgtggtgagactgaattcagcaccagtgaaaggctttgagaaggacgtgggcagcaaaacgacactgcgcatcacctaccccgagggcgccatgcagcggcctgagcagtacgagcgcgattctctctttgtcctcgccggcttcaagtggcaggactttaagtggttgaaatacatcgtctacaaggagagagtgtcctggacgcacaatatccagcgagagaaagagtttctgcggaagctggtgaaagctcgcgtcatcactgatctaagcagtggcatctgagtgggcccagcacatggccatagaggcccaggcaccaccaggagcagcagccagcaccacctacacaggagtcttcagacccagagaaggacggtgccaagggccccaggggcagcaaggccttggtggagcagccagagctgtgcctgctcagcagccagtctcagagaccagcactcagcctcattcagcatgggtccttgatgccagagggccagcaggctcctggctgtgcccagcaggcccagcatgcaggtggtgggacactgggcagcaaggctgctgccggaatcacttctccaatcagtgtttggtgtattatcattttgtgaatttgggtaggggggagggtagggataatttatttttaaataaggttggagatgtcaagttgggttcacttgccatgcaggaagaggcccactagagggcccatcaggcagtgttacctgttagctccctgtggggcaggagtgccaggaccagcctgtaccttgctgtggggctacaggatggtgggcaggatctcaagccagccccctccagctcatgacactgtttggcctttcttggggagaaggcggggtattcccactcaccagccctagctgtcccatggggaaaccctggagccatcccttcggagccaacaagaccgccccagggctatagcagaaagaactttaaagctcaggagggtgacgcccagctccgcctgctgggaagagctcccctccacagctgcagctgatccataggactaccgcaggcccggactcaccaacttgccacatgttctaggtttcagcaacaagactgccaggtggttgggttctgcctttagcctggaccaaagggaagtgaggcccaaggagcttacccaagctgtggcagccgtcccaggccacccccatggaagcaataaagctcttccctgagcctgg

SEQ ID NO: 186444 - DNA, 1479 bp, Homo sapiens
  Payload ID: 16722
  Gene Symbol: ST3GAL3
  Gene Name: ST3 beta-galactoside alpha-2,3-sialyltransferase 3
  Uniprot ID: Q11203
  ENST ID: ENST00000330208
  CDS Start-End: 192-497
gccgctgcgtccccactatggcggcgcccatgcagcccagcgcgttgtgggctcccgccggggtcccccgcggctgtcgccgccgcctacgccgctgcctccgccttcctgccccgcgtcgggccgggcgccacctcccccctgcctccctctccgctgtggtcatttaggaaatcgtaaatcatgtgaagatgggactcttggtatttgtgcgcaatctgctgctagccctctgcctctttctggtactgggatttttgtattattctgcgtggaagctacacttactccagtgggaggaggactccaagtatgatcggttgggcttcctcctgaatctggactctaaactgcctgctgaattagccaccaagtacgcaaacttttcagagggagcttgcaagcctggctatgcttcagccttgatgacggccatcttcccccgtcctggacgcacaatatccagcgagagaaagagtttctgcggaagctggtgaaagctcgcgtcatcactgatctaagcagtggcatctgagtgggcccagcacatggccatagaggcccaggcaccaccaggagcagcagccagcaccacctacacaggagtcttcagacccagagaaggacggtgccaagggccccaggggcagcaaggccttggtggagcagccagagctgtgcctgctcagcagccagtctcagagaccagcactcagcctcattcagcatgggtccttgatgccagagggccagcaggctcctggctgtgcccagcaggcccagcatgcaggtggtgggacactgggcagcaaggctgctgccggaatcacttctccaatcagtgtttggtgtattatcattttgtgaatttgggtaggggggagggtagggataatttatttttaaataaggttggagatgtcaagttgggttcacttgccatgcaggaagaggcccactagagggcccatcaggcagtgttacctgttagctccctgtggggcaggagtgccaggaccagcctgtaccttgctgtggggctacaggatggtgggcaggatctcaagccagccccctccagctcatgacactgtttggcctttcttggggagaaggcggggtattcccactcaccagccctagctgtcccatggggaaaccctggagccatcccttcggagccaacaagaccgccccagggctatagcagaaagaactttaaagctcaggagggtgacgcccagctccgcctgctgggaagagctcccctccacagctgcagctgatccataggactaccgcaggcccggactcaccaacttgccacatgttctaggtttcagcaacaagactgccaggtggttgggttctgcctttagcctggaccaaagggaagtgaggcccaaggagcttacccaagctgtggcagccgtcccaggccacccccatggaagcaataaagctcttccctgagcctgg

SEQ ID NO: 186445 - DNA, 1805 bp, Homo sapiens
  Payload ID: 16722
  Gene Symbol: ST3GAL3
  Gene Name: ST3 beta-galactoside alpha-2,3-sialyltransferase 3
  Uniprot ID: Q11203
  ENST ID: ENST00000335430
  CDS Start-End: 192-749
gccgctgcgtccccactatggcggcgcccatgcagcccagcgcgttgtgggctcccgccggggtcccccgcggctgtcgccgccgcctacgccgctgcctccgccttcctgccccgcgtcgggccgggcgccacctcccccctgcctccctctccgctgtggtcatttaggaaatcgtaaatcatgtgaagatgggactcttggtatttgtgcgcaatctgctgctagccctctgcctctttctggtactgggatttttgtattattctgcgtggaagctacacttactccagtgggaggaggactccagtaagtatagtcactctagctcaccccaggagaagcctgttgcagagtatgatcggttgggcttcctcctgaatctggactctaaactgcctgctgaattagccaccaagtacgcaaacttttcagagggagcttgcaagcctggctatgcttcagccttgatgacggccatcttcccccggttctccaagccagcacccatgttcctggatgactcctttcgcaagtgggctagaatccgggagttcgtgccgccttttgggatcaaaggtcaagacaatctgatcaaagccatcttgtcagtcaccaaagagtaccgcctgacccctgccttggacagcctccgctgccgccgctgcatcatcgtgggcaatggaggcgttcttgccaacaagtctctggggtcacgaattgacgactatgacattgtggtgaggtgagctccccaaaatggcacctcggtcctggacgcacaatatccagcgagagaaagagtttctgcggaagctggtgaaagctcgcgtcatcactgatctaagcagtggcatctgagtgggcccagcacatggccatagaggcccaggcaccaccaggagcagcagccagcaccacctacacaggagtcttcagacccagagaaggacggtgccaagggccccaggggcagcaaggccttggtggagcagccagagctgtgcctgctcagcagccagtctcagagaccagcactcagcctcattcagcatgggtccttgatgccagagggccagcaggctcctggctgtgcccagcaggcccagcatgcaggtggtgggacactgggcagcaaggctgctgccggaatcacttctccaatcagtgtttggtgtattatcattttgtgaatttgggtaggggggagggtagggataatttatttttaaataaggttggagatgtcaagttgggttcacttgccatgcaggaagaggcccactagagggcccatcaggcagtgttacctgttagctccctgtggggcaggagtgccaggaccagcctgtaccttgctgtggggctacaggatggtgggcaggatctcaagccagccccctccagctcatgacactgtttggcctttcttggggagaaggcggggtattcccactcaccagccctagctgtcccatggggaaaccctggagccatcccttcggagccaacaagaccgccccagggctatagcagaaagaactttaaagctcaggagggtgacgcccagctccgcctgctgggaagagctcccctccacagctgcagctgatccataggactaccgcaggcccggactcaccaacttgccacatgttctaggtttcagcaacaagactgccaggtggttgggttctgcctttagcctggaccaaagggaagtgaggcccaaggagcttacccaagctgtggcagccgtcccaggccacccccatggaagcaataaagctcttccctgagcctgg

SEQ ID NO: 186446 - DNA, 1335 bp, Homo sapiens
  Payload ID: 16722
  Gene Symbol: ST3GAL3
  Gene Name: ST3 beta-galactoside alpha-2,3-sialyltransferase 3
  Uniprot ID: Q11203
  ENST ID: ENST00000361746
  CDS Start-End: 1-1335
atgggactcttggtatttgtgcgcaatctgctgctagccctctgcctctttctggtactgggatttttgtattattctgcgtggaagctacacttactccagtgggaggaggactccagtaagtatagtcactctagctcaccccaggagaagcctgttgcagattcagtggttctttcctttgactccgctggacaaacactaggctcagagtatgatcggttgggcttcctcctgaatctggactctaaactctcaccgaggactctctgcacggtggtttttggccttgactgcatattggaatcacctggagagcctaaaaaattactgatgcctgcatcccaccctctagagattttgaagtcactgagcgaggacacagcctttgcattaggatttttaaagctgcccaggcctgctgaattagccaccaagtacgcaaacttttcagagggagcttgcaagcctggctatgcttcagccttgatgacggccatcttcccccggttctccaagccagcacccatgttcctggatgactcctttcgcaagtgggctagaatccgggagttcgtgccgccttttgggatcaaaggtcaagacaatctgatcaaagccatcttgtcagtcaccaaagagtaccgcctgacccctgccttggacagcctccgctgccgccgctgcatcatcgtgggcaatggaggcgttcttgccaacaagtctctggggtcacgaattgacgactatgacattgtggtgagactgaattcagcaccagtgaaaggctttgagaaggacgtgggcagcaaaacgacactgcgcatcacctaccccgagggcgccatgcagcggcctgagcagtacgagcgcgattctctctttgtcctcgccggcttcaagtggcaggactttaagtggttgaaatacatcgtctacaaggagagagtgagtgcatcggatggcttctggaaatctgtggccactcgagtgcccaaggagccccctgagattcgaatcctcaacccatatttcatccaggaggccgccttcaccctcattggcctgcccttcaacaatggcctcatgggccgggggaacatccctacccttggcagtgtggcagtgaccatggcactacacggctgtgacgaggtggcagtcgcaggatttggctatgacatgagcacacccaacgcacccctgcactactatgagaccgttcgcatggcagccatcaaagagtcctggacgcacaatatccagcgagagaaagagtttctgcggaagctggtgaaagctcgcgtcatcactgatctaagcagtggcatctga

SEQ ID NO: 186447 - DNA, 2195 bp, Homo sapiens
  Payload ID: 16722
  Gene Symbol: ST3GAL3
  Gene Name: ST3 beta-galactoside alpha-2,3-sialyltransferase 3
  Uniprot ID: Q11203
  ENST ID: ENST00000361400
  CDS Start-End: 178-1257
actatggcggcgcccatgcagcccagcgcgttgtgggctcccgccggggtcccccgcggctgtcgccgccgcctacgccgctgcctccgccttcctgccccgcgtcgggccgggcgccacctcccccctgcctccctctccgctgtggtcatttaggaaatcgtaaatcatgtgaagatgggactcttggtatttgtgcgcaatctgctgctagccctctgcctctttctggtactgggatttttgtattattctgcgtggaagctacacttactccagtgggaggaggactccaagtatgatcggttgggcttcctcctgaatctggactctaaactgcctgctgaattagccaccaagtacgcaaacttttcagagggagcttgcaagcctggctatgcttcagccttgatgacggccatcttcccccggttctccaagccagcacccatgttcctggatgactcctttcgcaagtgggctagaatccgggagttcgtgccgccttttgggatcaaaggtcaagacaatctgatcaaagccatcttgtcagtcaccaaagagtaccgcctgacccctgccttggacagcctccgctgccgccgctgcatcatcgtgggcaatggaggcgttcttgccaacaagtctctggggtcacgaattgacgactatgacattgtggtgagactgaattcagcaccagtgaaaggctttgagaaggacgtgggcagcaaaacgacactgcgcatcacctaccccgagggcgccatgcagcggcctgagcagtacgagcgcgattctctctttgtcctcgccggcttcaagtggcaggactttaagtggttgaaatacatcgtctacaaggagagagtgagtgcatcggatggcttctggaaatctgtggccactcgagtgcccaaggagccccctgagattcgaatcctcaacccatatttcatccaggaggccgccttcaccctcattggcctgcccttcaacaatggcctcatgggccgggggaacatccctacccttggcagtgtggcagtgaccatggcactacacggctgtgacgaggtggcagtcgcaggatttggctatgacatgagcacacccaacgcacccctgcactactatgagaccgttcgcatggcagccatcaaagagtcctggacgcacaatatccagcgagagaaagagtttctgcggaagctggtgaaagctcgcgtcatcactgatctaagcagtggcatctgagtgggcccagcacatggccatagaggcccaggcaccaccaggagcagcagccagcaccacctacacaggagtcttcagacccagagaaggacggtgccaagggccccaggggcagcaaggccttggtggagcagccagagctgtgcctgctcagcagccagtctcagagaccagcactcagcctcattcagcatgggtccttgatgccagagggccagcaggctcctggctgtgcccagcaggcccagcatgcaggtggtgggacactgggcagcaaggctgctgccggaatcacttctccaatcagtgtttggtgtattatcattttgtgaatttgggtaggggggagggtagggataatttatttttaaataaggttggagatgtcaagttgggttcacttgccatgcaggaagaggcccactagagggcccatcaggcagtgttacctgttagctccctgtggggcaggagtgccaggaccagcctgtaccttgctgtggggctacaggatggtgggcaggatctcaagccagccccctccagctcatgacactgtttggcctttcttggggagaaggcggggtattcccactcaccagccctagctgtcccatggggaaaccctggagccatcccttcggagccaacaagaccgccccagggctatagcagaaagaactttaaagctcaggagggtgacgcccagctccgcctgctgggaagagctcccctccacagctgcagctgatccataggactaccgcaggcccggactcaccaacttgccacatgttctaggtttcagcaacaagactgccaggtggttgggttctgcctttagcctggaccaaagggaagtgaggcccaaggagcttacccaagctgtggcagccgtcccaggccacccccatggaagcaataaagctcttccctga

SEQ ID NO: 186448 - DNA, 513 bp, Homo sapiens
  Payload ID: 16722
  Gene Symbol: ST3GAL3
  Gene Name: ST3 beta-galactoside alpha-2,3-sialyltransferase 3
  Uniprot ID: Q11203
  ENST ID: ENST00000361812
  CDS Start-End: 1-513
atgggactcttggtatttgtgcgcaatctgctgctagccctctgcctctttctggtactgggatttttgtattattctgcgtggaagctacacttactccagtgggaggaggactccagtaagtatagtcactctagctcaccccaggagaagcctgttgcagattcagtggttctttcctttgactccgctggacaaacactaggctcagagtatgatcggttgggcttcctcctgaatctggactctaaactgcctgctgaattagccaccaagtacgcaaacttttcagagggagcttgcaagcctggctatgcttcagccttgatgacggccatcttcccccggttctccaagccagcacccatgttcctggatgactcctttcgcaagtgggctagaatccgggagttcgtgccgccttttgggatcaaaggtcaagtcctggacgcacaatatccagcgagagaaagagtttctgcggaagctggtgaaagctcgcgtcatcactga

SEQ ID NO: 186449 - DNA, 2243 bp, Homo sapiens
  Payload ID: 16722
  Gene Symbol: ST3GAL3
  Gene Name: ST3 beta-galactoside alpha-2,3-sialyltransferase 3
  Uniprot ID: Q11203
  ENST ID: ENST00000361392
  CDS Start-End: 178-1305
actatggcggcgcccatgcagcccagcgcgttgtgggctcccgccggggtcccccgcggctgtcgccgccgcctacgccgctgcctccgccttcctgccccgcgtcgggccgggcgccacctcccccctgcctccctctccgctgtggtcatttaggaaatcgtaaatcatgtgaagatgggactcttggtatttgtgcgcaatctgctgctagccctctgcctctttctggtactgggatttttgtattattctgcgtggaagctacacttactccagtgggaggaggactccaattcagtggttctttcctttgactccgctggacaaacactaggctcagagtatgatcggttgggcttcctcctgaatctggactctaaactgcctgctgaattagccaccaagtacgcaaacttttcagagggagcttgcaagcctggctatgcttcagccttgatgacggccatcttcccccggttctccaagccagcacccatgttcctggatgactcctttcgcaagtgggctagaatccgggagttcgtgccgccttttgggatcaaaggtcaagacaatctgatcaaagccatcttgtcagtcaccaaagagtaccgcctgacccctgccttggacagcctccgctgccgccgctgcatcatcgtgggcaatggaggcgttcttgccaacaagtctctggggtcacgaattgacgactatgacattgtggtgagactgaattcagcaccagtgaaaggctttgagaaggacgtgggcagcaaaacgacactgcgcatcacctaccccgagggcgccatgcagcggcctgagcagtacgagcgcgattctctctttgtcctcgccggcttcaagtggcaggactttaagtggttgaaatacatcgtctacaaggagagagtgagtgcatcggatggcttctggaaatctgtggccactcgagtgcccaaggagccccctgagattcgaatcctcaacccatatttcatccaggaggccgccttcaccctcattggcctgcccttcaacaatggcctcatgggccgggggaacatccctacccttggcagtgtggcagtgaccatggcactacacggctgtgacgaggtggcagtcgcaggatttggctatgacatgagcacacccaacgcacccctgcactactatgagaccgttcgcatggcagccatcaaagagtcctggacgcacaatatccagcgagagaaagagtttctgcggaagctggtgaaagctcgcgtcatcactgatctaagcagtggcatctgagtgggcccagcacatggccatagaggcccaggcaccaccaggagcagcagccagcaccacctacacaggagtcttcagacccagagaaggacggtgccaagggccccaggggcagcaaggccttggtggagcagccagagctgtgcctgctcagcagccagtctcagagaccagcactcagcctcattcagcatgggtccttgatgccagagggccagcaggctcctggctgtgcccagcaggcccagcatgcaggtggtgggacactgggcagcaaggctgctgccggaatcacttctccaatcagtgtttggtgtattatcattttgtgaatttgggtaggggggagggtagggataatttatttttaaataaggttggagatgtcaagttgggttcacttgccatgcaggaagaggcccactagagggcccatcaggcagtgttacctgttagctccctgtggggcaggagtgccaggaccagcctgtaccttgctgtggggctacaggatggtgggcaggatctcaagccagccccctccagctcatgacactgtttggcctttcttggggagaaggcggggtattcccactcaccagccctagctgtcccatggggaaaccctggagccatcccttcggagccaacaagaccgccccagggctatagcagaaagaactttaaagctcaggagggtgacgcccagctccgcctgctgggaagagctcccctccacagctgcagctgatccataggactaccgcaggcccggactcaccaacttgccacatgttctaggtttcagcaacaagactgccaggtggttgggttctgcctttagcctggaccaaagggaagtgaggcccaaggagcttacccaagctgtggcagccgtcccaggccacccccatggaagcaataaagctcttccctga

SEQ ID NO: 186450 - DNA, 468 bp, Homo sapiens
  Payload ID: 16722
  Gene Symbol: ST3GAL3
  Gene Name: ST3 beta-galactoside alpha-2,3-sialyltransferase 3
  Uniprot ID: Q11203
  ENST ID: ENST00000372362
  CDS Start-End: 1-468
atgggactcttggtatttgtgcgcaatctgctgctagccctctgcctctttctggtactgggatttttgtattattctgcgtggaagctacacttactccagtgggaggaggactccaattcagtggttctttcctttgactccgctggacaaacactaggctcagagtatgatcggttgggcttcctcctgaatctggactctaaactgcctgctgaattagccaccaagtacgcaaacttttcagagggagcttgcaagcctggctatgcttcagccttgatgacggccatcttcccccggttctccaagccagcacccatgttcctggatgactcctttcgcaagtgggctagaatccgggagttcgtgccgccttttgggatcaaaggtcaagtcctggacgcacaatatccagcgagagaaagagtttctgcggaagctggtgaaagctcgcgtcatcactga

SEQ ID NO: 186451 - DNA, 673 bp, Homo sapiens
  Payload ID: 16722
  Gene Symbol: ST3GAL3
  Gene Name: ST3 beta-galactoside alpha-2,3-sialyltransferase 3
  Uniprot ID: Q11203
  ENST ID: ENST00000372365
  CDS Start-End: 1-561
atgggactcttggtatttgtgcgcaatctgctgctagccctctgcctctttctggtactgggatttttgtattattctgcgtggaagctacacttactccagtgggaggaggactccaattcagtggttctttcctttgactccgctggacaaacactaggctcagagtatgatcggttgggcttcctcctgaatctggactctaaactgcctgctgaattagccaccaagtacgcaaacttttcagagggagcttgcaagcctggctatgcttcagccttgatgacggccatcttcccccggttctccaagccagcacccatgttcctggatgactcctttcgcaagtgggctagaatccgggagttcgtgccgccttttgggatcaaaggtcaagacaatctgatcaaagccatcttgtcagtcaccaaagagtaccgcctgacccctgccttggacagcctccgctgccgccgctgcatcatcgtgggcaatggaggcgttcttgccaacaagtctctggggtcacgaattgacgactatgacattgtggtgaggtgagctccccaaaatggcacctcggtcctggacgcacaatatccagcgagagaaagagtttctgcggaagctggtgaaagctcgcgtcatcactgatctaagcagtggcatctga

SEQ ID NO: 186452 - DNA, 670 bp, Homo sapiens
  Payload ID: 16722
  Gene Symbol: ST3GAL3
  Gene Name: ST3 beta-galactoside alpha-2,3-sialyltransferase 3
  Uniprot ID: Q11203
  ENST ID: ENST00000372366
  CDS Start-End: 1-558
atgggactcttggtatttgtgcgcaatctgctgctagccctctgcctctttctggtactgggatttttgtattattctgcgtggaagctacacttactccagtgggaggaggactccagtaagtatagtcactctagctcaccccaggagaagcctgttgcagagtatgatcggttgggcttcctcctgaatctggactctaaactgcctgctgaattagccaccaagtacgcaaacttttcagagggagcttgcaagcctggctatgcttcagccttgatgacggccatcttcccccggttctccaagccagcacccatgttcctggatgactcctttcgcaagtgggctagaatccgggagttcgtgccgccttttgggatcaaaggtcaagacaatctgatcaaagccatcttgtcagtcaccaaagagtaccgcctgacccctgccttggacagcctccgctgccgccgctgcatcatcgtgggcaatggaggcgttcttgccaacaagtctctggggtcacgaattgacgactatgacattgtggtgaggtgagctccccaaaatggcacctcggtcctggacgcacaatatccagcgagagaaagagtttctgcggaagctggtgaaagctcgcgtcatcactgatctaagcagtggcatctga

SEQ ID NO: 186453 - DNA, 644 bp, Homo sapiens
  Payload ID: 16722
  Gene Symbol: ST3GAL3
  Gene Name: ST3 beta-galactoside alpha-2,3-sialyltransferase 3
  Uniprot ID: Q11203
  ENST ID: ENST00000372367
  CDS Start-End: 1-606
atgggactcttggtatttgtgcgcaatctgctgctagccctctgcctctttctggtactgggatttttgtattattctgcgtggaagctacacttactccagtgggaggaggactccagtaagtatagtcactctagctcaccccaggagaagcctgttgcagagtatgatcggttgggcttcctcctgaatctggactctaaactgcctgctgaattagccaccaagtacgcaaacttttcagagggagcttgcaagcctggctatgcttcagccttgatgacggccatcttcccccggttctccaagccagcacccatgttcctggatgactcctttcgcaagtgggctagaatccgggagttcgtgccgccttttgggatcaaaggtcaagacaatctgatcaaagccatcttgtcagtcaccaaagagtaccgcctgacccctgccttggacagcctccgctgccgccgctgcatcatcgtgggcaatggaggcgttcttgccaacaagtctctggggtcacgaattgacgactatgacattgtggtgagtcctggacgcacaatatccagcgagagaaagagtttctgcggaagctggtgaaagctcgcgtcatcactgatctaagcagtggcatctga

SEQ ID NO: 186454 - DNA, 1290 bp, Homo sapiens
  Payload ID: 16722
  Gene Symbol: ST3GAL3
  Gene Name: ST3 beta-galactoside alpha-2,3-sialyltransferase 3
  Uniprot ID: Q11203
  ENST ID: ENST00000372368
  CDS Start-End: 1-1290
atgggactcttggtatttgtgcgcaatctgctgctagccctctgcctctttctggtactgggatttttgtattattctgcgtggaagctacacttactccagtgggaggaggactccaattcagtggttctttcctttgactccgctggacaaacactaggctcagagtatgatcggttgggcttcctcctgaatctggactctaaactctcaccgaggactctctgcacggtggtttttggccttgactgcatattggaatcacctggagagcctaaaaaattactgatgcctgcatcccaccctctagagattttgaagtcactgagcgaggacacagcctttgcattaggatttttaaagctgcccaggcctgctgaattagccaccaagtacgcaaacttttcagagggagcttgcaagcctggctatgcttcagccttgatgacggccatcttcccccggttctccaagccagcacccatgttcctggatgactcctttcgcaagtgggctagaatccgggagttcgtgccgccttttgggatcaaaggtcaagacaatctgatcaaagccatcttgtcagtcaccaaagagtaccgcctgacccctgccttggacagcctccgctgccgccgctgcatcatcgtgggcaatggaggcgttcttgccaacaagtctctggggtcacgaattgacgactatgacattgtggtgagactgaattcagcaccagtgaaaggctttgagaaggacgtgggcagcaaaacgacactgcgcatcacctaccccgagggcgccatgcagcggcctgagcagtacgagcgcgattctctctttgtcctcgccggcttcaagtggcaggactttaagtggttgaaatacatcgtctacaaggagagagtgagtgcatcggatggcttctggaaatctgtggccactcgagtgcccaaggagccccctgagattcgaatcctcaacccatatttcatccaggaggccgccttcaccctcattggcctgcccttcaacaatggcctcatgggccgggggaacatccctacccttggcagtgtggcagtgaccatggcactacacggctgtgacgaggtggcagtcgcaggatttggctatgacatgagcacacccaacgcacccctgcactactatgagaccgttcgcatggcagccatcaaagagtcctggacgcacaatatccagcgagagaaagagtttctgcggaagctggtgaaagctcgcgtcatcactgatctaagcagtggcatctga

SEQ ID NO: 186455 - DNA, 1038 bp, Homo sapiens
  Payload ID: 16722
  Gene Symbol: ST3GAL3
  Gene Name: ST3 beta-galactoside alpha-2,3-sialyltransferase 3
  Uniprot ID: Q11203
  ENST ID: ENST00000372369
  CDS Start-End: 1-1038
atgggactcttggtatttgtgcgcaatctgctgctagccctctgcctctttctggtactgggatttttgtattattctgcgtggaagctacacttactccagtgggaggaggactccaattcagtggttctttcctttgactccgctggacaaacactaggctcagagtatgatcggttgggcttcctcctgaatctggactctaaactgcctgctgaattagccaccaagtacgcaaacttttcagagggagcttgcaagcctggctatgcttcagccttgatgacggccatcttcccccggttctccaagccagcacccatgttcctggatgactcctttcgcaagtgggctagaatccgggagttcgtgccgccttttgggatcaaaggtcaagacaatctgatcaaagccatcttgtcagtcaccaaagagtaccgcctgacccctgccttggacagcctccgctgccgccgctgcatcatcgtgggcaatggaggcgttcttgccaacaagtctctggggtcacgaattgacgactatgacattgtggtgagactgaattcagcaccagtgaaaggctttgagaaggacgtgggcagcaaaacgacactgcgcatcacctaccccgagggcgccatgcagcggcctgagcagtacgagcgcgattctctctttgtcctcgccggcttcaagtggcaggactttaagtggttgaaatacatcgtctacaaggagagagtggaggccgccttcaccctcattggcctgcccttcaacaatggcctcatgggccgggggaacatccctacccttggcagtgtggcagtgaccatggcactacacggctgtgacgaggtggcagtcgcaggatttggctatgacatgagcacacccaacgcacccctgcactactatgagaccgttcgcatggcagccatcaaagagtcctggacgcacaatatccagcgagagaaagagtttctgcggaagctggtgaaagctcgcgtcatcactgatctaagcagtggcatctga

SEQ ID NO: 186456 - DNA, 1242 bp, Homo sapiens
  Payload ID: 16722
  Gene Symbol: ST3GAL3
  Gene Name: ST3 beta-galactoside alpha-2,3-sialyltransferase 3
  Uniprot ID: Q11203
  ENST ID: ENST00000372372
  CDS Start-End: 1-1242
atgggactcttggtatttgtgcgcaatctgctgctagccctctgcctctttctggtactgggatttttgtattattctgcgtggaagctacacttactccagtgggaggaggactccaagtatgatcggttgggcttcctcctgaatctggactctaaactctcaccgaggactctctgcacggtggtttttggccttgactgcatattggaatcacctggagagcctaaaaaattactgatgcctgcatcccaccctctagagattttgaagtcactgagcgaggacacagcctttgcattaggatttttaaagctgcccaggcctgctgaattagccaccaagtacgcaaacttttcagagggagcttgcaagcctggctatgcttcagccttgatgacggccatcttcccccggttctccaagccagcacccatgttcctggatgactcctttcgcaagtgggctagaatccgggagttcgtgccgccttttgggatcaaaggtcaagacaatctgatcaaagccatcttgtcagtcaccaaagagtaccgcctgacccctgccttggacagcctccgctgccgccgctgcatcatcgtgggcaatggaggcgttcttgccaacaagtctctggggtcacgaattgacgactatgacattgtggtgagactgaattcagcaccagtgaaaggctttgagaaggacgtgggcagcaaaacgacactgcgcatcacctaccccgagggcgccatgcagcggcctgagcagtacgagcgcgattctctctttgtcctcgccggcttcaagtggcaggactttaagtggttgaaatacatcgtctacaaggagagagtgagtgcatcggatggcttctggaaatctgtggccactcgagtgcccaaggagccccctgagattcgaatcctcaacccatatttcatccaggaggccgccttcaccctcattggcctgcccttcaacaatggcctcatgggccgggggaacatccctacccttggcagtgtggcagtgaccatggcactacacggctgtgacgaggtggcagtcgcaggatttggctatgacatgagcacacccaacgcacccctgcactactatgagaccgttcgcatggcagccatcaaagagtcctggacgcacaatatccagcgagagaaagagtttctgcggaagctggtgaaagctcgcgtcatcactgatctaagcagtggcatctga

SEQ ID NO: 186457 - DNA, 2170 bp, Homo sapiens
  Payload ID: 16722
  Gene Symbol: ST3GAL3
  Gene Name: ST3 beta-galactoside alpha-2,3-sialyltransferase 3
  Uniprot ID: Q11203
  ENST ID: ENST00000372374
  CDS Start-End: 192-1226
gccgctgcgtccccactatggcggcgcccatgcagcccagcgcgttgtgggctcccgccggggtcccccgcggctgtcgccgccgcctacgccgctgcctccgccttcctgccccgcgtcgggccgggcgccacctcccccctgcctccctctccgctgtggtcatttaggaaatcgtaaatcatgtgaagatgggactcttggtatttgtgcgcaatctgctgctagccctctgcctctttctggtactgggatttttgtattattctgcgtggaagctacacttactccagtgggaggaggactccaattcagtggttctttcctttgactccgctggacaaacactaggctcagagtatgatcggttgggcttcctcctgaatctggactctaaactgttctccaagccagcacccatgttcctggatgactcctttcgcaagtgggctagaatccgggagttcgtgccgccttttgggatcaaaggtcaagacaatctgatcaaagccatcttgtcagtcaccaaagagtaccgcctgacccctgccttggacagcctccgctgccgccgctgcatcatcgtgggcaatggaggcgttcttgccaacaagtctctggggtcacgaattgacgactatgacattgtggtgagactgaattcagcaccagtgaaaggctttgagaaggacgtgggcagcaaaacgacactgcgcatcacctaccccgagggcgccatgcagcggcctgagcagtacgagcgcgattctctctttgtcctcgccggcttcaagtggcaggactttaagtggttgaaatacatcgtctacaaggagagagtgagtgcatcggatggcttctggaaatctgtggccactcgagtgcccaaggagccccctgagattcgaatcctcaacccatatttcatccaggaggccgccttcaccctcattggcctgcccttcaacaatggcctcatgggccgggggaacatccctacccttggcagtgtggcagtgaccatggcactacacggctgtgacgaggtggcagtcgcaggatttggctatgacatgagcacacccaacgcacccctgcactactatgagaccgttcgcatggcagccatcaaagagtcctggacgcacaatatccagcgagagaaagagtttctgcggaagctggtgaaagctcgcgtcatcactgatctaagcagtggcatctgagtgggcccagcacatggccatagaggcccaggcaccaccaggagcagcagccagcaccacctacacaggagtcttcagacccagagaaggacggtgccaagggccccaggggcagcaaggccttggtggagcagccagagctgtgcctgctcagcagccagtctcagagaccagcactcagcctcattcagcatgggtccttgatgccagagggccagcaggctcctggctgtgcccagcaggcccagcatgcaggtggtgggacactgggcagcaaggctgctgccggaatcacttctccaatcagtgtttggtgtattatcattttgtgaatttgggtaggggggagggtagggataatttatttttaaataaggttggagatgtcaagttgggttcacttgccatgcaggaagaggcccactagagggcccatcaggcagtgttacctgttagctccctgtggggcaggagtgccaggaccagcctgtaccttgctgtggggctacaggatggtgggcaggatctcaagccagccccctccagctcatgacactgtttggcctttcttggggagaaggcggggtattcccactcaccagccctagctgtcccatggggaaaccctggagccatcccttcggagccaacaagaccgccccagggctatagcagaaagaactttaaagctcaggagggtgacgcccagctccgcctgctgggaagagctcccctccacagctgcagctgatccataggactaccgcaggcccggactcaccaacttgccacatgttctaggtttcagcaacaagactgccaggtggttgggttctgcctttagcctggaccaaagggaagtgaggcccaaggagcttacccaagctgtggcagccgtcccaggccacccccatggaagcaataaagctcttccctgagcctgg

SEQ ID NO: 186458 - DNA, 1160 bp, Homo sapiens
  Payload ID: 16722
  Gene Symbol: ST3GAL3
  Gene Name: ST3 beta-galactoside alpha-2,3-sialyltransferase 3
  Uniprot ID: Q11203
  ENST ID: ENST00000469715
  CDS Start-End: 1-570
atgggactcttggtatttgtgcgcaatctgctgctagccctctgcctctttctggtactgggatttttgtattattctgcgtggaagctacacttactccagtgggaggaggactccaattcagtggttctttcctttgactccgctggacaaacactaggctcagagtatgatcggttgggcttcctcctgaatctggactctaaactgcctgctgaattagccaccaagtacgcaaacttttcagagggagcttgcaagcctggctatgcttcagccttgatgacggccatcttcccccggttctccaagccagcacccatgttcctggatgactcctttcgcaagtgggctagaatccgggagttcgtgccgccttttgggatcaaaggtcaagacaatctgatcaaagccatcttgtcagtcaccaaagagtaccgcctgacccctgccttggacagcctccgctgccgccgctgcatcatcgtgggcaatggaggcgttcttgccaacaagtctctggggtcacgaattgacgactatgacattgtggtgaggcccaggctctgagtgggcctgctctctgtagactgaattcagcaccagtgaaaggctttgagaaggacgtgggcagcaaaacgacactgcgcatcacctaccccgagggcgccatgcagcggcctgagcagtacgagcgcgattctctctttgtcctcgccggcttcaagtggcaggactttaagtggttgaaatacatcgtctacaaggagagagtgagtgcatcggatggcttctggaaatctgtggccactcgagtgcccaaggagccccctgagattcgaatcctcaacccatatttcatccaggaggccgccttcaccctcattggcctgcccttcaacaatggcctcatgggccgggggaacatccctacccttggcagtgtggcagtgaccatggcactacacggctgtgacgaggtggcagtcgcaggatttggctatgacatgagcacacccaacgcacccctgcactactatgagaccgttcgcatggcagccatcaaagagtcctggacgcacaatatccagcgagagaaagagtttctgcggaagctggtgaaagctcgcgtcatcactgatctaagcagtggcatctga

SEQ ID NO: 186459 - DNA, 700 bp, Homo sapiens
  Payload ID: 16722
  Gene Symbol: ST3GAL3
  Gene Name: ST3 beta-galactoside alpha-2,3-sialyltransferase 3
  ENST ID: ENST00000532911
  CDS Start-End: 204-461
actgctgccccatttgatacatctttgttgaactggcctaagttcatgccagcatctgtgctctatacaaattgtggaaccagtgggaaggatgggtgcattttaggtgcttgaaaagcaagggactcaacctccagtgggatcctcagattgctctccgagctgtctagttggtcatttaggaaatcgtaaatcatgtgaagatgggactcttggtatttgtgcgcaatctgctgctagccctctgcctctttctggtactgggatttttgtattattctgcgtggaagctacacttactccagtgggaggaggactccaattcagtggttctttcctttgactccgctggacaaacactaggctcaggtacagtgacagctgattggaatttgtggtggttcattacaatgaaaaaaggaagtgggtcactcacaacggaaatgccagtagcatgttaggctcatcatgtacaaccgtattccttgaaattccattctggggctcagtagcctgaaggtgaggctacagtaggacacctggcttcaggaaccttcaagaagctctctcttttgtcctggaacaggatgtgactgcacagcctggtgctcccaactgcacgtcagaatagtatgatcggttgggcttcctcctgaatctggactctaaactgcctgctgaattagccaccaagtacgca

SEQ ID NO: 186460 - DNA, 1007 bp, Homo sapiens
  Payload ID: 16722
  Gene Symbol: ST3GAL3
  Gene Name: ST3 beta-galactoside alpha-2,3-sialyltransferase 3
  Uniprot ID: Q11203
  ENST ID: ENST00000533997
  CDS Start-End: 1-348
atgggactcttggtatttgtgcgcaatctgctgctagccctctgcctctttctggtactgggatttttgtattattctgcgtggaagctacacttactccagtgggaggaggactccaattcagtggttctttcctttgactccgctggacaaacactaggctcagagtatgatcggttgggcttcctcctgaatctggactctaaactgcctgctgaattagccaccaagtacgcaaacttttcagagggagcttgcaagcctggctatgcttcagccttgatgacggccatcttcccccgtgagaaggttcgaaccttcatggcatggttggcatggtatggttgatgatttatcatcctggcctcctcgagagaatggactctgagagaaagacaagagcagaagctgcacattgaccatcatagtggtccagaaatgattatttggactagggccgtagcagtggagagaggttctccaagccagcacccatgttcctggatgactcctttcgcaagtgggctagaatccgggagttcgtgccgccttttgggatcaaaggtcaagacaatctgatcaaagccatcttgtcagtcaccaaagagtaccgcctgacccctgccttggacagcctccgctgccgccgctgcatcatcgtgggcaatggaggcgttcttgccaacaagtctctggggtcacgaattgacgactatgacattgtggtgagactgaattcagcaccagtgaaaggctttgagaaggacgtgggcagcaaaacgacactgcgcatcacctaccccgagggcgccatgcagcggcctgagcagtacgagcgcgattctctctttgtcctcgccggcttcaagtggcaggactttaagtggttgaaatacatcgtctacaaggagagagtgtcctggacgcacaatatccagcgagagaaagagtttctgcggaagctggtgaaagctcgcgtcatcactgatctaagcagtggcatctga

SEQ ID NO: 186461 - DNA, 873 bp, Homo sapiens
  Payload ID: 16722
  Gene Symbol: ST3GAL3
  Gene Name: ST3 beta-galactoside alpha-2,3-sialyltransferase 3
  ENST ID: ENST00000479383
  CDS Start-End: 167-424
gcccatgcagcccagcgcgttgtgggctcccgccggggtcccccgcggctgtcgccgccgcctacgccgctgcctccgccttcctgccccgcgtcgggccgggcgccacctcccccctgcctccctctccgctgtggtcatttaggaaatcgtaaatcatgtgaagatgggactcttggtatttgtgcgcaatctgctgctagccctctgcctctttctggtactgggatttttgtattattctgcgtggaagctacacttactccagtgggaggaggactccaattcagtggttctttcctttgactccgctggacaaacactaggctcaggtacagtgacagctgattggaatttgtggtggttcattacaatgaaaaaaggaagtgggtcactcacaacggaaatgccagtagcatgttaggctcatcatgtacaaccgtattccttgaaattccattctggggctcagtagcctgaaggtgaggctacagtaggacacctggcttcaggaaccttcaagaagctctctcttttgtcctggaacaggatgtgactgcacagcctggtgctcccaactgcacgtcagaatgtagagtatgatcggttgggcttcctcctgaatctggactctaaactagattttgaagtcactgagcgaggacacagcctttgcattaggatttttaaagctgcccagtaccattcagctcatgctggatacatcatttcatgaggctgcgctatccttcctgagacctgggagtatctcaaagatgggactgctttgttggtcatgaacacacaccagtgtcagagagtgcagggaaagtgtaaatggcctgctgaattagccaccaagtacgcaaactt

SEQ ID NO: 186462 - DNA, 786 bp, Homo sapiens
  Payload ID: 16722
  Gene Symbol: ST3GAL3
  Gene Name: ST3 beta-galactoside alpha-2,3-sialyltransferase 3
  Uniprot ID: Q11203
  ENST ID: ENST00000531993
  CDS Start-End: 1-786
atgggactcttggtatttgtgcgcaatctgctgctagccctctgcctctttctggtactgggatttttgtattattctgcgtggaagctacacttactccagtgggaggaggactccaagtatgatcggttgggcttcctcctgaatctggactctaaactgcctgctgaattagccaccaagtacgcaaacttttcagagggagcttgcaagcctggctatgcttcagccttgatgacggccatcttcccccggttctccaagccagcacccatgttcctggatgactcctttcgcaagtgggctagaatccgggagttcgtgccgccttttgggatcaaaggtcaagacaatctgatcaaagccatcttgtcagtcaccaaagagtaccgcctgacccctgccttggacagcctccgctgccgccgctgcatcatcgtgggcaatggaggcgttcttgccaacaagtctctggggtcacgaattgacgactatgacattgtggtgagactgaattcagcaccagtgaaaggctttgagaaggacgtgggcagcaaaacgacactgcgcatcacctaccccgagggcgccatgcagcggcctgagcagtacgagcgcgattctctctttgtcctcgccggcttcaagtggcaggactttaagtggttgaaatacatcgtctacaaggagagagtgtcctggacgcacaatatccagcgagagaaagagtttctgcggaagctggtgaaagctcgcgtcatcactgatctaagcagtggcatctga

SEQ ID NO: 186463 - DNA, 834 bp, Homo sapiens
  Payload ID: 16722
  Gene Symbol: ST3GAL3
  Gene Name: ST3 beta-galactoside alpha-2,3-sialyltransferase 3
  Uniprot ID: Q11203
  ENST ID: ENST00000533933
  CDS Start-End: 1-834
atgggactcttggtatttgtgcgcaatctgctgctagccctctgcctctttctggtactgggatttttgtattattctgcgtggaagctacacttactccagtgggaggaggactccaattcagtggttctttcctttgactccgctggacaaacactaggctcagagtatgatcggttgggcttcctcctgaatctggactctaaactgcctgctgaattagccaccaagtacgcaaacttttcagagggagcttgcaagcctggctatgcttcagccttgatgacggccatcttcccccggttctccaagccagcacccatgttcctggatgactcctttcgcaagtgggctagaatccgggagttcgtgccgccttttgggatcaaaggtcaagacaatctgatcaaagccatcttgtcagtcaccaaagagtaccgcctgacccctgccttggacagcctccgctgccgccgctgcatcatcgtgggcaatggaggcgttcttgccaacaagtctctggggtcacgaattgacgactatgacattgtggtgagactgaattcagcaccagtgaaaggctttgagaaggacgtgggcagcaaaacgacactgcgcatcacctaccccgagggcgccatgcagcggcctgagcagtacgagcgcgattctctctttgtcctcgccggcttcaagtggcaggactttaagtggttgaaatacatcgtctacaaggagagagtgtcctggacgcacaatatccagcgagagaaagagtttctgcggaagctggtgaaagctcgcgtcatcactgatctaagcagtggcatctga

SEQ ID NO: 186464 - DNA, 692 bp, Homo sapiens
  Payload ID: 16722
  Gene Symbol: ST3GAL3
  Gene Name: ST3 beta-galactoside alpha-2,3-sialyltransferase 3
  ENST ID: ENST00000461066
  CDS Start-End: 82-384
gccccgcgtcgggccgggcgccacctcccccctgcctccctctccgctgtggtcatttaggaaatcgtaaatcatgtgaagatgggactcttggtatttgtgcgcaatctgctgctagccctctgcctctttctggtactgggatttttgtattattctgcgtggaagctacacttactccagtgggaggaggactccagtaagtatagtcactctagctcaccccaggagaagcctgttgcagattcagtggttctttcctttgactccgctggacaaacactaggctcaggtacagtgacagctgattggaatttgtggtggttcattacaatgaaaaaaggaagtgggtcactcacaacggaaatgccagtagcatgttaggctcatcatgtacaaccgtattccttgaaattccattctggggctcagtagcctgaaggtgaggctacagtaggacacctggcttcaggaaccttcaagaagctctctcttttgtcctggaacaggatgtgactgcacagcctggtgctcccaactgcacgtcagaatgtagagtatgatcggttgggcttcctcctgaatctggactctaaactgcctgctgaattagccaccaagtacgcaaacttttcagagggagcttgcaagcctggctatgcttcagccttgatgacggccatcttcccccg

SEQ ID NO: 186465 - DNA, 344 bp, Homo sapiens
  Payload ID: 16722
  Gene Symbol: ST3GAL3
  Gene Name: ST3 beta-galactoside alpha-2,3-sialyltransferase 3
  Uniprot ID: Q11203
  ENST ID: ENST00000531816
  CDS Start-End: 1-306
atgggactcttggtatttgtgcgcaatctgctgctagccctctgcctctttctggtactgggatttttgtattattctgcgtggaagctacacttactccagtgggaggaggactccaagtatgatcggttgggcttcctcctgaatctggactctaaactgcctgctgaattagccaccaagtacgcaaacttttcagagggagcttgcaagcctggctatgcttcagccttgatgacggccatcttcccccgtcctggacgcacaatatccagcgagagaaagagtttctgcggaagctggtgaaagctcgcgtcatcactgatctaagcagtggcatctga

SEQ ID NO: 186466 - DNA, 1670 bp, Homo sapiens
  Payload ID: 16722
  Gene Symbol: ST3GAL3
  Gene Name: ST3 beta-galactoside alpha-2,3-sialyltransferase 3
  ENST ID: ENST00000530154
  CDS Start-End: 178-498
actatggcggcgcccatgcagcccagcgcgttgtgggctcccgccggggtcccccgcggctgtcgccgccgcctacgccgctgcctccgccttcctgccccgcgtcgggccgggcgccacctcccccctgcctccctctccgctgtggtcatttaggaaatcgtaaatcatgtgaagatgggactcttggtatttgtgcgcaatctgctgctagccctctgcctctttctggtactgggatttttgtattattctgcgtggaagctacacttactccagtgggaggaggactccaattcagtggttctttcctttgactccgctggacaaacactaggctcagagtatgatcggttgggcttcctcctgaatctggactctaaactgcctgctgaattagccaccaagtacgcaaacttttcagagggagcttgcaagcctggctatgcttcagccttgatgacggccatcttcccccgagaaaacaagagaagatgacatgttagagaatgactgcggcaggaaacccactttagacagaagagtcagagaagacgtccctgaggaggtgacatttcaacagaaatctgaatgaaaacatagaaccagccttggaaagatgcagagccgttgtggaaaggtccagactcagaaaaaggcttgtatttaaggactggacagaagtgagaaggttcgaaccttcatggcatggttggcatggtatggttgatgatttatcatcctggcctcctcgagagaatggactctgagagaaagacaagagcagaagctgcacattgaccatcatagtggtccagaaatgattatttggactagggccgtagcagtggagagaggttctccaagccagcacccatgttcctggatgactcctttcgcaagtgggctagaatccgggagttcgtgccgccttttgggatcaaaggtcaagacaatctgatcaaagccatcttgtcagtcaccaaagagtaccgcctgacccctgccttggacagcctccgctgccgccgctgcatcatcgtgggcaatggaggcgttcttgccaacaagtctctggggtcacgaattgacgactatgacattgtggtgagactgaattcagcaccagtgaaaggctttgagaaggacgtgggcagcaaaacgacactgcgcatcacctaccccgagggcgccatgcagcggcctgagcagtacgagcgcgattctctctttgtcctcgccggcttcaagtggcaggactttaagtggttgaaatacatcgtctacaaggagagagtgctctttcccaagcaaggccaagtacaggcagtgtcaagtaggtagcaagcaagagagaagacagaagtcaggtccagaaattcaggtccactctagaacagtcgatggagagagccaggagagagcagcaagggaagtgggagcacaggagggcagacaggagagagggcaggcacctcccagcccctcagctgctgcagatagggaggcagggcagctgcactgctgggtcttcttattggcccaggagccccctcaggccacagcagcacacccacagcatcccacatcctgtgcctgcccgacgactcccttcgtatcctcctctgttacacactggagccccaccacacgctctcttcaccatcatt

SEQ ID NO: 186467 - DNA, 599 bp, Homo sapiens
  Payload ID: 16722
  Gene Symbol: ST3GAL3
  Gene Name: ST3 beta-galactoside alpha-2,3-sialyltransferase 3
  Uniprot ID: Q11203
  ENST ID: ENST00000528371
  CDS Start-End: 1-561
atgggactcttggtatttgtgcgcaatctgctgctagccctctgcctctttctggtactgggatttttgtattattctgcgtggaagctacacttactccagtgggaggaggactccaagtatgatcggttgggcttcctcctgaatctggactctaaactgcctgctgaattagccaccaagtacgcaaacttttcagagggagcttgcaagcctggctatgcttcagccttgatgacggccatcttcccccggttctccaagccagcacccatgttcctggatgactcctttcgcaagtgggctagaatccgggagttcgtgccgccttttgggatcaaaggtcaagacaatctgatcaaagccatcttgtcagtcaccaaagagtaccgcctgacccctgccttggacagcctccgctgccgccgctgcatcatcgtgggcaatggaggcgttcttgccaacaagtctctggggtcacgaattgacgactatgacattgtggtgagtcctggacgcacaatatccagcgagagaaagagtttctgcggaagctggtgaaagctcgcgtcatcactgatctaagcagtggcatctga

SEQ ID NO: 186468 - DNA, 976 bp, Homo sapiens
  Payload ID: 16722
  Gene Symbol: ST3GAL3
  Gene Name: ST3 beta-galactoside alpha-2,3-sialyltransferase 3
  Uniprot ID: Q11203
  ENST ID: ENST00000490541
  CDS Start-End: 1-222
atgggactcttggtatttgtgcgcaatctgctgctagccctctgcctctttctggtactgggatttttgtattattctgcgtggaagctacacttactccagtgggaggaggactccagttctccaagccagcacccatgttcctggatgactcctttcgcaagtgggctagaatccgggagttcgtgccgccttttgggatcaaaggtcaagacaatctgatcaaagccatcttgtcagtcaccaaagagtaccgcctgacccctgccttggacagcctccgctgccgccgctgcatcatcgtgggcaatggaggcgttcttgccaacaagtctctggggtcacgaattgacgactatgacattgtggtgaggcccaggctctgagtgggcctgctctctgtagactgaattcagcaccagtgaaaggctttgagaaggacgtgggcagcaaaacgacactgcgcatcacctaccccgagggcgccatgcagcggcctgagcagtacgagcgcgattctctctttgtcctcgccggcttcaagtggcaggactttaagtggttgaaatacatcgtctacaaggagagagtgagtgcatcggatggcttctggaaatctgtggccactcgagtgcccaaggagccccctgagattcgaatcctcaacccatatttcatccaggaggccgccttcaccctcattggcctgcccttcaacaatggcctcatgggccgggggaacatccctacccttggcagtgtggcagtgaccatggcactacacggctgtgacgaggtggcagtcgcaggatttggctatgacatgagcacacccaacgcacccctgcactactatgagaccgttcgcatggcagccatcaaagagtcctggacgcacaatatccagcgagagaaagagtttctgcggaagctggtgaaagctcgcgtcatcactgatctaagcagtggcatctga

SEQ ID NO: 186469 - DNA, 420 bp, Homo sapiens
  Payload ID: 16722
  Gene Symbol: ST3GAL3
  Gene Name: ST3 beta-galactoside alpha-2,3-sialyltransferase 3
  Uniprot ID: Q11203
  ENST ID: ENST00000531451
  CDS Start-End: 1-420
atgggactcttggtatttgtgcgcaatctgctgctagccctctgcctctttctggtactgggatttttgtattattctgcgtggaagctacacttactccagtgggaggaggactccaagtatgatcggttgggcttcctcctgaatctggactctaaactgcctgctgaattagccaccaagtacgcaaacttttcagagggagcttgcaagcctggctatgcttcagccttgatgacggccatcttcccccggttctccaagccagcacccatgttcctggatgactcctttcgcaagtgggctagaatccgggagttcgtgccgccttttgggatcaaaggtcaagtcctggacgcacaatatccagcgagagaaagagtttctgcggaagctggtgaaagctcgcgtcatcactga

SEQ ID NO: 186470 - DNA, 781 bp, Homo sapiens
  Payload ID: 16722
  Gene Symbol: ST3GAL3
  Gene Name: ST3 beta-galactoside alpha-2,3-sialyltransferase 3
  Uniprot ID: Q11203
  ENST ID: ENST00000533212
  CDS Start-End: 1-456
atgggactcttggtatttgtgcgcaatctgctgctagccctctgcctctttctggtactgggatttttgtattattctgcgtggaagctacacttactccagtgggaggaggactccaattcagtggttctttcctttgactccgctggacaaacactaggctcagagtatgatcggttgggcttcctcctgaatctggactctaaactgcctgctgaattagccaccaagtacgcaaacttttcagagggagcttgcaagcctggctatgcttcagccttgatgacggccatcttcccccggttctccaagccagcacccatgttcctggatgactcctttcgcaagtgggctagaatccgggagttcgtgccgccttttgggatcaaaggtcaagagtgcatcggatggcttctggaaatctgtggccactcgagtgcccaaggagccccctgagattcgaatcctcaacccatatttcatccaggaggccgccttcaccctcattggcctgcccttcaacaatggcctcatgggccgggggaacatccctacccttggcagtgtggcagtgaccatggcactacacggctgtgacgaggtggcagtcgcaggatttggctatgacatgagcacacccaacgcacccctgcactactatgagaccgttcgcatggcagccatcaaagagtcctggacgcacaatatccagcgagagaaagagtttctgcggaagctggtgaaagctcgcgtcatcactgatctaagcagtggcatctga

SEQ ID NO: 186471 - DNA, 592 bp, Homo sapiens
  Payload ID: 16722
  Gene Symbol: ST3GAL3
  Gene Name: ST3 beta-galactoside alpha-2,3-sialyltransferase 3
  ENST ID: ENST00000490502
  CDS Start-End: 1-592
aaacgacactgcgcatcacctaccccgagggcgccatgcagcggcctgagcagtacgagcgcgattctctctttgtcctcgccggcttcaagtggcaggactttaagtggttgaaatacatcgtctacaaggagagagtgagtgcatcggatggcttctggaaatctgtggccactcgagtgcccaaggagccccctgagattcgaatcctcaacccatatttcatccaggaggccgccttcaccctcattggcctgcccttcaacaatggcctcatgggccgggggaacatccctacccttggcagtgtggcagtgaccatggcactacacggctgtgacgaggtggcagtcgcaggatttggctatgacatgagcacacccaacgcacccctgcactactatgagaccgttcgcatggcagccatcaaagaggtttccacagtcacggagtattggagagtggtgacgaagaaggcaccgagccctggaaggggcagtaaaggtttgagcaaaggcccaactgatcacttcatctctcctttcagtcctggacgcacaatatccagcgagagaaagagtttctgcggaag

SEQ ID NO: 186472 - DNA, 998 bp, Homo sapiens
  Payload ID: 16722
  Gene Symbol: ST3GAL3
  Gene Name: ST3 beta-galactoside alpha-2,3-sialyltransferase 3
  Uniprot ID: Q11203
  ENST ID: ENST00000489897
  CDS Start-End: 180-545
ccactatggcggcgcccatgcagcccagcgcgttgtgggctcccgccggggtcccccgcggctgtcgccgccgcctacgccgctgcctccgccttcctgccccgcgtcgggccgggcgccacctcccccctgcctccctctccgctgtggtcatttaggaaatcgtaaatcatgtgaagatgggactcttggtatttgtgcgcaatctgctgctagccctctgcctctttctggtactgggatttttgtattattctgcgtggaagctacacttactccagtgggaggaggactccaattcagtggttctttcctttgactccgctggacaaacactaggctcagagtatgatcggttgggcttcctcctgaatctggactctaaactgcctgctgaattagccaccaagtacgcaaacttttcagagggagcttgcaagcctggctatgcttcagccttgatgacggccatcttcccccgagctaagagaaatggtgcatggagacaaaaacatatccaggcatatgtgctccgccagaggtgaagacagaggattgtggggacacagagaaggcccttcagctggaggagtgatgagagattgactggggagacgtcctggtgaagtctgatgcctgaactatgctgggaaaggttctccaagccagcacccatgttcctggatgactcctttcgcaagtgggctagaatccgggagttcgtgccgccttttgggatcaaaggtcaagacaatctgatcaaagccatcttgtcagtcaccaaagagtaccgcctgacccctgccttggacagcctccgctgccgccgctgcatcatcgtgggcaatggaggcgttcttgccaacaagtctctggggtcacgaattgacgactatgacattgtggtgagtcctggacgcacaatatccagcgagagaaagagtttctgcggaagctggtgaaagctcgcgtcatcactgatctaagcagtggcatct

SEQ ID NO: 186473 - DNA, 893 bp, Homo sapiens
  Payload ID: 16722
  Gene Symbol: ST3GAL3
  Gene Name: ST3 beta-galactoside alpha-2,3-sialyltransferase 3
  Uniprot ID: Q11203
  ENST ID: ENST00000530581
  CDS Start-End: 1-687
atgggactcttggtatttgtgcgcaatctgctgctagccctctgcctctttctggtactgggatttttgtattattctgcgtggaagctacacttactccagtgggaggaggactccaagtatgatcggttgggcttcctcctgaatctggactctaaactgcctgctgaattagccaccaagtacgcaaacttttcagagggagcttgcaagcctggctatgcttcagccttgatgacggccatcttcccccggttctccaagccagcacccatgttcctggatgactcctttcgcaagtgggctagaatccgggagttcgtgccgccttttgggatcaaaggtcaagacaatctgatcaaagccatcttgtcagtcaccaaagagtaccgcctgacccctgccttggacagcctccgctgccgccgctgcatcatcgtgggcaatggaggcgttcttgccaacaagtctctggggtcacgaattgacgactatgacattgtggtgagagtgcatcggatggcttctggaaatctgtggccactcgagtgcccaaggagccccctgagattcgaatcctcaacccatatttcatccaggaggccgccttcaccctcattggcctgcccttcaacaatggcctcatgggccgggggaacatccctacccttggcagtgtggcagtgaccatggcactacacggctgtgacgaggtggcagtcgcaggatttggctatgacatgagcacacccaacgcacccctgcactactatgagaccgttcgcatggcagccatcaaagagtcctggacgcacaatatccagcgagagaaagagtttctgcggaagctggtgaaagctcgcgtcatcactgatctaagcagtggcatctga

SEQ ID NO: 186474 - DNA, 1667 bp, Homo sapiens
  Payload ID: 16722
  Gene Symbol: ST3GAL3
  Gene Name: ST3 beta-galactoside alpha-2,3-sialyltransferase 3
  Uniprot ID: Q11203
  ENST ID: ENST00000545417
  CDS Start-End: 192-704
gccgctgcgtccccactatggcggcgcccatgcagcccagcgcgttgtgggctcccgccggggtcccccgcggctgtcgccgccgcctacgccgctgcctccgccttcctgccccgcgtcgggccgggcgccacctcccccctgcctccctctccgctgtggtcatttaggaaatcgtaaatcatgtgaagatgggactcttggtatttgtgcgcaatctgctgctagccctctgcctctttctggtactgggatttttgtattattctgcgtggaagctacacttactccagtgggaggaggactccagtaagtatagtcactctagctcaccccaggagaagcctgttgcagattcagtggttctttcctttgactccgctggacaaacactaggctcagagtatgatcggttgggcttcctcctgaatctggactctaaactgcctgctgaattagccaccaagtacgcaaacttttcagagggagcttgcaagcctggctatgcttcagccttgatgacggccatcttcccccggttctccaagccagcacccatgttcctggatgactcctttcgcaagtgggctagaatccgggagttcgtgccgccttttgggatcaaaggtcaagtcctggacgcacaatatccagcgagagaaagagtttctgcggaagctggtgaaagctcgcgtcatcactgatctaagcagtggcatctgagtgggcccagcacatggccatagaggcccaggcaccaccaggagcagcagccagcaccacctacacaggagtcttcagacccagagaaggacggtgccaagggccccaggggcagcaaggccttggtggagcagccagagctgtgcctgctcagcagccagtctcagagaccagcactcagcctcattcagcatgggtccttgatgccagagggccagcaggctcctggctgtgcccagcaggcccagcatgcaggtggtgggacactgggcagcaaggctgctgccggaatcacttctccaatcagtgtttggtgtattatcattttgtgaatttgggtaggggggagggtagggataatttatttttaaataaggttggagatgtcaagttgggttcacttgccatgcaggaagaggcccactagagggcccatcaggcagtgttacctgttagctccctgtggggcaggagtgccaggaccagcctgtaccttgctgtggggctacaggatggtgggcaggatctcaagccagccccctccagctcatgacactgtttggcctttcttggggagaaggcggggtattcccactcaccagccctagctgtcccatggggaaaccctggagccatcccttcggagccaacaagaccgccccagggctatagcagaaagaactttaaagctcaggagggtgacgcccagctccgcctgctgggaagagctcccctccacagctgcagctgatccataggactaccgcaggcccggactcaccaacttgccacatgttctaggtttcagcaacaagactgccaggtggttgggttctgcctttagcctggaccaaagggaagtgaggcccaaggagcttacccaagctgtggcagccgtcccaggccacccccatggaagcaataaagctcttccctgagcctgg

SEQ ID NO: 186475 - DNA, 1790 bp, Homo sapiens
  Payload ID: 16723
  Gene Symbol: ST3GAL4
  Gene Name: ST3 beta-galactoside alpha-2,3-sialyltransferase 4
  Uniprot ID: Q11206
  ENST ID: ENST00000227495
  CDS Start-End: 244-1233
cccgggcccgggtccccgcctcccctgcaggcggactcgcccgctcccaggccggacccgcgcccgggacagggacccggccgagtcgagccgtcgcgccagcgctgcgccgccggtcggtgcgcctagcggatcggagctgcgcgcggaaccgtgctgccccgccccgctccacccgtgagggtggcccgaggcagccgggatgacagctctccccaggaatcctgctgcctgctgagaaacatggtcagcaagtcccgctggaagctcctggccatgttggctctggtcctggtcgtcatggtgtggtattccatctcccgggaagacagtttttattttcccatcccagagaagaaggagccgtgcctccagggtgaggcagagagcaaggcctctaagctctttggcaactactcccgggatcagcccatcttcctgcggcttgaggattatttctgggtcaagacgccatctgcttacgagctgccctatgggaccaaggggagtgaggatctgctcctccgggtgctagccatcaccagctcctccatccccaagaacatccagagcctcaggtgccgccgctgtgtggtcgtggggaacgggcaccggctgcggaacagctcactgggagatgccatcaacaagtacgatgtggtcatcagattgaacaatgccccagtggctggctatgagggtgacgtgggctccaagaccaccatgcgtctcttctaccctgaatctgcccacttcgaccccaaagtagaaaacaacccagacacactcctcgtcctggtagctttcaaggcaatggacttccactggattgagaccatcctgagtgataagaagcgggtgcgaaagggtttctggaaacagcctcccctcatctgggatgtcaatcctaaacagattcggattctcaaccccttcttcatggagattgcagctgacaaactgctgagcctgccaatgcaacagccacggaagattaagcagaagcccaccacgggcctgttggccatcacgctggccctccacctctgtgacttggtgcacattgccggctttggctacccagacgcctacaacaagaagcagaccattcactactatgagcagatcacgctcaagtccatggcggggtcaggccataatgtctcccaagaggccctggccattaagcggatgctggagatgggagctatcaagaacctcacgtccttctgacctgggcaagagctgtagcctgtcggttgcctactctgctgtctgggtgacccccatgcgtggctgtgggggtggctggtgccagtatgacccacttggactcaccccctcttggggagggagttctgggcctggccaggtctgagatgaggccatgcccctggctgctcttatggagccgagatccagtcagggtgggggcgctggagccgtgggagcccggccagggcagggggctcgttgctgtggcaccccctctctgccagcaccaagagattatttaatgggctatttaattaaggggtaggaaggtgctgtgggctggtcccacacatccaggaaagaggccagtagagaattctgcccactttttataaaaacttacagcgatggccccaccaaggcctagacacggcactggcctcccaggagggcaggggcattgggaatgggtgggtgccctccagagaggggctgctacctcccagcaggcatgggaagagcactggtgtgggggttccaccgagaaggggacctcatctagaaaagaggttaca

SEQ ID NO: 186476 - DNA, 1745 bp, Homo sapiens
  Payload ID: 16723
  Gene Symbol: ST3GAL4
  Gene Name: ST3 beta-galactoside alpha-2,3-sialyltransferase 4
  Uniprot ID: Q11206
  ENST ID: ENST00000356132
  CDS Start-End: 132-1151
ctttcacaaaaggtgaaatgagctctttgtagtgtttcccgcccaggctgcattttagaatcacagaggaggtggcccgaggcagccgggatgacagctctccccaggaatcctgctgcctgctgagaaacatggtcagcaagtcccgctggaagctcctggccatgttggctctggtcctggtcgtcatggtgtggtattccatctcccgggaagacaggtacatcgagcttttttattttcccatcccagagaagaaggagccgtgcctccagggtgaggcagagagcaaggcctctaagctctttggcaagctttcacctctgtgcagctactcccgggatcagcccatcttcctgcggcttgaggattatttctgggtcaagacgccatctgcttacgagctgccctatgggaccaaggggagtgaggatctgctcctccgggtgctagccatcaccagctcctccatccccaagaacatccagagcctcaggtgccgccgctgtgtggtcgtggggaacgggcaccggctgcggaacagctcactgggagatgccatcaacaagtacgatgtggtcatcagattgaacaatgccccagtggctggctatgagggtgacgtgggctccaagaccaccatgcgtctcttctaccctgaatctgcccacttcgaccccaaagtagaaaacaacccagacacactcctcgtcctggtagctttcaaggcaatggacttccactggattgagaccatcctgagtgataagaagcgggtgcgaaagggtttctggaaacagcctcccctcatctgggatgtcaatcctaaacagattcggattctcaaccccttcttcatggagattgcagctgacaaactgctgagcctgccaatgcaacagccacggaagattaagcagaagcccaccacgggcctgttggccatcacgctggccctccacctctgtgacttggtgcacattgccggctttggctacccagacgcctacaacaagaagcagaccattcactactatgagcagatcacgctcaagtccatggcggggtcaggccataatgtctcccaagaggccctggccattaagcggatgctggagatgggagctatcaagaacctcacgtccttctgacctgggcaagagctgtagcctgtcggttgcctactctgctgtctgggtgacccccatgcgtggctgtgggggtggctggtgccagtatgacccacttggactcaccccctcttggggagggagttctgggcctggccaggtctgagatgaggccatgcccctggctgctcttatggagccgagatccagtcagggtgggggcgctggagccgtgggagcccggccagggcagggggctcgttgctgtggcaccccctctctgccagcaccaagagattatttaatgggctatttaattaaggggtaggaaggtgctgtgggctggtcccacacatccaggaaagaggccagtagagaattctgcccactttttataaaaacttacagcgatggccccaccaaggcctagacacggcactggcctcccaggagggcaggggcattgggaatgggtgggtgccctccagagaggggctgctacctcccagcaggcatgggaagagcactggtgtgggggttccaccgagaaggggacctcatctagaaaagaggttacaaacctaccattaaactatttttcctaaaacggaagca

SEQ ID NO: 186477 - DNA, 1724 bp, Homo sapiens
  Payload ID: 16723
  Gene Symbol: ST3GAL4
  Gene Name: ST3 beta-galactoside alpha-2,3-sialyltransferase 4
  Uniprot ID: Q11206
  ENST ID: ENST00000392669
  CDS Start-End: 132-1133
ctttcacaaaaggtgaaatgagctctttgtagtgtttcccgcccaggctgcattttagaatcacagaggaggtggcccgaggcagccgggatgacagctctccccaggaatcctgctgcctgctgagaaacatggtcagcaagtcccgctggaagctcctggccatgttggctctggtcctggtcgtcatggtgtggtattccatctcccgggaagacaggtacatcgagcttttttattttcccatcccagagaagaaggagccgtgcctccagggtgaggcagagagcaaggcctctaagctctttggcaactactcccgggatcagcccatcttcctgcggcttgaggattatttctgggtcaagacgccatctgcttacgagctgccctatgggaccaaggggagtgaggatctgctcctccgggtgctagccatcaccagctcctccatccccaagaacatccagagcctcaggtgccgccgctgtgtggtcgtggggaacgggcaccggctgcggaacagctcactgggagatgccatcaacaagtacgatgtggtcatcagattgaacaatgccccagtggctggctatgagggtgacgtgggctccaagaccaccatgcgtctcttctaccctgaatctgcccacttcgaccccaaagtagaaaacaacccagacacactcctcgtcctggtagctttcaaggcaatggacttccactggattgagaccatcctgagtgataagaagcgggtgcgaaagggtttctggaaacagcctcccctcatctgggatgtcaatcctaaacagattcggattctcaaccccttcttcatggagattgcagctgacaaactgctgagcctgccaatgcaacagccacggaagattaagcagaagcccaccacgggcctgttggccatcacgctggccctccacctctgtgacttggtgcacattgccggctttggctacccagacgcctacaacaagaagcagaccattcactactatgagcagatcacgctcaagtccatggcggggtcaggccataatgtctcccaagaggccctggccattaagcggatgctggagatgggagctatcaagaacctcacgtccttctgacctgggcaagagctgtagcctgtcggttgcctactctgctgtctgggtgacccccatgcgtggctgtgggggtggctggtgccagtatgacccacttggactcaccccctcttggggagggagttctgggcctggccaggtctgagatgaggccatgcccctggctgctcttatggagccgagatccagtcagggtgggggcgctggagccgtgggagcccggccagggcagggggctcgttgctgtggcaccccctctctgccagcaccaagagattatttaatgggctatttaattaaggggtaggaaggtgctgtgggctggtcccacacatccaggaaagaggccagtagagaattctgcccactttttataaaaacttacagcgatggccccaccaaggcctagacacggcactggcctcccaggagggcaggggcattgggaatgggtgggtgccctccagagaggggctgctacctcccagcaggcatgggaagagcactggtgtgggggttccaccgagaaggggacctcatctagaaaagaggttacaaacctaccattaaactatttttcctaaaacggaa

SEQ ID NO: 186478 - DNA, 1812 bp, Homo sapiens
  Payload ID: 16723
  Gene Symbol: ST3GAL4
  Gene Name: ST3 beta-galactoside alpha-2,3-sialyltransferase 4
  Uniprot ID: Q11206
  ENST ID: ENST00000444328
  CDS Start-End: 220-1221
ctgcaggcggactcgcccgctcccaggccggacccgcgcccgggacagggacccggccgagtcgagccgtcgcgccagcgctgcgccgccggtcggtgcgcctagcggatcggagctgcgcgcggaaccgtgctgccccgccccgctccacccgtgagggtggcccgaggcagccgggatgacagctctccccaggaatcctgctgcctgctgagaaacatggtcagcaagtcccgctggaagctcctggccatgttggctctggtcctggtcgtcatggtgtggtattccatctcccgggaagacaggtacatcgagcttttttattttcccatcccagagaagaaggagccgtgcctccagggtgaggcagagagcaaggcctctaagctctttggcaactactcccgggatcagcccatcttcctgcggcttgaggattatttctgggtcaagacgccatctgcttacgagctgccctatgggaccaaggggagtgaggatctgctcctccgggtgctagccatcaccagctcctccatccccaagaacatccagagcctcaggtgccgccgctgtgtggtcgtggggaacgggcaccggctgcggaacagctcactgggagatgccatcaacaagtacgatgtggtcatcagattgaacaatgccccagtggctggctatgagggtgacgtgggctccaagaccaccatgcgtctcttctaccctgaatctgcccacttcgaccccaaagtagaaaacaacccagacacactcctcgtcctggtagctttcaaggcaatggacttccactggattgagaccatcctgagtgataagaagcgggtgcgaaagggtttctggaaacagcctcccctcatctgggatgtcaatcctaaacagattcggattctcaaccccttcttcatggagattgcagctgacaaactgctgagcctgccaatgcaacagccacggaagattaagcagaagcccaccacgggcctgttggccatcacgctggccctccacctctgtgacttggtgcacattgccggctttggctacccagacgcctacaacaagaagcagaccattcactactatgagcagatcacgctcaagtccatggcggggtcaggccataatgtctcccaagaggccctggccattaagcggatgctggagatgggagctatcaagaacctcacgtccttctgacctgggcaagagctgtagcctgtcggttgcctactctgctgtctgggtgacccccatgcgtggctgtgggggtggctggtgccagtatgacccacttggactcaccccctcttggggagggagttctgggcctggccaggtctgagatgaggccatgcccctggctgctcttatggagccgagatccagtcagggtgggggcgctggagccgtgggagcccggccagggcagggggctcgttgctgtggcaccccctctctgccagcaccaagagattatttaatgggctatttaattaaggggtaggaaggtgctgtgggctggtcccacacatccaggaaagaggccagtagagaattctgcccactttttataaaaacttacagcgatggccccaccaaggcctagacacggcactggcctcccaggagggcaggggcattgggaatgggtgggtgccctccagagaggggctgctacctcccagcaggcatgggaagagcactggtgtgggggttccaccgagaaggggacctcatctagaaaagaggttacaaacctaccattaaactatttttcctaaaacggaa

SEQ ID NO: 186479 - DNA, 1669 bp, Homo sapiens
  Payload ID: 16723
  Gene Symbol: ST3GAL4
  Gene Name: ST3 beta-galactoside alpha-2,3-sialyltransferase 4
  Uniprot ID: Q11206
  ENST ID: ENST00000449406
  CDS Start-End: 142-1110
gggctcccccaccctggaggacaggcctcagaagccgtcttcagcaggatcctgggacctctgggggctgtggagggacagacagggagccaggggcccttctcttcatcttgaaggacagtgggctggaagctcctggccatgttggctctggtcctggtcgtcatggtgtggtattccatctcccgggaagacaggtacatcgagcttttttattttcccatcccagagaagaaggagccgtgcctccagggtgaggcagagagcaaggcctctaagctctttggcaactactcccgggatcagcccatcttcctgcggcttgaggattatttctgggtcaagacgccatctgcttacgagctgccctatgggaccaaggggagtgaggatctgctcctccgggtgctagccatcaccagctcctccatccccaagaacatccagagcctcaggtgccgccgctgtgtggtcgtggggaacgggcaccggctgcggaacagctcactgggagatgccatcaacaagtacgatgtggtcatcagattgaacaatgccccagtggctggctatgagggtgacgtgggctccaagaccaccatgcgtctcttctaccctgaatctgcccacttcgaccccaaagtagaaaacaacccagacacactcctcgtcctggtagctttcaaggcaatggacttccactggattgagaccatcctgagtgataagaagcgggtgcgaaagggtttctggaaacagcctcccctcatctgggatgtcaatcctaaacagattcggattctcaaccccttcttcatggagattgcagctgacaaactgctgagcctgccaatgcaacagccacggaagattaagcagaagcccaccacgggcctgttggccatcacgctggccctccacctctgtgacttggtgcacattgccggctttggctacccagacgcctacaacaagaagcagaccattcactactatgagcagatcacgctcaagtccatggcggggtcaggccataatgtctcccaagaggccctggccattaagcggatgctggagatgggagctatcaagaacctcacgtccttctgacctgggcaagagctgtagcctgtcggttgcctactctgctgtctgggtgacccccatgcgtggctgtgggggtggctggtgccagtatgacccacttggactcaccccctcttggggagggagttctgggcctggccaggtctgagatgaggccatgcccctggctgctcttatggagccgagatccagtcagggtgggggcgctggagccgtgggagcccggccagggcagggggctcgttgctgtggcaccccctctctgccagcaccaagagattatttaatgggctatttaattaaggggtaggaaggtgctgtgggctggtcccacacatccaggaaagaggccagtagagaattctgcccactttttataaaaacttacagcgatggccccaccaaggcctagacacggcactggcctcccaggagggcaggggcattgggaatgggtgggtgccctccagagaggggctgctacctcccagcaggcatgggaagagcactggtgtgggggttccaccgagaaggggacctcatctagaaaagaggttacaaa

SEQ ID NO: 186480 - DNA, 1012 bp, Homo sapiens
  Payload ID: 16723
  Gene Symbol: ST3GAL4
  Gene Name: ST3 beta-galactoside alpha-2,3-sialyltransferase 4
  ENST ID: ENST00000524860
  CDS Start-End: 553-1012
ctggatcctcaaggacttgggttccaagtggaacttaacttgagatgattcctccccggcaccttgggaccttcatgccgtgggagaaggcttaggctgcctggaacatgggtccctgggtctgactggggcttctgcctcctgtccttttttctctccagtttttattttcccatcccagagaagaaggagccgtgcctccagggtgaggcagagagcaaggcctctaagctctttggcaactactcccgggatcagcccatcttcctgcggcttgaggattatttctgggtcaagacgccatctgcttacgagctgccctatgggaccaaggggagtgaggatctgctcctccgggtgctagccatcaccagctcctccatccccaagaacatccagagcctcaggtgccgccgctgtgtggtcgtggggaacgggcaccggctgcggaacagctcactgggagatgccatcaacaagtacgatgtggtcatcagattgaacaatgccccagtggctggctatgagggtgacgtgggctccaagaccaccatgcgtctcttctaccctgaatctgcccacttcgaccccaaagtagaaaacaacccagacacactcctcgtcctggtagctttcaaggcaatggacttccactggattgagaccatcctgagtgataagaagcgggtgcgaaagggtttctggaaacagcctcccctcatctgggatgtcaatcctaaacagattcggattctcaaccccttcttcatggagattgcagctgacaaactgctgagcctgccaatgcaacagccacggaagattaagcagaagcccaccacgggcctgttggccatcacgctggccctccacctctgtgacttggtgcacattgccggctttggctacccagacgcctacaacaagaagcagaccattcactactatgagcagatcacgctcaagtccatggcggggtcaggccataatgtctcccaagaggccctggcca

SEQ ID NO: 186481 - DNA, 763 bp, Homo sapiens
  Payload ID: 16723
  Gene Symbol: ST3GAL4
  Gene Name: ST3 beta-galactoside alpha-2,3-sialyltransferase 4
  ENST ID: ENST00000528858
  CDS Start-End: 137-763
aaggctcaggtgaaccagtttcatctgacctgcttgctaactcaaacatggctgcccaactgcgtgggctggcaaggtggcccgaggcagccgggatgacagctctccccaggaatcctgctgcctgctgagaaacatggtcagcaagtcccgctggaagctcctggccatgttggctctggtcctggtcgtcatggtgtggtattccatctcccgggaagacaggtacatcgagcttttttattttcccatcccagagaagaaggagccgtgcctccagggtgaggcagagagcaaggcctctaagctctttggcaactactcccgggatcagcccatcttcctgcggcttgaggattatttctgggtcaagacgccatctgcttacgagctgccctatgggaccaaggggagtgaggatctgctcctccgggtgctagccatcaccagctcctccatccccaagaacatccagagcctcaggtgccgccgctgtgtggtcgtggggaacgggcaccggctgcggaacagctcactgggagatgccatcaacaagtacgatgtggtcatcagattgaacaatgccccagtggctggctatgagggtgacgtgggctccaagaccaccatgcgtctcttctaccctgaatctgcccacttcgaccccaaagtagaaaacaacccagacacactcctcgtcctggtagctttcaaggcaatggacttccactggattgagaccatcctgagtgataagaagcgg

SEQ ID NO: 186482 - DNA, 574 bp, Homo sapiens
  Payload ID: 16723
  Gene Symbol: ST3GAL4
  Gene Name: ST3 beta-galactoside alpha-2,3-sialyltransferase 4
  ENST ID: ENST00000526311
  CDS Start-End: 241-574
cgcttcctggggcttggtcctggggtttcatctcaggttgacccccgttaggaggaagtaagtaggaaggaaggagatttcctgggtattagggtgtcctcaagcctgcagctctcctgggactgcacagagtttactgtcggacatcagttctgatatggtgcagcagacatggagctggtggcccgaggcagccgggatgacagctctccccaggaatcctgctgcctgctgagaaacatggtcagcaagtcccgctggaagctcctggccatgttggctctggtcctggtcgtcatggtgtggtattccatctcccgggaagacaggtacatcgagcttttttattttcccatcccagagaagaaggagccgtgcctccagggtgaggcagagagcaaggcctctaagctctttggcaactactcccgggatcagcccatcttcctgcggcttgaggattatttctgggtcaagacgccatctgcttacgagctgccctatgggaccaaggggagtgaggatctgctcctccgggtgctagccatcaccagctcctccatccccaagaaca

SEQ ID NO: 186483 - DNA, 1745 bp, Homo sapiens
  Payload ID: 16723
  Gene Symbol: ST3GAL4
  Gene Name: ST3 beta-galactoside alpha-2,3-sialyltransferase 4
  ENST ID: ENST00000531217
  CDS Start-End: 244-624
cccgggcccgggtccccgcctcccctgcaggcggactcgcccgctcccaggccggacccgcgcccgggacagggacccggccgagtcgagccgtcgcgccagcgctgcgccgccggtcggtgcgcctagcggatcggagctgcgcgcggaaccgtgctgccccgccccgctccacccgtgagggtggcccgaggcagccgggatgacagctctccccaggaatcctgctgcctgctgagaaacatggtcagcaagtcccgctggaagctcctggccatgttggctctggtcctggtcgtcatggtgtggtattccatctcccgggaagacaggtacatcgagcttttttattttcccatcccagagaagaaggagccgtgcctccagggtgaggcagagagcaaggcctctaagctctttggcaactactcccgggatcagcccatcttcctgcggcttgaggattatttctgggtcaagacgccatctgcttacgagctgccctatgggaccaaggggagtgcctcaggtgccgccgctgtgtggtcgtggggaacgggcaccggctgcggaacagctcactgggagatgccatcaacaagtacgatgtggtcatcagattgaacaatgccccagtggctggctatgagggtgacgtgggctccaagaccaccatgcgtctcttctaccctgaatctgcccacttcgaccccaaagtagaaaacaacccagacacactcctcgtcctggtagctttcaaggcaatggacttccactggattgagaccatcctgagtgataagaagcgggtgcgaaagggtttctggaaacagcctcccctcatctgggatgtcaatcctaaacagattcggattctcaaccccttcttcatggagattgcagctgacaaactgctgagcctgccaatgcaacagccacggaagattaagcagaagcccaccacgggcctgttggccatcacgctggccctccacctctgtgacttggtgcacattgccggctttggctacccagacgcctacaacaagaagcagaccattcactactatgagcagatcacgctcaagtccatggcggggtcaggccataatgtctcccaagaggccctggccattaagcggatgctggagatgggagctatcaagaacctcacgtccttctgacctgggcaagagctgtagcctgtcggttgcctactctgctgtctgggtgacccccatgcgtggctgtgggggtggctggtgccagtatgacccacttggactcaccccctcttggggagggagttctgggcctggccaggtctgagatgaggccatgcccctggctgctcttatggagccgagatccagtcagggtgggggcgctggagccgtgggagcccggccagggcagggggctcgttgctgtggcaccccctctctgccagcaccaagagattatttaatgggctatttaattaaggggtaggaaggtgctgtgggctggtcccacacatccaggaaagaggccagtagagaattctgcccactttttataaaaacttacagcgatggccccaccaaggcctagacacggcactggcctcccaggagggcaggggcattgggaatgggtgggtgccctccagagaggggctgctacctcccagcaggcatgggaagagcactggtgtgggggttccaccgagaaggggacctcatctagaaaagaggttacaaacc

SEQ ID NO: 186484 - DNA, 1919 bp, Homo sapiens
  Payload ID: 16723
  Gene Symbol: ST3GAL4
  Gene Name: ST3 beta-galactoside alpha-2,3-sialyltransferase 4
  Uniprot ID: Q11206
  ENST ID: ENST00000534083
  CDS Start-End: 390-1391
cgcgggtcggggtggggctgccacagccctgcggagctgctttccggggtccctttccctggaccagattttcgcgggaagccggatcctctccgttcccttggagtgagcaagcgggacagttctgcggaaagtttccgcccccaatcccccagccctgcgcccggactgaagcggcggcccccacctccagcatcctcgagcgatggtttctcccacaactaccccggtcaggtccagcacttgggagctgactgtgctggaggtgacaggctttgcggggtccgcctgtgtgcaggagtcgcaaggtcgctgagcaggacccaaaggtggcccgaggcagccgggatgacagctctccccaggaatcctgctgcctgctgagaaacatggtcagcaagtcccgctggaagctcctggccatgttggctctggtcctggtcgtcatggtgtggtattccatctcccgggaagacaggtacatcgagcttttttattttcccatcccagagaagaaggagccgtgcctccagggtgaggcagagagcaaggcctctaagctctttggcaactactcccgggatcagcccatcttcctgcggcttgaggattatttctgggtcaagacgccatctgcttacgagctgccctatgggaccaaggggagtgaggatctgctcctccgggtgctagccatcaccagctcctccatccccaagaacatccagagcctcaggtgccgccgctgtgtggtcgtggggaacgggcaccggctgcggaacagctcactgggagatgccatcaacaagtacgatgtggtcatcagattgaacaatgccccagtggctggctatgagggtgacgtgggctccaagaccaccatgcgtctcttctaccctgaatctgcccacttcgaccccaaagtagaaaacaacccagacacactcctcgtcctggtagctttcaaggcaatggacttccactggattgagaccatcctgagtgataagaagcgggtgcgaaagggtttctggaaacagcctcccctcatctgggatgtcaatcctaaacagattcggattctcaaccccttcttcatggagattgcagctgacaaactgctgagcctgccaatgcaacagccacggaagattaagcagaagcccaccacgggcctgttggccatcacgctggccctccacctctgtgacttggtgcacattgccggctttggctacccagacgcctacaacaagaagcagaccattcactactatgagcagatcacgctcaagtccatggcggggtcaggccataatgtctcccaagaggccctggccattaagcggatgctggagatgggagctatcaagaacctcacgtccttctgacctgggcaagagctgtagcctgtcggttgcctactctgctgtctgggtgacccccatgcgtggctgtgggggtggctggtgccagtatgacccacttggactcaccccctcttggggagggagttctgggcctggccaggtctgagatgaggccatgcccctggctgctcttatggagccgagatccagtcagggtgggggcgctggagccgtgggagcccggccagggcagggggctcgttgctgtggcaccccctctctgccagcaccaagagattatttaatgggctatttaattaaggggtaggaaggtgctgtgggctggtcccacacatccaggaaagaggccagtagagaattctgcccactttttataaaaacttacagcgatggccccaccaaggcctagacacggcactggcctcccaggagggcaggggcattgggaatgggtgggtgccctccagagaggggctgctacctcccagcaggcatgggaagagcactggtgtgggggttccaccgaga

SEQ ID NO: 186485 - DNA, 545 bp, Homo sapiens
  Payload ID: 16723
  Gene Symbol: ST3GAL4
  Gene Name: ST3 beta-galactoside alpha-2,3-sialyltransferase 4
  ENST ID: ENST00000534733
  CDS Start-End: 214-355
agccccttccccgcccccaacccgggcccgggtccccgcctcccctgcaggcggactcgcccgctcccaggccggacccgcgcccgggacagggacccggccgagtcgagccgtcgcgccagcgctgcgccgccggtcggtgcgcctagcggatcggagctgcgcgcggaaccgtgctgccccgccccgctccacccgtgaggaggcttctgtatgagtgtcctgagtggccctggatggactactggctgtccctggcctcagaatcaccccaacccctgccacatttcggggagggaggtggcccgaggcagccgggatgacagctctccccaggaatcctgctgcctgctgagaaacatggtcagcaagtcccgctggaagctcctggccatgttggctctggtcctggtcgtcatggtgtggtattccatctcccgggaagacaggtacatcgagcttttttattttcccatcccagagaagaaggagccgtgcctccagggtgaggcagagagcaaggcctctaagctctttggcaagta

SEQ ID NO: 186486 - DNA, 1459 bp, Homo sapiens
  Payload ID: 16723
  Gene Symbol: ST3GAL4
  Gene Name: ST3 beta-galactoside alpha-2,3-sialyltransferase 4
  Uniprot ID: Q11206
  ENST ID: ENST00000530591
  CDS Start-End: 470-1459
gagccgcggggtcctcggccgcctgaccccagccggcgccgcgcctcccggagggggtcgggccctgcacgtgggcgcagcgcgggtcggggtggggctgccacagccctgcggagctgctttccggggtccctttccctggaccagattttcgcgggaagccggatcctctccgttcccttggagtgagcaagcgggacagttctgcggaaagtttccgcccccaatcccccagccctgcgcccggactgaagcggcggcccccacctccagcatcctcgagcgatggtttctcccacaactaccccggtcaggtccagcacttgggagctgactgtgctggaggtgacaggctttgcggggtccgcctgtgtgcaggagtcgcaaggtcgctgagcaggacccaaaggtggcccgaggcagccgggatgacagctctccccaggaatcctgctgcctgctgagaaacatggtcagcaagtcccgctggaagctcctggccatgttggctctggtcctggtcgtcatggtgtggtattccatctcccgggaagacagtttttattttcccatcccagagaagaaggagccgtgcctccagggtgaggcagagagcaaggcctctaagctctttggcaactactcccgggatcagcccatcttcctgcggcttgaggattatttctgggtcaagacgccatctgcttacgagctgccctatgggaccaaggggagtgaggatctgctcctccgggtgctagccatcaccagctcctccatccccaagaacatccagagcctcaggtgccgccgctgtgtggtcgtggggaacgggcaccggctgcggaacagctcactgggagatgccatcaacaagtacgatgtggtcatcagattgaacaatgccccagtggctggctatgagggtgacgtgggctccaagaccaccatgcgtctcttctaccctgaatctgcccacttcgaccccaaagtagaaaacaacccagacacactcctcgtcctggtagctttcaaggcaatggacttccactggattgagaccatcctgagtgataagaagcgggtgcgaaagggtttctggaaacagcctcccctcatctgggatgtcaatcctaaacagattcggattctcaaccccttcttcatggagattgcagctgacaaactgctgagcctgccaatgcaacagccacggaagattaagcagaagcccaccacgggcctgttggccatcacgctggccctccacctctgtgacttggtgcacattgccggctttggctacccagacgcctacaacaagaagcagaccattcactactatgagcagatcacgctcaagtccatggcggggtcaggccataatgtctcccaagaggccctggccattaagcggatgctggagatgggagctatcaagaacctcacgtccttctga

SEQ ID NO: 186487 - DNA, 1825 bp, Homo sapiens
  Payload ID: 16723
  Gene Symbol: ST3GAL4
  Gene Name: ST3 beta-galactoside alpha-2,3-sialyltransferase 4
  Uniprot ID: Q11206
  ENST ID: ENST00000532243
  CDS Start-End: 266-1264
ccaccctggaggacaggcctcagaagccgtcttcagcaggatcctgggacctctgggggctgtggagggacagacagggagccaggggcccttctcttcatcttgaaggacagtgggtacaatcagggtcaagccctcagccagggccaggagagggccagagactgcttctgttgagttaggggtcggagggactcagaagggggcaggtgggaaggtggacgggggttgtacctgcctgttgctgcctctagctcctctctgcatgtgtcctgcaggctggaagctcctggccatgttggctctggtcctggtcgtcatggtgtggtattccatctcccgggaagacaggtacatcgagcttttttattttcccatcccagagaagaaggagccgtgcctccagggtgaggcagagagcaaggcctctaagctctttggcaactactcccgggatcagcccatcttcctgcggcttgaggattatttctgggtcaagacgccatctgcttacgagctgccctatgggaccaaggggagtgaggatctgctcctccgggtgctagccatcaccagctcctccatccccaagaacatccagagcctcaggtgccgccgctgtgtggtcgtggggaacgggcaccggctgcggaacagctcactgggagatgccatcaacaagtacgatgtggtcatcagattgaacaatgccccagtggctggctatgagggtgacgtgggctccaagaccaccatgcgtctcttctaccctgaatctgcccacttcgaccccaaagtagaaaacaacccagacacactcctcgtcctggtagctttcaaggcaatggacttccactggattgagaccatcctgagtgataagaagcgggtgcgaaagggtttctggaaacagcctcccctcatctgggatgtcaatcctaaacagattcggattctcaaccccttcttcatggagattgcagctgacaaactgctgagcctgccaatgcaacagccacggaagattaagcagaagcccaccacgggcctgttggccatcacgctggccctccacctctgtgacttggtgcacattgccggctttggctacccagacgcctacaacaagaagcagaccattcactactatgagcagatcacgctcaagtccatggcggggtcaggccataatgtctcccaagaggccctggccattaagcggatgctggagatgggagctatcaagaacctcacgtccttctgacctgggcaagagctgtagcctgtcggttgcctactctgctgtctgggtgacccccatgcgtggctgtgggggtggctggtgccagtatgacccacttggactcaccccctcttggggagggagttctgggcctggccaggtctgagatgaggccatgcccctggctgctcttatggagccgagatccagtcagggtgggggcgctggagccgtgggagcccggccagggcagggggctcgttgctgtggcaccccctctctgccagcaccaagagattatttaatgggctatttaattaaggggtaggaaggtgctgtgggctggtcccacacatccaggaaagaggccagtagagaattctgcccactttttataaaaacttacagcgatggccccaccaaggcctagacacggcactggcctcccaggagggcaggggcattgggaatgggtgggtgccctccagagaggggctgctacctcccagcaggcatgggaagagcactggtgtgggggttccaccgagaaggggacctcatctagaaaagaggttacaaacc

SEQ ID NO: 186488 - DNA, 987 bp, Homo sapiens
  Payload ID: 16723
  Gene Symbol: ST3GAL4
  Gene Name: ST3 beta-galactoside alpha-2,3-sialyltransferase 4
  Uniprot ID: Q11206
  ENST ID: ENST00000534457
  CDS Start-End: 1-987
atgtgtcctgcaggctggaagctcctggccatgttggctctggtcctggtcgtcatggtgtggtattccatctcccgggaagacagtttttattttcccatcccagagaagaaggagccgtgcctccagggtgaggcagagagcaaggcctctaagctctttggcaactactcccgggatcagcccatcttcctgcggcttgaggattatttctgggtcaagacgccatctgcttacgagctgccctatgggaccaaggggagtgaggatctgctcctccgggtgctagccatcaccagctcctccatccccaagaacatccagagcctcaggtgccgccgctgtgtggtcgtggggaacgggcaccggctgcggaacagctcactgggagatgccatcaacaagtacgatgtggtcatcagattgaacaatgccccagtggctggctatgagggtgacgtgggctccaagaccaccatgcgtctcttctaccctgaatctgcccacttcgaccccaaagtagaaaacaacccagacacactcctcgtcctggtagctttcaaggcaatggacttccactggattgagaccatcctgagtgataagaagcgggtgcgaaagggtttctggaaacagcctcccctcatctgggatgtcaatcctaaacagattcggattctcaaccccttcttcatggagattgcagctgacaaactgctgagcctgccaatgcaacagccacggaagattaagcagaagcccaccacgggcctgttggccatcacgctggccctccacctctgtgacttggtgcacattgccggctttggctacccagacgcctacaacaagaagcagaccattcactactatgagcagatcacgctcaagtccatggcggggtcaggccataatgtctcccaagaggccctggccattaagcggatgctggagatgggagctatcaagaacctcacgtccttctga

SEQ ID NO: 186489 - DNA, 550 bp, Homo sapiens
  Payload ID: 16723
  Gene Symbol: ST3GAL4
  Gene Name: ST3 beta-galactoside alpha-2,3-sialyltransferase 4
  ENST ID: ENST00000534452
  CDS Start-End: 271-550
agtttgcttagcgcaacactgacgctgttttggaatgaagacaagacaatgtagaactttactggggaagaggtcgaagaagggctaattgtcttgttgttcaagactggttagcgctgctcacctctgacgctgctcacctctgacgccaaaggtttttccctggaaggcagccctggaggatacctgtgtatctgtctttcacaaaaggtggcccgaggcagccgggatgacagctctccccaggaatcctgctgcctgctgagaaacatggtcagcaagtcccgctggaagctcctggccatgttggctctggtcctggtcgtcatggtgtggtattccatctcccgggaagacaggtacatcgagcttttttattttcccatcccagagaagaaggagccgtgcctccagggtgaggcagagagcaaggcctctaagctctttggcaactactcccgggatcagcccatcttcctgcggcttgaggattatttctgggtcaagacgccatctgcttacgagctgccctatgggaccaaggggagtg

SEQ ID NO: 186490 - DNA, 1967 bp, Homo sapiens
  Payload ID: 16723
  Gene Symbol: ST3GAL4
  Gene Name: ST3 beta-galactoside alpha-2,3-sialyltransferase 4
  Uniprot ID: Q11206
  ENST ID: ENST00000526727
  CDS Start-End: 375-1376
cagaaggagatggtgagaagaaccacaccagagaggctggagtaggccagcctggcttgggaccgagtcccgagtccctggctggaccctcggttttcccttccgtggcagggctcacctggatccttaatgccgcccttggaggagttaggaggatcctggatgagaaaactcaccctcaggatgattgccccagggagcagcttcctgctttctggtggaagggaggggcagacagtgggtgtgtcctgctccagtgtctaggcaggagagtttgtgaagctgaccggacacctgtggctcttatttcctaggtggcccgaggcagccgggatgacagctctccccaggaatcctgctgcctgctgagaaacatggtcagcaagtcccgctggaagctcctggccatgttggctctggtcctggtcgtcatggtgtggtattccatctcccgggaagacaggtacatcgagcttttttattttcccatcccagagaagaaggagccgtgcctccagggtgaggcagagagcaaggcctctaagctctttggcaactactcccgggatcagcccatcttcctgcggcttgaggattatttctgggtcaagacgccatctgcttacgagctgccctatgggaccaaggggagtgaggatctgctcctccgggtgctagccatcaccagctcctccatccccaagaacatccagagcctcaggtgccgccgctgtgtggtcgtggggaacgggcaccggctgcggaacagctcactgggagatgccatcaacaagtacgatgtggtcatcagattgaacaatgccccagtggctggctatgagggtgacgtgggctccaagaccaccatgcgtctcttctaccctgaatctgcccacttcgaccccaaagtagaaaacaacccagacacactcctcgtcctggtagctttcaaggcaatggacttccactggattgagaccatcctgagtgataagaagcgggtgcgaaagggtttctggaaacagcctcccctcatctgggatgtcaatcctaaacagattcggattctcaaccccttcttcatggagattgcagctgacaaactgctgagcctgccaatgcaacagccacggaagattaagcagaagcccaccacgggcctgttggccatcacgctggccctccacctctgtgacttggtgcacattgccggctttggctacccagacgcctacaacaagaagcagaccattcactactatgagcagatcacgctcaagtccatggcggggtcaggccataatgtctcccaagaggccctggccattaagcggatgctggagatgggagctatcaagaacctcacgtccttctgacctgggcaagagctgtagcctgtcggttgcctactctgctgtctgggtgacccccatgcgtggctgtgggggtggctggtgccagtatgacccacttggactcaccccctcttggggagggagttctgggcctggccaggtctgagatgaggccatgcccctggctgctcttatggagccgagatccagtcagggtgggggcgctggagccgtgggagcccggccagggcagggggctcgttgctgtggcaccccctctctgccagcaccaagagattatttaatgggctatttaattaaggggtaggaaggtgctgtgggctggtcccacacatccaggaaagaggccagtagagaattctgcccactttttataaaaacttacagcgatggccccaccaaggcctagacacggcactggcctcccaggagggcaggggcattgggaatgggtgggtgccctccagagaggggctgctacctcccagcaggcatgggaagagcactggtgtgggggttccaccgagaaggggacctcatctagaaaagaggttacaaacctaccattaaactatttttcctaaaacggaa

SEQ ID NO: 186491 - DNA, 915 bp, Homo sapiens
  Payload ID: 16724
  Gene Symbol: ST3GAL5
  Gene Name: ST3 beta-galactoside alpha-2,3-sialyltransferase 5
  ENST ID: ENST00000306262
  CDS Start-End: 7-345
attagtatgcggacgaaggcggcgggctgcgcggagcggcgtcccctgcagccgcggaccgaggcagcggcggcacctgccggccgagcaatgccaagtgagtacacctatgtgaaactgagaagtgattgctcgaggccttccctgcaatggtacacccgagctcaaagcaagatgagaaggcccagcttgttattaaaagacatcctcaaatgtacattgcttgtgtttggagtgtggatcctttatatcctcaagttaaattatactactgaagaatgtgacatgaaaaaaatgcattatgtggaccctgaccatgtaaaggttgtttcttcaagtttctgagccaaacttaactctaaaaagcaaatattctgtgttaaaagacagtaatcaacacgggagctacatcagacatcataggacaaattgtcatctagaagagtatatttttaatgcaggagagtttttaaaacccagattggtgtgatttcattccagagagctcagaaatatgctcagcaagtcttgcagaaggaatgtcgtcccaagtttgccaagacatcaatggcgctgttatttgagcacaggtatagcgtggacttactcccttttgtgcagaaggcccccaaagacagtgaagctgagtccaagtacgatcctccttttgggttccggaagttctccagtaaagtccagaccctcttggaactcttgccagagcacgacctccctgaacacttgaaagccaagacctgtcggcgctgtgtggttattggaagcggaggaatactgcacggattagaactgggccacaccctgaaccagttcgatgttgtgataaggttaaacagtgcaccagttgagggatattcagaacatgttggaaataaaactactataaggatgacttat

SEQ ID NO: 186492 - DNA, 2366 bp, Homo sapiens
  Payload ID: 16724
  Gene Symbol: ST3GAL5
  Gene Name: ST3 beta-galactoside alpha-2,3-sialyltransferase 5
  Uniprot ID: Q9UNP4
  ENST ID: ENST00000377332
  CDS Start-End: 110-1366
ctgagcgggggagcggcggcccccagctgaatgggcgcgagagcggcgctgggggcgggtgggggcgcggggtaccgggctggcggccggccggcgccccctcattagtatgcggacgaaggcggcgggctgcgcggagcggcgtcccctgcagccgcggaccgaggcagcggcggcacctgccggccgagcaatgccaagtgagtacacctatgtgaaactgagaagtgattgctcgaggccttccctgcaatggtacacccgagctcaaagcaagatgagaaggcccagcttgttattaaaagacatcctcaaatgtacattgcttgtgtttggagtgtggatcctttatatcctcaagttaaattatactactgaagaatgtgacatgaaaaaaatgcattatgtggaccctgaccatgtaaagagagctcagaaatatgctcagcaagtcttgcagaaggaatgtcgtcccaagtttgccaagacatcaatggcgctgttatttgagcacaggtatagcgtggacttactcccttttgtgcagaaggcccccaaagacagtgaagctgagtccaagtacgatcctccttttgggttccggaagttctccagtaaagtccagaccctcttggaactcttgccagagcacgacctccctgaacacttgaaagccaagacctgtcggcgctgtgtggttattggaagcggaggaatactgcacggattagaactgggccacaccctgaaccagttcgatgttgtgataaggttaaacagtgcaccagttgagggatattcagaacatgttggaaataaaactactataaggatgacttatccagagggcgcaccactgtctgaccttgaatattattccaatgacttatttgttgctgttttatttaagagtgttgatttcaactggcttcaagcaatggtaaaaaaggaaaccctgccattctgggtacgactcttcttttggaagcaggtggcagaaaaaatcccactgcagccaaaacatttcaggattttgaatccagttatcatcaaagagactgcctttgacatccttcagtactcagagcctcagtcaaggttctggggccgagataagaacgtccccacaatcggtgtcattgccgttgtcttagccacacatctgtgcgatgaagtcagtttggcgggttttggatatgacctcaatcaacccagaacacctttgcactacttcgacagtcaatgcatggctgctatgaactttcagaccatgcataatgtgacaacggaaaccaagttcctcttaaagctggtcaaagagggagtggtgaaagatctcagtggaggcattgatcgtgaattttgaacacagaaaacctcagttgaaaatgcaactctaactctgagagctgtttttgacagccttcttgatgtatttctccatcctgcagatactttgaagtgcagctcatgtttttaacttttaatttaaaaacacaaaaaaaattttagctcttcccactttttttttcctatttatttgaggtcagtgtttgtttttgcacaccattttgtaaatgaaacttaagaattgaattggaaagacttctcaaagagaattgtatgtaacgatgttgtattgatttttaagaaagtaatttaatttgtaaaacttctgctcgtttacactgcacattgaatacaggtaactaattggaaggagaggggaggtcactcttttgatggtggccctgaacctcattctggttccctgctgcgctgcttggtgtgacccacggaggatccactcccaggatgacgtgctccgtagctctgctgctgatactgggtctgcgatgcagcggcgtgaggcctgggctggttggagaaggtcacaacccttctctgttggtctgccttctgctgaaagactcgagaaccaaccagggaagctgtcctggaggtccctggtcggagagggacatagaatctgtgacctctgacaactgtgaagccaccctgggctacagaaaccacagtcttcccagcaattattacaattcttgaattccttggggattttttactgccctttcaaagcacttaagtgttagatctaacgtgttccagtgtctgtctgaggtgacttaaaaaatcagaacaaaacttctattatccagagtcatgggagagtacaccctttccaggaataatgttttgggaaacactgaaatgaaatcttcccagtattataaattgtgtatttaaaaaaaagaaacttttctgaatgcctacctggcggtgtataccaggcagtgtgccagtttaaaaagatgaaaaagaataaaaacttttgaggaactctc

SEQ ID NO: 186493 - DNA, 2318 bp, Homo sapiens
  Payload ID: 16724
  Gene Symbol: ST3GAL5
  Gene Name: ST3 beta-galactoside alpha-2,3-sialyltransferase 5
  Uniprot ID: Q9UNP4
  ENST ID: ENST00000393805
  CDS Start-End: 146-1318
tgcgagagcatataaccagcatgtcttgagtcttttacccatgtgcctgttatatggatgctgctgtttttgtaagatgaaatgacccttggatattctgggttatgatcagcatttcttcgtctaggcgagaaaagaaacagcaatgccaagtgagtacacctatgtgaaactgagaagtgattgctcgaggccttccctgcaatggtacacccgagctcaaagcaagatgagaaggcccagcttgttattaaaagacatcctcaaatgtacattgcttgtgtttggagtgtggatcctttatatcctcaagttaaattatactactgaagaatgtgacatgaaaaaaatgcattatgtggaccctgaccatgtaaagagagctcagaaatatgctcagcaagtcttgcagaaggaatgtcgtcccaagtttgccaagacatcaatggcgctgttatttgagcacaggtatagcgtggacttactcccttttgtgcagaaggcccccaaagacagtgaagctgagtccaagtacgatcctccttttgggttccggaagttctccagtaaagtccagaccctcttggaactcttgccagagcacgacctccctgaacacttgaaagccaagacctgtcggcgctgtgtggttattggaagcggaggaatactgcacggattagaactgggccacaccctgaaccagttcgatgttgtgataaggttaaacagtgcaccagttgagggatattcagaacatgttggaaataaaactactataaggatgacttatccagagggcgcaccactgtctgaccttgaatattattccaatgacttatttgttgctgttttatttaagagtgttgatttcaactggcttcaagcaatggtaaaaaaggaaaccctgccattctgggtacgactcttcttttggaagcaggtggcagaaaaaatcccactgcagccaaaacatttcaggattttgaatccagttatcatcaaagagactgcctttgacatccttcagtactcagagcctcagtcaaggttctggggccgagataagaacgtccccacaatcggtgtcattgccgttgtcttagccacacatctgtgcgatgaagtcagtttggcgggttttggatatgacctcaatcaacccagaacacctttgcactacttcgacagtcaatgcatggctgctatgaactttcagaccatgcataatgtgacaacggaaaccaagttcctcttaaagctggtcaaagagggagtggtgaaagatctcagtggaggcattgatcgtgaattttgaacacagaaaacctcagttgaaaatgcaactctaactctgagagctgtttttgacagccttcttgatgtatttctccatcctgcagatactttgaagtgcagctcatgtttttaacttttaatttaaaaacacaaaaaaaattttagctcttcccactttttttttcctatttatttgaggtcagtgtttgtttttgcacaccattttgtaaatgaaacttaagaattgaattggaaagacttctcaaagagaattgtatgtaacgatgttgtattgatttttaagaaagtaatttaatttgtaaaacttctgctcgtttacactgcacattgaatacaggtaactaattggaaggagaggggaggtcactcttttgatggtggccctgaacctcattctggttccctgctgcgctgcttggtgtgacccacggaggatccactcccaggatgacgtgctccgtagctctgctgctgatactgggtctgcgatgcagcggcgtgaggcctgggctggttggagaaggtcacaacccttctctgttggtctgccttctgctgaaagactcgagaaccaaccagggaagctgtcctggaggtccctggtcggagagggacatagaatctgtgacctctgacaactgtgaagccaccctgggctacagaaaccacagtcttcccagcaattattacaattcttgaattccttggggattttttactgccctttcaaagcacttaagtgttagatctaacgtgttccagtgtctgtctgaggtgacttaaaaaatcagaacaaaacttctattatccagagtcatgggagagtacaccctttccaggaataatgttttgggaaacactgaaatgaaatcttcccagtattataaattgtgtatttaaaaaaaagaaacttttctgaatgcctacctggcggtgtataccaggcagtgtgccagtttaaaaagatgaaaaagaataaaaacttttgaggaactctc

SEQ ID NO: 186494 - DNA, 2225 bp, Homo sapiens
  Payload ID: 16724
  Gene Symbol: ST3GAL5
  Gene Name: ST3 beta-galactoside alpha-2,3-sialyltransferase 5
  Uniprot ID: Q9UNP4
  ENST ID: ENST00000393808
  CDS Start-End: 38-1225
tgggcaaccattatcctgtctcgccgccacccaggacatggcttctgttccaatgccaagtgagtacacctatgtgaaactgagaagtgattgctcgaggccttccctgcaatggtacacccgagctcaaagcaagatgagaaggcccagcttgttattaaaagacatcctcaaatgtacattgcttgtgtttggagtgtggatcctttatatcctcaagttaaattatactactgaagaatgtgacatgaaaaaaatgcattatgtggaccctgaccatgtaaagagagctcagaaatatgctcagcaagtcttgcagaaggaatgtcgtcccaagtttgccaagacatcaatggcgctgttatttgagcacaggtatagcgtggacttactcccttttgtgcagaaggcccccaaagacagtgaagctgagtccaagtacgatcctccttttgggttccggaagttctccagtaaagtccagaccctcttggaactcttgccagagcacgacctccctgaacacttgaaagccaagacctgtcggcgctgtgtggttattggaagcggaggaatactgcacggattagaactgggccacaccctgaaccagttcgatgttgtgataaggttaaacagtgcaccagttgagggatattcagaacatgttggaaataaaactactataaggatgacttatccagagggcgcaccactgtctgaccttgaatattattccaatgacttatttgttgctgttttatttaagagtgttgatttcaactggcttcaagcaatggtaaaaaaggaaaccctgccattctgggtacgactcttcttttggaagcaggtggcagaaaaaatcccactgcagccaaaacatttcaggattttgaatccagttatcatcaaagagactgcctttgacatccttcagtactcagagcctcagtcaaggttctggggccgagataagaacgtccccacaatcggtgtcattgccgttgtcttagccacacatctgtgcgatgaagtcagtttggcgggttttggatatgacctcaatcaacccagaacacctttgcactacttcgacagtcaatgcatggctgctatgaactttcagaccatgcataatgtgacaacggaaaccaagttcctcttaaagctggtcaaagagggagtggtgaaagatctcagtggaggcattgatcgtgaattttgaacacagaaaacctcagttgaaaatgcaactctaactctgagagctgtttttgacagccttcttgatgtatttctccatcctgcagatactttgaagtgcagctcatgtttttaacttttaatttaaaaacacaaaaaaaattttagctcttcccactttttttttcctatttatttgaggtcagtgtttgtttttgcacaccattttgtaaatgaaacttaagaattgaattggaaagacttctcaaagagaattgtatgtaacgatgttgtattgatttttaagaaagtaatttaatttgtaaaacttctgctcgtttacactgcacattgaatacaggtaactaattggaaggagaggggaggtcactcttttgatggtggccctgaacctcattctggttccctgctgcgctgcttggtgtgacccacggaggatccactcccaggatgacgtgctccgtagctctgctgctgatactgggtctgcgatgcagcggcgtgaggcctgggctggttggagaaggtcacaacccttctctgttggtctgccttctgctgaaagactcgagaaccaaccagggaagctgtcctggaggtccctggtcggagagggacatagaatctgtgacctctgacaactgtgaagccaccctgggctacagaaaccacagtcttcccagcaattattacaattcttgaattccttggggattttttactgccctttcaaagcacttaagtgttagatctaacgtgttccagtgtctgtctgaggtgacttaaaaaatcagaacaaaacttctattatccagagtcatgggagagtacaccctttccaggaataatgttttgggaaacactgaaatgaaatcttcccagtattataaattgtgtatttaaaaaaaagaaacttttctgaatgcctacctggcggtgtataccaggcagtgtgccagtttaaaaagatgaaaaagaataaaaacttttgaggaactctc

SEQ ID NO: 186495 - DNA, 530 bp, Homo sapiens
  Payload ID: 16724
  Gene Symbol: ST3GAL5
  Gene Name: ST3 beta-galactoside alpha-2,3-sialyltransferase 5
  ENST ID: ENST00000455892
  CDS Start-End: 113-530
gtgatgtggggccgctggtagaaatttgccggtgaccttccctgcaccctctctgcagccagccttgcggagaagacaggttttggcgaccttttgatttcttctgaattcaatgccaagtgagtacacctatgtgaaactgagaagtgattgctcgaggccttccctgcaatggtacacccgagctcaaagcaagatgagaaggcccagcttgttattaaaagacatcctcaaatgtacattgcttgtgtttggagtgtggatcctttatatcctcaagttaaattatactactgaagaatgtgacatgaaaaaaatgcattatgtggaccctgaccatgtaaagagagctcagaaatatgctcagcaagtcttgcagaaggaatgtcgtcccaagtttgccaagacatcaatggcgctgttatttgagcacaggtatagcgtggacttactcccttttgtgcagaaggcccccaaagacagtgaagctgagtccaagtacgatcctccttttgggttccggaagttct

SEQ ID NO: 186496 - DNA, 640 bp, Homo sapiens
  Payload ID: 16724
  Gene Symbol: ST3GAL5
  Gene Name: ST3 beta-galactoside alpha-2,3-sialyltransferase 5
  ENST ID: ENST00000433665
  CDS Start-End: 82-225
gaatgggcgcgagagcggcgctgggggcgggtgggggcgcggggtaccgggctggcggccggccggcgccccctcattagtatgcggacgaaggcggcgggctgcgcggagcggcgtcccctgcagccgcggaccgaggcagcggcggcacctgccggccgaggcactgtgaagacagtggtgtgcaaagcagagacccctgcttgcatggaatctgcattctagtgggggagacaagacaaacgtgtaattcaaaagtaaaaaacttatgaagaatcacatgtctcatgattagtgttataaagaaaaaagaaagcatgcatacaggaatatccacataagcaattttgcaatgccaagtgagtacacctatgtgaaactgagaagtgattgctcgaggccttccctgcaatggtacacccgagctcaaagcaagatgagaaggcccagcttgttattaaaagacatcctcaaatgtacattgcttgtgtttggagtgtggatcctttatatcctcaagttaaattatactactgaagaatgtgacatgaaaaaaatgcattatgtggaccctgaccatgtaaagagagctcagaaatatgctcagcaagtcttgcagaaggaatgtcgtcccaagttt

SEQ ID NO: 186497 - DNA, 3362 bp, Homo sapiens
  Payload ID: 16725
  Gene Symbol: ST3GAL6
  Gene Name: ST3 beta-galactoside alpha-2,3-sialyltransferase 6
  Uniprot ID: Q9Y274
  ENST ID: ENST00000265261
  CDS Start-End: 637-1278
aaaccttctgctgagccttgtgtcacagtcagtccgcggcgccacaagcctcagtgtttacttctgccgcctgccagccgggcggggaaggggagtacccggccacccctcactttagctcctgcagctttccaaacaaaccagggcgggatgggagtgtcttcttggctgtggaaatcgatcctcctaccttgtcctgaagccacccgccgcctttcctcgtccctcccttcgcggtgattttccggtcccggcgcccggcgagggcgcgcggctggtgtccgccccgcccgaaaggtgagccagccatgagagggtatcttgtggccatattcctgagtgctgtcttcctctattatgtactgcattgcatattatggggaacgaatgtctattgggtggcacctgtggaaatgaaacggagaaataagatccagccttgtttatcaaagccagcttttgcctctctgctgagtcagagctctgcatatattttaagaaaaggcattgaggaactcaatcaaaccagtattcttttcacacaggtttcatcagtttcacccttttctgtgtgcggctgattttagaaagattgcttccttgtatggtagcgataagtttgatttgccctatgggatgagaacatcagcggaatattttcgacttgctctttcaaaactgcagagttgtgatctctttgatgagtttgacaaaatgaataatggtcctgttttaggacatgaagaagaagttgggagaaggacaaccttccgacttttttatccagaatctgttttttcagatcctattcacaatgaccctaatacgacagtgattctcactgcttttaagccacatgatttaaggtggctgttggaattgttgatgggtgacaaaataaacactaatggtttttggaagaaaccagccttaaacctgatttataaaccttatcaaatccgaatattagatcctttcattatcagaacagcagcttatgaactgcttcattttccaaaagtgtttcccaaaaatcagaaacctaaacacccaacaacaggaattattgccatcacattggcgttttacatatgtcacgaagttcacctagctggttttaaatacaacttttctgacctcaagagtcctttgcactactatgggaatgccaccatgtctttgatgaataagaacgcgtatcacaatgtgactgcagagcagctctttttgaaggacattatagaaaaaaacctcgtaatcaacttgactcaagattgactctacagactcagaagatgatgctaacagtgttagttttatttttgtactgcaatttttagtttaaaatatgttggatgcactcgtcaaataattatgtatactgtctgttgctgcctggtgattcataaccaccagcttaatttctgtgaatactgtatatttaacttatgaaaaccaagaaatgtaaagataacaggaaaataagttttgattgcattgtttttaaaataagctagttttctgaggtgttttcacacgtctttttatagttacttcatcttagatttttgaagggatatgacttcctactaaggatttagtttaccacaacaattctgactacaataagacattttgaggaggatatttggctactgtaaacatggctggtggaaaatcacgattgtggcttgatgtggcaagccgaaaccacttggctctggaaatctaagttcatactggtttaattaagctctctcctgacaacccccagaattaaatgaaccatgattgtgaagagtaatttggtacaatgaaggcagtgtttgtttttaagttaaaggaaatgggctaaacataaagttcttattagataagtaaataactaaagaaagaatacaattactaaactctgatggctttgtattattttaaagaaatgaagtttaactttatacagtgaagctaagctaggcaagctcaagaaggaaaaaaaaatcttgaacattatttttttttgcctgacttacttattcattaaattttgaaggttttccacttgaagtaaattaggaaaggtaaagaagataacagaacaagtaaacacttaagaaaagtcaagctgaggccgggcagggtggctcacacctgtaatcctaacaaacactttgggaggccgagggaggcagctggattgcctgaactcaggagttcaagaccagcctggccaacatggtgaaacctcatctctactaaaatacaaaataattagctgggcgtggtggtatgcgctgtagtcccaggtactcgggaggctgaggcacgagaattgcttgagcccgggaggcagaggttgcagtgagccaagatcgcgccactgcacttcagcctgggtgacagagtgaggctgtcttctaaaaaatataaaaagtgaagttgggatttttggatttaaatggtacaaaaagaatatctcattttcccatgattaaagctaatcttcagatggaaagcttgcctggctacctagggtgcaccagagaatctgatccaatgcaagccagtcaatcctacaaatgtggtgagctagtcttccttcctatattttaataaatgtaaccaaaggccatctggaggtaggggaatgagaggtgaagaaacagaaaaatagaggttataaggatggaactaaaagttgtcagaagaggtatgagctgaagaaagaattactctcttttgaccaataaatacaattgggaaacactggaaaaccatggcttgattactgacaaccaacctgcctctctaaagagggtgtataaagggtgaaatacattagatttggctcagaaacagaatgcggtacttataaagcagaataaaggggagaacagtagtagttgatctaacccagattagacatgaataccagcatatgtttgcagagtcccacagttttgattcctcttataactttttgaggtgcaaaaggaaggtaccagaactggaatcacatgtaatcaatcagtgtgattttcccctcataccacacagccataggctgcagtgtggctgctgaagttcaattgatataaagtaaatcaggcttcaaaaagaatggtgctgtgggtacacaaggacataaagatgggaacgatagacactgaggactgcggcggggggagcgaggggagcggggagggcaagggctgaaagactatgtattgggtactatgctcacaacctggatgatgggatcattcataccacaaacctcagtatcacacaatatacccatgtaacaacctgcactctgcacatgtacccttagaatctaaaataaaagttgaaattattttttt

SEQ ID NO: 186498 - DNA, 3571 bp, Homo sapiens
  Payload ID: 16725
  Gene Symbol: ST3GAL6
  Gene Name: ST3 beta-galactoside alpha-2,3-sialyltransferase 6
  Uniprot ID: Q9Y274
  ENST ID: ENST00000394162
  CDS Start-End: 492-1487
gtcgcccgggattggggctggcgggagcctgagactccgggcagggctgctccctcctctgctcccccgccagatccgcggggaaggaatcgtgcccgcgccgcccctggcccgcgccaccttcctttggtttctgccggcctcgggcttctgcggcccgatgtggcaggcgccgcgagagaggcagcagccggctggagcagcggcccctcaggtctcggagcccggtgcgcctctgcggtcgtcgctcctgggcctcggcgggtcactcttgccggccggcttcgctgcgggtttgcactgcccggcatttgcaagtgaggaagcagcacaaccctgggttttagataatttctaacagagaggccccagcaattcagcaggcagcgtcctgagtctttggcagcctggtccctctttcgcaaattctccacctttgcgaacagagggtctttaggacacagattcttaaaagtgcaggtgagccagccatgagagggtatcttgtggccatattcctgagtgctgtcttcctctattatgtactgcattgcatattatggggaacgaatgtctattgggtggcacctgtggaaatgaaacggagaaataagatccagccttgtttatcaaagccagcttttgcctctctgctgaggtttcatcagtttcacccttttctgtgtgcggctgattttagaaagattgcttccttgtatggtagcgataagtttgatttgccctatgggatgagaacatcagcggaatattttcgacttgctctttcaaaactgcagagttgtgatctctttgatgagtttgacaacataccctgtaaaaagtgtgtggtggttggtaatggaggagttttgaagaataagacattaggagaaaaaatcgactcctatgatgtaataataagaatgaataatggtcctgttttaggacatgaagaagaagttgggagaaggacaaccttccgacttttttatccagaatctgttttttcagatcctattcacaatgaccctaatacgacagtgattctcactgcttttaagccacatgatttaaggtggctgttggaattgttgatgggtgacaaaataaacactaatggtttttggaagaaaccagccttaaacctgatttataaaccttatcaaatccgaatattagatcctttcattatcagaacagcagcttatgaactgcttcattttccaaaagtgtttcccaaaaatcagaaacctaaacacccaacaacaggaattattgccatcacattggcgttttacatatgtcacgaagttcacctagctggttttaaatacaacttttctgacctcaagagtcctttgcactactatgggaatgccaccatgtctttgatgaataagaacgcgtatcacaatgtgactgcagagcagctctttttgaaggacattatagaaaaaaacctcgtaatcaacttgactcaagattgactctacagactcagaagatgatgctaacagtgttagttttatttttgtactgcaatttttagtttaaaatatgttggatgcactcgtcaaataattatgtatactgtctgttgctgcctggtgattcataaccaccagcttaatttctgtgaatactgtatatttaacttatgaaaaccaagaaatgtaaagataacaggaaaataagttttgattgcattgtttttaaaataagctagttttctgaggtgttttcacacgtctttttatagttacttcatcttagatttttgaagggatatgacttcctactaaggatttagtttaccacaacaattctgactacaataagacattttgaggaggatatttggctactgtaaacatggctggtggaaaatcacgattgtggcttgatgtggcaagccgaaaccacttggctctggaaatctaagttcatactggtttaattaagctctctcctgacaacccccagaattaaatgaaccatgattgtgaagagtaatttggtacaatgaaggcagtgtttgtttttaagttaaaggaaatgggctaaacataaagttcttattagataagtaaataactaaagaaagaatacaattactaaactctgatggctttgtattattttaaagaaatgaagtttaactttatacagtgaagctaagctaggcaagctcaagaaggaaaaaaaaatcttgaacattatttttttttgcctgacttacttattcattaaattttgaaggttttccacttgaagtaaattaggaaaggtaaagaagataacagaacaagtaaacacttaagaaaagtcaagctgaggccgggcagggtggctcacacctgtaatcctaacaaacactttgggaggccgagggaggcagctggattgcctgaactcaggagttcaagaccagcctggccaacatggtgaaacctcatctctactaaaatacaaaataattagctgggcgtggtggtatgcgctgtagtcccaggtactcgggaggctgaggcacgagaattgcttgagcccgggaggcagaggttgcagtgagccaagatcgcgccactgcacttcagcctgggtgacagagtgaggctgtcttctaaaaaatataaaaagtgaagttgggatttttggatttaaatggtacaaaaagaatatctcattttcccatgattaaagctaatcttcagatggaaagcttgcctggctacctagggtgcaccagagaatctgatccaatgcaagccagtcaatcctacaaatgtggtgagctagtcttccttcctatattttaataaatgtaaccaaaggccatctggaggtaggggaatgagaggtgaagaaacagaaaaatagaggttataaggatggaactaaaagttgtcagaagaggtatgagctgaagaaagaattactctcttttgaccaataaatacaattgggaaacactggaaaaccatggcttgattactgacaaccaacctgcctctctaaagagggtgtataaagggtgaaatacattagatttggctcagaaacagaatgcggtacttataaagcagaataaaggggagaacagtagtagttgatctaacccagattagacatgaataccagcatatgtttgcagagtcccacagttttgattcctcttataactttttgaggtgcaaaaggaaggtaccagaactggaatcacatgtaatcaatcagtgtgattttcccctcataccacacagccataggctgcagtgtggctgctgaagttcaattgatataaagtaaatcaggcttcaaaaagaatggtgctgtgggtacacaaggacataaagatgggaacgatagacactgaggactgcggcggggggagcgaggggagcggggagggcaagggctgaaagactatgtattgggtactatgctcacaacctggatgatgggatcattcataccacaaacctcagtatcacacaatatacccatgtaacaacctgcactctgcacatgtacccttagaatctaaaataaaagttgaaattattttttt

SEQ ID NO: 186499 - DNA, 833 bp, Homo sapiens
  Payload ID: 16725
  Gene Symbol: ST3GAL6
  Gene Name: ST3 beta-galactoside alpha-2,3-sialyltransferase 6
  ENST ID: ENST00000476833
  CDS Start-End: 135-407
gccatgttccacacagtctggagtgtatgtcagtgtgagctgaagaccagcagagactaggatggatgacggcctgtccaggggctgaatggacacaggtgtcagcagggccacctggtaaaggtgagccagccatgagagggtatcttgtggccatattcctgagtgctgtcttcctctattatgtactgcattgcatattatggggaacgaatgtctattgggtggcacctgtggaaatgaaacggagaaataagatccagccttgtttatcaaagccagcttttgcctctctgctgagtcagagctctgcatatattttaagaaaaggcattgaggaactcaatcaaaccagtattcttttcacacaggtttcatcagtttcacccttttctgtgtgcggctgattttagaaagattgcttccttgtatggtagcgataagtttgatttgccctatgggatgagaacatcagcggaatattttcgacttgctctttcaaaactgcagagttgtgatctctttgatgagtttgacaaaaacagagagcccaggaccatgaggcttccgcctgctggacagcaaggacttccagtagcttctcagctgttttcccagtcactttcagaagcaaggctgctatagctaattgatgtatgcaagatgtaattacagccattgatagggaaaatatcagcaatatgatgcccttggaagctcagaaaaaagtcaaaaggctgtaccatgactctcacaatagccagatctgaatataaaatctagtctcttctggtgatggagaaaaggaagtgtcatccatacaagatgaattt

SEQ ID NO: 186500 - DNA, 809 bp, Homo sapiens
  Payload ID: 16725
  Gene Symbol: ST3GAL6
  Gene Name: ST3 beta-galactoside alpha-2,3-sialyltransferase 6
  ENST ID: ENST00000492254
  CDS Start-End: 22-809
gaccagcagagactaggatggatgacggcctgtccaggggctgaatggacacaggtgtcagcagggccacctggtaaaggtgagccagccatgagagggtatcttgtggccatattcctgagtgctgtcttcctctattatgtactgcattgcatattatggggaacgaatgtctattgggtggcacctgtggaaatgaaacggagaaataagatccagccttgtttatcaaagccagcttttgcctctctgctgaggtttcatcagtttcacccttttctgtgtgcggctgattttagaaagattgcttccttgtatggtagcgataagtttgatttgccctatgggatgagaacatcagcggaatattttcgacttgctctttcaaaactgcagagttgtgatctctttgatgagtttgacaacataccctgtaaaaagtgtgtggtggttggtaatggaggagttttgaagaataagacattaggagaaaaaatcgactcctatgatgtaataataagaatgaataatggtcctgttttaggacatgaagaagaagttgggagaaggacaaccttccgacttttttatccagaatctgttttttcagatcctattcacaatgaccctaatacgacagtgattctcactgcttttaagccacatgatttaaggtggctgttggaattgttgatgggtgacaaaataaacactaatggtttttggaagaaaccagccttaaacctgatttataaaccttatcaaatccgaatattagatcctttcattatcagaacagcagcttatga

SEQ ID NO: 186501 - DNA, 1886 bp, Homo sapiens
  Payload ID: 16725
  Gene Symbol: ST3GAL6
  Gene Name: ST3 beta-galactoside alpha-2,3-sialyltransferase 6
  Uniprot ID: Q9Y274
  ENST ID: ENST00000483910
  CDS Start-End: 290-1285
gtgtcacagtcagtccgcggcgccacaagcctcagtgtttacttctgccgcctgccagccgggcggggaaggggagtacccggccacccctcactttagctcctgcagctttccaaacaaaccagggcgggatgggagtgtcttcttggctgtggaaatcgatcctcctaccttgtcctgaagccacccgccgcctttcctcgtccctcccttcgcggtgattttccggtcccggcgcccggcgagggcgcgcggctggtgtccgccccgcccgaaaggtgagccagccatgagagggtatcttgtggccatattcctgagtgctgtcttcctctattatgtactgcattgcatattatggggaacgaatgtctattgggtggcacctgtggaaatgaaacggagaaataagatccagccttgtttatcaaagccagcttttgcctctctgctgaggtttcatcagtttcacccttttctgtgtgcggctgattttagaaagattgcttccttgtatggtagcgataagtttgatttgccctatgggatgagaacatcagcggaatattttcgacttgctctttcaaaactgcagagttgtgatctctttgatgagtttgacaacataccctgtaaaaagtgtgtggtggttggtaatggaggagttttgaagaataagacattaggagaaaaaatcgactcctatgatgtaataataagaatgaataatggtcctgttttaggacatgaagaagaagttgggagaaggacaaccttccgacttttttatccagaatctgttttttcagatcctattcacaatgaccctaatacgacagtgattctcactgcttttaagccacatgatttaaggtggctgttggaattgttgatgggtgacaaaataaacactaatggtttttggaagaaaccagccttaaacctgatttataaaccttatcaaatccgaatattagatcctttcattatcagaacagcagcttatgaactgcttcattttccaaaagtgtttcccaaaaatcagaaacctaaacacccaacaacaggaattattgccatcacattggcgttttacatatgtcacgaagttcacctagctggttttaaatacaacttttctgacctcaagagtcctttgcactactatgggaatgccaccatgtctttgatgaataagaacgcgtatcacaatgtgactgcagagcagctctttttgaaggacattatagaaaaaaacctcgtaatcaacttgactcaagattgactctacagactcagaagatgatgctaacagtgttagttttatttttgtactgcaatttttagtttaaaatatgttggatgcactcgtcaaataattatgtatactgtctgttgctgcctggtgattcataaccaccagcttaatttctgtgaatactgtatatttaacttatgaaaaccaagaaatgtaaagataacaggaaaataagttttgattgcattgtttttaaaataagctagttttctgaggtgttttcacacgtctttttatagttacttcatcttagatttttgaagggatatgacttcctactaaggatttagtttaccacaacaattctgactacaataagacattttgaggaggatatttggctactgtaaacatggctggtggaaaatcacgattgtggcttgatgtggcaagccgaaaccacttggctctggaaatctaagttcatactggtttaattaagctctctcctgacaacccccagaattaaatgaaccatgattgtgaagagtaatttggtacaatgaaggcagtgtttgtttttaagttaaaggaaatgggctaaacataaagttcttattagataagt

SEQ ID NO: 186502 - DNA, 564 bp, Homo sapiens
  Payload ID: 16725
  Gene Symbol: ST3GAL6
  Gene Name: ST3 beta-galactoside alpha-2,3-sialyltransferase 6
  ENST ID: ENST00000497008
  CDS Start-End: 70-564
attttccggtcccggcgcccggcgagggcgcgcggctggtgtccgccccgcccgaaaggtgagccagccatgagagggtatcttgtggccatattcctgagtgctgtcttcctctattatgtactgcattgcatattatggggaacgaatgtctattgggtggcacctgtggaaatgaaacggagaaataagatccagccttgtttatcaaagccagcttttgcctctctgctgaggtttcatcagtttcacccttttctgtgtgcggctgattttagaaagattgcttccttgtatggtagcgataagtttgatttgccctatgggatgagaacatcagcggaatattttcgacttgctctttcaaaactgcagagttgtgatctctttgatgagtttgacaaaatgaataatggtcctgttttaggacatgaagaagaagttgggagaaggacaaccttccgacttttttatccagaatctgttttttcagatcctattcacaatgaccctaatacgacagtgattctcactgcttttaagccacatgatttaaggtggctg

SEQ ID NO: 186503 - DNA, 2109 bp, Homo sapiens
  Payload ID: 16725
  Gene Symbol: ST3GAL6
  Gene Name: ST3 beta-galactoside alpha-2,3-sialyltransferase 6
  ENST ID: ENST00000497621
  CDS Start-End: 151-348
attggggctggcgggagcctgagactccgggcagggctgctccctcctctgctcccccgccagatccgcggggaaggaatcgtgcccgcgccgcccctggcccgcgccaccttcctttggtttctgccggcctcgggcttctgcggcccgatgtggcaggcgccgcgagagaggcagcagccggctggagcagcggcccctcaggtctcggagcccggtgcgcctctgcggtcgtcgctcctgggcctcggcgggtcactcttgccggccggcttcgctgcgggtttgcactgcccggcatttgcaagtgaggaagcagcacaaccctgggttttagataatttctaacagagaggccccagcaattcagcaggcagcgtcctgagtctttggcagcctggtccctctttcgcaaattctccacctttgcgaacagagggtctttaggacacagattcttaaaagtgcaggtgagccagccatgagagggtatcttgtggccatattcctgagtgctgtcttcctctattatgtactgcattgcatattatggggaacgaatgtctattgggtggcacctgtggaaatgaaacggagaaataagatccagccttgtttatcaaagccagcttttgcctctctgctgaggtttcatcagtttcacccttttctgtgtgcggctgattttagaaagattgcttccttgtatggtagcgataagtttgatttgccctatgggatgagaacatcagcggaatattttcgacttgctctttcaaaactgcagagttgtgatctctttgatgagtttgacaacataccctgtaaaaagtgtgtggtggttggtaatggaggagttttgaagaataagacattaggagaaaaaatcgactcctatgatgtaataataagaatgaataatggtcctgttttaggacatgaagaagaagttgggagaaggacaaccttccgacttttttatccagaatctgttttttcagatcctattcacaatgaccctaatacgacagtgattctcactgcttttaagccacatgatttaaggtggctgttggaattgttgatgggtgacaaaataaacactaatggtttttggaagaaaccagccttaaacctgatttataaaccttatcaaatccgaatattagatcctttcattatcagaacagcagcttatgaactgcttcattttccaaaagtgtttcccaaaaatcagaaacctaaacacccaacaacaggaattattgccatcacattggcgttttacatatgtcacgaagttcacctagctggttttaaatacaacttttctgacctcaagagtcctttgcactactatgggaatgccaccatgtctttgatgaataagaacgcgtatcacaatgtgactgcagagcagctctttttgaaggacattatagaaaaaaacctcgtaatcaacttgactcaagattgactctacagactcagaagatgatgctaacagtgttagttttatttttgtactgcaatttttagtttaaaatatgttggatgcactcgtcaaataattatgtatactgtctgttgctgcctggtgattcataaccaccagcttaatttctgtgaatactgtatatttaacttatgaaaaccaagaaatgtaaagataacaggaaaataagttttgattgcattgtttttaaaataagctagttttctgaggtgttttcacacgtctttttatagttacttcatcttagatttttgaagggatatgacttcctactaaggatttagtttaccacaacaattctgactacaataagacattttgaggaggatatttggctactgtaaacatggctggtggaaaatcacgattgtggcttgatgtggcaagccgaaaccacttggctctggaaatctaagttcatactggtttaattaagctctctcctgacaacccccagaattaaatgaaccatgattgtgaagagtaatttggtacaatgaaggcagtgtttgtttttaagttaaaggaaatgggctaaacataaagttcttattagataagtaaataactaaagaaagaatacaattactaaa

SEQ ID NO: 186504 - DNA, 767 bp, Homo sapiens
  Payload ID: 16725
  Gene Symbol: ST3GAL6
  Gene Name: ST3 beta-galactoside alpha-2,3-sialyltransferase 6
  ENST ID: ENST00000485391
  CDS Start-End: 112-767
agtgtgagctgaagaccagcagagactaggatggatgacggcctgtccaggggctgaatggacacaggtgtcagcagggccacctggtaaaggtatggaggtgagccagccatgagagggtatcttgtggccatattcctgagtgctgtcttcctctattatgtactgcattgcatattatggggaacgaatgtctattgggtggcacctgtggaaatgaaacggagaaataagatccagccttgtttatcaaagccagcttttgcctctctgctgaggtttcatcagtttcacccttttctgtgtgcggctgattttagaaagattgcttccttgtatggtagcgataagtttgatttgccctatgggatgagaacatcagcggaatattttcgacttgctctttcaaaactgcagagttgtgatctctttgatgagtttgacaaaatgaataatggtcctgttttaggacatgaagaagaagttgggagaaggacaaccttccgacttttttatccagaatctgttttttcagatcctattcacaatgaccctaatacgacagtgattctcactgcttttaagccacatgatttaaggtggctgttggaattgttgatgggtgacaaaataaacactaatggtttttggaagaaaccagccttaaacctgatttataaaccttatcaaatccgaatattagatcctttcattatcagaacagcagcttatgaactgcttcattttccaaaagtgtttcccaaaaa

SEQ ID NO: 186505 - DNA, 750 bp, Homo sapiens
  Payload ID: 16725
  Gene Symbol: ST3GAL6
  Gene Name: ST3 beta-galactoside alpha-2,3-sialyltransferase 6
  ENST ID: ENST00000486334
  CDS Start-End: 56-750
ggcgctcggcgcagtcgcccgggattggggctggcgggagcctgagactccggccatgagagggtatcttgtggccatattcctgagtgctgtcttcctctattatgtactgcattgcatattatggggaacgaatgtctattgggtggcacctgtggaaatgaaacggagaaataagatccagccttgtttatcaaagccagcttttgcctctctgctgaggtttcatcagtttcacccttttctgtgtgcggctgattttagaaagattgcttccttgtatggtagcgataagtttgatttgccctatgggatgagaacatcagcggaatattttcgacttgctctttcaaaactgcagagttgtgatctctttgatgagtttgacaacataccctgtaaaaagtgtgtggtggttggtaatggaggagttttgaagaataagacattaggagaaaaaatcgactcctatgatgtaataataagaatgaataatggtcctgttttaggacatgaagaagaagttgggagaaggacaaccttccgacttttttatccagaatctgttttttcagatcctattcacaatgaccctaatacgacagtgattctcactgcttttaagccacatgatttaaggtggctgttggaattgttgatgggtgacaaaataaacactaatggtttttggaagaaaccagccttaaacctgatttataaaccttatcaaatccgaatattagatccttt

SEQ ID NO: 186506 - DNA, 700 bp, Homo sapiens
  Payload ID: 16725
  Gene Symbol: ST3GAL6
  Gene Name: ST3 beta-galactoside alpha-2,3-sialyltransferase 6
  ENST ID: ENST00000485145
  CDS Start-End: 228-700
agtataaagtggacaccccatatttaaggaagagcttgaatatcctgtctctttttgtgcttttagtcagagctctgcatatattttaagaaaaggcattgaggaactcaatcaaaccagtattcttttcacacaggtttcatcagtttcacccttttctgtgtgcggctgattttagaaagattgcttccttgtatggtagcgataagtttgatttgccctatgggatgagaacatcagcggaatattttcgacttgctctttcaaaactgcagagttgtgatctctttgatgagtttgacaacataccctgtaaaaagtgtgtggtggttggtaatggaggagttttgaagaataagacattaggagaaaaaatcgactcctatgatgtaataataagaatgaataatggtcctgttttaggacatgaagaagaagttgggagaaggacaaccttccgacttttttatccagaatctgttttttcagatcctattcacaatgaccctaatacgacagtgattctcactgcttttaagccacatgatttaaggtggctgttggaattgttgatgggtgacaaaataaacactaatggtttttggaagaaaccagccttaaacctgatttataaaccttatcaaatccgaatattagatcctttcattatcagaacagcagcttatgaactgcttcattt

SEQ ID NO: 186507 - DNA, 582 bp, Homo sapiens
  Payload ID: 16725
  Gene Symbol: ST3GAL6
  Gene Name: ST3 beta-galactoside alpha-2,3-sialyltransferase 6
  ENST ID: ENST00000460774
  CDS Start-End: 280-582
cagtccgcggcgccacaagcctcagtgtttacttctgccgcctgccagccgggcggggaaggggagtacccggccacccctcactttagctcctgcagctttccaaacaaaccagggcgggatgggagtgtcttcttggctgtggaaatcgatcctcctaccttgtcctgaagccacccgccgcctttcctcgtccctcccttcgcggtgattttccggtcccggcgcccggcgagggcgcgcggctggtgtccgccccgcccgaaaggtgagccagccatgagagggtatcttgtggccatattcctgagtgctgtcttcctctattatgtactgcattgcatattatggggaacgaatgtctattgggtggcacctgtggaaatgaaacggagaaataagatccagccttgtttatcaaagccagcttttgcctctctgctgaggtttcatcagtttcacccttttctgtgtgcggctgattttagaaagattgcttccttgtatggtagcgataagtttgatttgccctatgggatgagaacatcagcataccctgtaaaaagtgtgtggtggttggta

SEQ ID NO: 186508 - DNA, 2837 bp, Homo sapiens
  Payload ID: 16725
  Gene Symbol: ST3GAL6
  Gene Name: ST3 beta-galactoside alpha-2,3-sialyltransferase 6
  ENST ID: ENST00000469105
  CDS Start-End: 279-551
agtccgcggcgccacaagcctcagtgtttacttctgccgcctgccagccgggcggggaaggggagtacccggccacccctcactttagctcctgcagctttccaaacaaaccagggcgggatgggagtgtcttcttggctgtggaaatcgatcctcctaccttgtcctgaagccacccgccgcctttcctcgtccctcccttcgcggtgattttccggtcccggcgcccggcgagggcgcgcggctggtgtccgccccgcccgaaaggtgagccagccatgagagggtatcttgtggccatattcctgagtgctgtcttcctctattatgtactgcattgcatattatggggaacgaatgtctattgggtggcacctgtggaaatgaaacggagaaataagatccagccttgtttatcaaagccagcttttgcctctctgctgagtcagagctctgcatatattttaagaaaaggcattgaggaactcaatcaaaccagtattcttttcacacaggtttcatcagtttcacccttttctgtgtgcggctgattttagaaagattgcttccttgtatggtagcgataagtttgatttgccctatgggatgagaacatcagcggaatattttcgacttgctctttcaaaactgcagagttgtgatctctttgatgagtttgacaacataccctgtaaaaagtgtgtggtggttggtaatggaggagttttgaagaataagacattaggagaaaaaatcgactcctatgatgtaataataagaatgaataatggtcctgttttaggacatgaagaagaagttgggagaaggacaaccttccgacttttttatccagaatctgttttttcagatcctattcacaatgaccctaatacgacagtgattctcactgcttttaagccacatgatttaaggtggctgttggaattgttgatgggtgacaaaataaacactaatggtttttggaagaaaccagccttaaacctgatttataaaccttatcaaatccgaatattagatcctttcattatcagaacagcagcttatgaactgcttcattttccaaaagtgtttcccaaaaatcagaaacctaaacacccaacaacaggaattattgccatcacattggcgttttacatatgtcacgaagttcacctagctggttttaaatacaacttttctgacctcaagagtcctttgcactactatgggaatgccaccatgtctttgatgaataagaacgcgtatcacaatgtgactgcagagcagctctttttgaaggacattatagaaaaaaacctcgtaatcaacttgactcaagattgactctacagactcagaagatgatgctaacagtgttagttttatttttgtactgcaatttttagtttaaaatatgttggatgcactcgtcaaataattatgtatactgtctgttgctgcctggtgattcataaccaccagcttaatttctgtgaatactgtatatttaacttatgaaaaccaagaaatgtaaagataacaggaaaataagttttgattgcattgtttttaaaataagctagttttctgaggtgttttcacacgtctttttatagttacttcatcttagatttttgaagggatatgacttcctactaaggatttagtttaccacaacaattctgactacaataagacattttgaggaggatatttggctactgtaaacatggctggtggaaaatcacgattgtggcttgatgtggcaagccgaaaccacttggctctggaaatctaagttcatactggtttaattaagctctctcctgacaacccccagaattaaatgaaccatgattgtgaagagtaatttggtacaatgaaggcagtgtttgtttttaagttaaaggaaatgggctaaacataaagttcttattagataagtaaataactaaagaaagaatacaattactaaactctgatggctttgtattattttaaagaaatgaagtttaactttatacagtgaagctaagctaggcaagctcaagaaggaaaaaaaaatcttgaacattatttttttttgcctgacttacttattcattaaattttgaaggttttccacttgaagtaaattaggaaaggtaaagaagataacagaacaagtaaacacttaagaaaagtcaagctgaggccgggcagggtggctcacacctgtaatcctaacaaacactttgggaggccgagggaggcagctggattgcctgaactcaggagttcaagaccagcctggccaacatggtgaaacctcatctctactaaaatacaaaataattagctgggcgtggtggtatgcgctgtagtcccaggtactcgggaggctgaggcacgagaattgcttgagcccgggaggcagaggttgcagtgagccaagatcgcgccactgcacttcagcctgggtgacagagtgaggctgtcttctaaaaaatataaaaagtgaagttgggatttttggatttaaatggtacaaaaagaatatctcattttcccatgattaaagctaatcttcagatggaaagcttgcctggctacctagggtgcaccagagaatctgatccaatgcaagccagtcaatcctacaaatgtggtgagctagtcttccttcctatattttaataaatgtaaccaaaggccatctggaggtaggggaatgagaggtgaagaaacagaaaaatagaggttataaggatggaactaaaagttgtcagaagaggtatgagctgaagaaagaattactctcttttgaccaataaatacaattgggaaacactggaaaa

SEQ ID NO: 186509 - DNA, 489 bp, Homo sapiens
  Payload ID: 16725
  Gene Symbol: ST3GAL6
  Gene Name: ST3 beta-galactoside alpha-2,3-sialyltransferase 6
  ENST ID: ENST00000477574
  CDS Start-End: 127-489
gatttgtagagtcccccggatcccaaggcaagggtctatggaacctgttcaggtcaggtgtttctgtggtgttcgctgccggtgtgcgtcagcagatgtggcaggaggagggtggcacctgtggaaatgaaacggagaaataagatccagccttgtttatcaaagccagcttttgcctctctgctgaggtttcatcagtttcacccttttctgtgtgcggctgattttagaaagattgcttccttgtatggtagcgataagtttgatttgccctatgggatgagaacatcagcggaatattttcgacttgctctttcaaaactgcagagttgtgatctctttgatgagtttgacaacataccctgtaaaaagtgtgtggtggttggtaatggaggagttttgaagaataagacattaggagaaaaaatcgactcctatgatgtaataataagaatgaataatggtcctgttttaggacatgaagaagaa

SEQ ID NO: 186510 - DNA, 3148 bp, Homo sapiens
  Payload ID: 16725
  Gene Symbol: ST3GAL6
  Gene Name: ST3 beta-galactoside alpha-2,3-sialyltransferase 6
  ENST ID: ENST00000486249
  CDS Start-End: 95-367
tttcctcgtccctcccttcgcggtgattttccggtcccggcgcccggcgagggcgcgcggctggtgtccgccccgcccgaaaggtgagccagccatgagagggtatcttgtggccatattcctgagtgctgtcttcctctattatgtactgcattgcatattatggggaacgaatgtctattgggtggcacctgtggaaatgaaacggagaaataagatccagccttgtttatcaaagccagcttttgcctctctgctgagtcagagctctgcatatattttaagaaaaggcattgaggaactcaatcaaaccagtattcttttcacacaggtttcatcagtttcacccttttctgtgtgcggctgattttagaaagattgcttccttgtatggtagcgataagtttgatttgccctatgggatgagaacatcagcggaatattttcgacttgctctttcaaaactgcagagttgtgatctctttgatgagtttgacaaaatgaataatggtcctgttttaggacatgaagaagaagttgggagaaggacaaccttccgacttttttatccagaatctgttttttcagatcctattcacaatgaccctaatacgacagtgattctcactgcttttaagccacatgatttaaggtggctgttggaattgttgatgggtgacaaaataaacactaatggtttttggaagaaaccagccttaaacctgatttataaaccttatcaaatccgaatattagatcctttcattatcagaacagcagcttatgaactgcttcattttccaaaagtgtttcccaaaaatcagaaacctaaacacccaacaacaggaattattgccatcacattggcgttttacatatgtcacgaagttcacctagctggttttaaatacaacttttctgacctcaagagtcctttgcactactatgggaatgccaccatgtctttgatgaataagaacgcgtatcacaatgtgactgcagagcagctctttttgaaggacattatagaaaaaaacctcgtaatcaacttgactcaagattgactctacagactcagaagatgatgctaacagtgttagttttatttttgtactgcaatttttagtttaaaatatgttggatgcactcgtcaaataattatgtatactgtctgttgctgcctggtgattcataaccaccagcttaatttctgtgaatactgtatatttaacttatgaaaaccaagaaatgtaaagataacaggaaaataagttttgattgcattgtttttaaaataagctagttttctgaggtgttttcacacgtctttttatagttacttcatcttagatttttgaagggatatgacttcctactaaggatttagtttaccacaacaattctgactacaataagacattttgaggaggatatttggctactgtaaacatggctggtggaaaatcacgattgtggcttgatgtggcaagccgaaaccacttggctctggaaatctaagttcatactggtttaattaagctctctcctgacaacccccagaattaaatgaaccatgattgtgaagagtaatttggtacaatgaaggcagtgtttgtttttaagttaaaggaaatgggctaaacataaagttcttattagataagtaaataactaaagaaagaatacaattactaaactctgatggctttgtattattttaaagaaatgaagtttaactttatacagtgaagctaagctaggcaagctcaagaaggaaaaaaaaatcttgaacattatttttttttgcctgacttacttattcattaaattttgaaggttttccacttgaagtaaattaggaaaggtaaagaagataacagaacaagtaaacacttaagaaaagtcaagctgaggccgggcagggtggctcacacctgtaatcctaacaaacactttgggaggccgagggaggcagctggattgcctgaactcaggagttcaagaccagcctggccaacatggtgaaacctcatctctactaaaatacaaaataattagctgggcgtggtggtatgcgctgtagtcccaggtactcgggaggctgaggcacgagaattgcttgagcccgggaggcagaggttgcagtgagccaagatcgcgccactgcacttcagcctgggtgacagagtgaggctgtcttctaaaaaatataaaaagtgaagttgggatttttggatttaaatggtacaaaaagaatatctcattttcccatgattaaagctaatcttcagatggaaagcttgcctggctacctagggtgcaccagagaatctgatccaatgcaagccagtcaatcctacaaatgtggtgagctagtcttccttcctatattttaataaatgtaaccaaaggccatctggaggtaggggaatgagaggtgaagaaacagaaaaatagaggttataaggatggaactaaaagttgtcagaagaggtatgagctgaagaaagaattactctcttttgaccaataaatacaattgggaaacactggaaaaccatggcttgattactgacaaccaacctgcctctctaaagagggtgtataaagggtgaaatacattagatttggctcagaaacagaatgcggtacttataaagcagaataaaggggagaacagtagtagttgatctaacccagattagacatgaataccagcatatgtttgcagagtcccacagttttgattcctcttataactttttgaggtgcaaaaggaaggtaccagaactggaatcacatgtaatcaatcagtgtgattttcccctcataccacacagccataggctgcagtgtggctgctgaagttcaattgatataaagtaaatcaggcttcaaaaagaatggtgctgtgggtacacaaggacataaagatgggaacgatagacactgaggactgcggcggggggagcgaggggagcggggagggcaagggctgaaagactatgtattgggtactatgctcacaacctggatgatgggatcattcataccacaaacctcagtatcacacaatatacccatgtaacaacctgcactctgcacatgtacccttagaatctaaaataaaagttgaaattattttttt

SEQ ID NO: 186511 - DNA, 715 bp, Homo sapiens
  Payload ID: 16725
  Gene Symbol: ST3GAL6
  Gene Name: ST3 beta-galactoside alpha-2,3-sialyltransferase 6
  ENST ID: ENST00000468553
  CDS Start-End: 127-567
ccacacagtctggagtgtatgtcagtgtgagctgaagaccagcagagactaggatggatgacggcctgtccaggggctgaatggacacaggtgtcagcagggccacctggtaaaggtgagccagccatgagagggtatcttgtggccatattcctgagtgctgtcttcctctattatgtactgcattgcatattatggggaacgaatgtctattgggtggcacctgtggaaatgaaacggagaaataagatccagccttgtttatcaaagccagcttttgcctctctgctgaggtttcatcagtttcacccttttctgtgtgcggctgattttagaaagattgcttccttgtatggtagcgataagtttgatttgccctatgggatgagaacatcagcggaatattttcgacttgctctttcaaaactgcagagttgtgatctctttgatgagtttgacaaaaacagagagcccaggaccatgaggcttccgcctgctggacagcaaggacttccagtagcttctcagctgttttcccagtcactttcagaagcaaggctgctatagctaattgatgtatgcaagatgtaattacagccattgatagggaaaatatcagcaatatgatgcccttggaagctcagaaaaaagtcaaaaggctgtaccatgactctcacaatagccagatctgaatataaaatctagtctcttctgg

SEQ ID NO: 186512 - DNA, 685 bp, Homo sapiens
  Payload ID: 16725
  Gene Symbol: ST3GAL6
  Gene Name: ST3 beta-galactoside alpha-2,3-sialyltransferase 6
  ENST ID: ENST00000495376
  CDS Start-End: 104-376
ctgaagaccagcagagactaggatggatgacggcctgtccaggggctgaatggacacaggtgtcagcagggccacctggtaaaggtatggaggtgagccagccatgagagggtatcttgtggccatattcctgagtgctgtcttcctctattatgtactgcattgcatattatggggaacgaatgtctattgggtggcacctgtggaaatgaaacggagaaataagatccagccttgtttatcaaagccagcttttgcctctctgctgagtcagagctctgcatatattttaagaaaaggcattgaggaactcaatcaaaccagtattcttttcacacaggtttcatcagtttcacccttttctgtgtgcggctgattttagaaagattgcttccttgtatggtagcgataagtttgatttgccctatgggatgagaacatcagcggaatattttcgacttgctctttcaaaactgcagagttgtgatctctttgatgagtttgacaaactcccagaaaaaagaaataaaaaaaatgcaaagaaaatttaaatgaacaaacagacccttctggaacctactgtgacatgagatgtgtccacaaggcgaggtttcaggcacacactgaaggagcatctgctggacagccctccccgcccccaagtccttaccaacctgtgccactg

SEQ ID NO: 186513 - DNA, 3399 bp, Homo sapiens
  Payload ID: 16725
  Gene Symbol: ST3GAL6
  Gene Name: ST3 beta-galactoside alpha-2,3-sialyltransferase 6
  ENST ID: ENST00000613264
  CDS Start-End: 161-1315
gtcgcccgggattggggctggcgggagcctgagactccgggcagggctgctccctcctctgctcccccgccagatccgcggggaaggaatcgtgcccgcgccgcccctggcccgcgccaccttcctttggtttctgccggcctcgggcttctgcggcccgatgtggcaggcgccgcgagagaggcagcagccggctggagcagcggcccctcaggtctcggagcccggtgcgcctctgcggtcgtcgctcctgggcctcggcgggtcactcttgccggccggcttcgctgcgggtttgcactgcccgggtgagccagccatgagagggtatcttgtggccatattcctgagtgctgtcttcctctattatgtactgcattgcatattatggggaacgaatgtctattgggtggcacctgtggaaatgaaacggagaaataagatccagccttgtttatcaaagccagcttttgcctctctgctgaggtttcatcagtttcacccttttctgtgtgcggctgattttagaaagattgcttccttgtatggtagcgataagtttgatttgccctatgggatgagaacatcagcggaatattttcgacttgctctttcaaaactgcagagttgtgatctctttgatgagtttgacaacataccctgtaaaaagtgtgtggtggttggtaatggaggagttttgaagaataagacattaggagaaaaaatcgactcctatgatgtaataataagaatgaataatggtcctgttttaggacatgaagaagaagttgggagaaggacaaccttccgacttttttatccagaatctgttttttcagatcctattcacaatgaccctaatacgacagtgattctcactgcttttaagccacatgatttaaggtggctgttggaattgttgatgggtgacaaaataaacactaatggtttttggaagaaaccagccttaaacctgatttataaaccttatcaaatccgaatattagatcctttcattatcagaacagcagcttatgaactgcttcattttccaaaagtgtttcccaaaaatcagaaacctaaacacccaacaacaggaattattgccatcacattggcgttttacatatgtcacgaagttcacctagctggttttaaatacaacttttctgacctcaagagtcctttgcactactatgggaatgccaccatgtctttgatgaataagaacgcgtatcacaatgtgactgcagagcagctctttttgaaggacattatagaaaaaaacctcgtaatcaacttgactcaagattgactctacagactcagaagatgatgctaacagtgttagttttatttttgtactgcaatttttagtttaaaatatgttggatgcactcgtcaaataattatgtatactgtctgttgctgcctggtgattcataaccaccagcttaatttctgtgaatactgtatatttaacttatgaaaaccaagaaatgtaaagataacaggaaaataagttttgattgcattgtttttaaaataagctagttttctgaggtgttttcacacgtctttttatagttacttcatcttagatttttgaagggatatgacttcctactaaggatttagtttaccacaacaattctgactacaataagacattttgaggaggatatttggctactgtaaacatggctggtggaaaatcacgattgtggcttgatgtggcaagccgaaaccacttggctctggaaatctaagttcatactggtttaattaagctctctcctgacaacccccagaattaaatgaaccatgattgtgaagagtaatttggtacaatgaaggcagtgtttgtttttaagttaaaggaaatgggctaaacataaagttcttattagataagtaaataactaaagaaagaatacaattactaaactctgatggctttgtattattttaaagaaatgaagtttaactttatacagtgaagctaagctaggcaagctcaagaaggaaaaaaaaatcttgaacattatttttttttgcctgacttacttattcattaaattttgaaggttttccacttgaagtaaattaggaaaggtaaagaagataacagaacaagtaaacacttaagaaaagtcaagctgaggccgggcagggtggctcacacctgtaatcctaacaaacactttgggaggccgagggaggcagctggattgcctgaactcaggagttcaagaccagcctggccaacatggtgaaacctcatctctactaaaatacaaaataattagctgggcgtggtggtatgcgctgtagtcccaggtactcgggaggctgaggcacgagaattgcttgagcccgggaggcagaggttgcagtgagccaagatcgcgccactgcacttcagcctgggtgacagagtgaggctgtcttctaaaaaatataaaaagtgaagttgggatttttggatttaaatggtacaaaaagaatatctcattttcccatgattaaagctaatcttcagatggaaagcttgcctggctacctagggtgcaccagagaatctgatccaatgcaagccagtcaatcctacaaatgtggtgagctagtcttccttcctatattttaataaatgtaaccaaaggccatctggaggtaggggaatgagaggtgaagaaacagaaaaatagaggttataaggatggaactaaaagttgtcagaagaggtatgagctgaagaaagaattactctcttttgaccaataaatacaattgggaaacactggaaaaccatggcttgattactgacaaccaacctgcctctctaaagagggtgtataaagggtgaaatacattagatttggctcagaaacagaatgcggtacttataaagcagaataaaggggagaacagtagtagttgatctaacccagattagacatgaataccagcatatgtttgcagagtcccacagttttgattcctcttataactttttgaggtgcaaaaggaaggtaccagaactggaatcacatgtaatcaatcagtgtgattttcccctcataccacacagccataggctgcagtgtggctgctgaagttcaattgatataaagtaaatcaggcttcaaaaagaatggtgctgtgggtacacaaggacataaagatgggaacgatagacactgaggactgcggcggggggagcgaggggagcggggagggcaagggctgaaagactatgtattgggtactatgctcacaacctggatgatgggatcattcataccacaaacctcagtatcacacaatatacccatgtaacaacctgcactctgcacatgtacccttagaatctaaaataaaagttgaaattattttttt

SEQ ID NO: 186514 - DNA, 2570 bp, Homo sapiens
  Payload ID: 16726
  Gene Symbol: ST6GALNAC1
  Gene Name: ST6 (alpha-N-acetyl-neuraminyl-2,3-beta-galactosyl-1,3) -N-acetylgalactosaminide alpha-2,6-sialyltransferase 1
  Uniprot ID: Q9NSC7
  ENST ID: ENST00000156626
  CDS Start-End: 201-2003
ataagccttcatacagcagtgaaggcggttcctcccttcccaggcagagactgataaactcagcacttgccggagtggctcattgttaagacaaagggtgtgcacttcctggccaggaaacctgagcggtgagactcccagctgcctacatcaaggccccaggacatgcagaaccttcctctagaacccgacccaccaccatgaggtcctgcctgtggagatgcaggcacctgagccaaggcgtccagtggtccttgcttctggctgtcctggtcttctttctcttcgccttgccctcttttattaaggagcctcaaacaaagccttccaggcatcaacgcacagagaacattaaagaaaggtctctacagtccctggcaaagcctaagtcccaggcacccacaagggcaaggaggacaaccatctatgcagagccagtgccagagaacaatgccctcaacacacaaacccagcccaaggcccacaccaccggagacagaggaaaggaggccaaccaggcaccgccggaggagcaggacaaggtgccccacacagcacagagggcagcatggaagagcccagaaaaagagaaaaccatggtgaacacactgtcacccagagggcaagatgcagggatggcctctggcaggacagaggcacaatcatggaagagccaggacacaaagacgacccaaggaaatgggggccagaccaggaagctgacggcctccaggacggtgtcagagaagcaccagggcaaagcggcaaccacagccaagacgctcattcccaaaagtcagcacagaatgctggctcccacaggagcagtgtcaacaaggacgagacagaaaggagtgaccacagcagtcatcccacctaaggagaagaaacctcaggccaccccaccccctgcccctttccagagccccacgacgcagagaaaccaaagactgaaggccgccaacttcaaatctgagcctcggtgggattttgaggaaaaatacagcttcgaaataggaggccttcagacgacttgccctgactctgtgaagatcaaagcctccaagtcgctgtggctccagaaactctttctgcccaacctcactctcttcctggactccagacacttcaaccagagtgagtgggaccgcctggaacactttgcaccaccctttggcttcatggagctcaactactccttggtgcagaaggtcgtgacacgcttccctccagtgccccagcagcagctgctcctggccagcctccccgctgggagcctccggtgcatcacctgtgccgtggtgggcaacgggggcatcctgaacaactcccacatgggccaggagatagacagtcacgactacgtgttccgattgagcggagctctcattaaaggctacgaacaggatgtggggactcggacatccttctacggctttaccgccttctccctgacccagtcactccttatattgggcaatcggggtttcaagaacgtgcctcttgggaaggacgtccgctacttgcacttcctggaaggcacccgggactatgagtggctggaagcactgcttatgaatcagacggtgatgtcaaaaaaccttttctggttcaggcacagaccccaggaagcttttcgggaagccctgcacatggacaggtacctgttgctgcacccagactttctccgatacatgaagaacaggtttctgaggtctaagaccctggatggtgcccactggaggatataccgccccaccactggggccctcctgctgctcactgcccttcagctctgtgaccaggtgagtgcttatggcttcatcactgagggccatgagcgcttttctgatcactactatgatacatcatggaagcggctgatcttttacataaaccatgacttcaagctggagagagaagtctggaagcggctacacgatgaagggataatccggctgtaccagcgtcctggtcccggaactgccaaagccaagaactgaccggggccagggctgccatggtctccttgcctgctccaaggcacaggatacagtgggaatcttgagactctttggccatttcccatggctcagactaagctccaagcccttcaggagttccaagggaacacttgaaccatggacaagactctctcaagatggcaaatggctaattgaggttctgaagttcttcagtacattgctgtaggtcctgaggccagggatttttaattaaatggggtgatgggtggccaataccacaattcctgctgaaaaacactcttccagtccaaaagcttcttgatacagaaaaaagagcctggatttacagaaacatatagatctggtttgaattccagatcgagtttacagttgtgaaatcttgaaggtattacttaacttcactacagattgtctagaagacctttctaggagttatctgattctagaagggtctatacttgtccttgtctttaagctatttgacaactctacgtgttgtagaaaactgataataatacaaatgattgttgtccatggaaaggcaaataaattttctacagtgaa

SEQ ID NO: 186515 - DNA, 2321 bp, Homo sapiens
  Payload ID: 16726
  Gene Symbol: ST6GALNAC1
  Gene Name: ST6 (alpha-N-acetyl-neuraminyl-2,3-beta-galactosyl-1,3) -N-acetylgalactosaminide alpha-2,6-sialyltransferase 1
  ENST ID: ENST00000359088
  CDS Start-End: 56-1471
ctacatcaaggccccaggacatgcagaaccttcctctagaacccgacccaccaccatgaggtcctgcctgtggagatgcaggcacctgagccaaggcgtccagtggtccttgcttctggctgtcctggtcttctttctcttcgccttgccctcttttattaaggagcctcaaacaaagccttccaggcatcaacgcacagagaacattaaagaaaggtctctacagtccctggcaaagcctaagtcccaggcacccacaagggcaaggaggacaaccatctatgcagagccagtgccagagaacaatgccctcaacacacaaacccagcccaaggcccacaccaccggagacagaggaaaggaggccaaccaggcaccgccggaggagcaggacaaggtgccccacacagcacagagggcagcatggaagagcccagaaaaagagaaaaccatggtgaacacactgtcacccagagggcaagatgcagggatggcctctggcaggacagaggcacaatcatggaagagccaggacacaaagacgacccaaggaaatgggggccagaccaggaagctgacggcctccaggacggtgtcagagaagcaccagggcaaagcggcaaccacagccaagacgctcattcccaaaagtcagcacagaatgctggctcccacaggagcagtgtcaacaaggacgagacagaaaggagtgaccacagcagtcatcccacctaaggagaagaaacctcaggccaccccaccccctgcccctttccagagccccacgacgcagagaaaccaaagactgaaggccgccaacttcaaatctgagcctcggtgggattttgaggaaaaatacagcttcgaaataggaggccttcagacgacttgccctgactctgtgaagatcaaagcctccaagtcgctgtggctccagaaactctttctgcccaacctcactctcttcctggactccagacacttcaaccagagtgagtgggaccgcctggaacactttgcaccaccctttggcttcatggagctcaactactccttggtgcagaaggtcgtgacacgcttccctccagtgccccagcagcagctgctcctggccagcctccccgctgggagcctccggtgcatcacctgtgccgtggtgggcaacgggggcatcctgaacaactcccacatgggccaggagatagacagtcacgactacgtgttccgattgagcggagctctcattaaaggctacgaacaggatgtggggactcggacatccttctacggctttaccgccttctccctgacccagtcactccttatattgggcaatcggggtttcaagaacgtgcctcttgggaaggcacagaccccaggaagcttttcgggaagccctgcacatggacaggtacctgttgctgcacccagactttctccgatacatgaagaacaggtttctgaggtctaagaccctggatggtgcccactggaggatataccgccccaccactggggccctcctgctgctcactgcccttcagctctgtgaccaggtgagtgcttatggcttcatcactgagggccatgagcgcttttctgatcactactatgatacatcatggaagcggctgatcttttacataaaccatgacttcaagctggagagagaagtctggaagcggctacacgatgaagggataatccggctgtaccagcgtcctggtcccggaactgccaaagccaagaactgaccggggccagggctgccatggtctccttgcctgctccaaggcacaggatacagtgggaatcttgagactctttggccatttcccatggctcagactaagctccaagcccttcaggagttccaagggaacacttgaaccatggacaagactctctcaagatggcaaatggctaattgaggttctgaagttcttcagtacattgctgtaggtcctgaggccagggatttttaattaaatggggtgatgggtggccaataccacaattcctgctgaaaaacactcttccagtccaaaagcttcttgatacagaaaaaagagcctggatttacagaaacatatagatctggtttgaattccagatcgagtttacagttgtgaaatcttgaaggtattacttaacttcactacagattgtctagaagacctttctaggagttatctgattctagaagggtctatacttgtccttgtctttaagctatttgacaactctacgtgttgtagaaaactgataataatacaaatgattgttgtccatggaaaggcaaataaattttctacagtgaa

SEQ ID NO: 186516 - DNA, 2657 bp, Homo sapiens
  Payload ID: 16726
  Gene Symbol: ST6GALNAC1
  Gene Name: ST6 (alpha-N-acetyl-neuraminyl-2,3-beta-galactosyl-1,3) -N-acetylgalactosaminide alpha-2,6-sialyltransferase 1
  ENST ID: ENST00000592042
  CDS Start-End: 149-340
gataaactcagcacttgccggagtggctcattgttaagacaaagggtgtgcacttcctggccaggaaacctgagcggtgagactcccagctgcctacatcaaggccccaggacatgcagaaccttcctctagaacccgacccaccaccatgaggtcctgcctgtggagatgcaggcacctgagccaaggcgtccagtggtccttgcttctggctgtcctggtcttctttctcttcgccttgccctcttttattaaggagcctcaaacaaagccttccaggatggtatcaagggctccaggacatctgatgcggtgccaaggcatgggagtgggacgctgacccttcgctattgagtagctgctgaaacagccattgttcctgccccttggctctttcaggtccacctggcttatgtgcatcaacgcacagagaacattaaagaaaggtctctacagtccctggcaaagcctaagtcccaggcacccacaagggcaaggaggacaaccatctatgcagagccagtgccagagaacaatgccctcaacacacaaacccagcccaaggcccacaccaccggagacagaggaaaggaggccaaccaggcaccgccggaggagcaggacaaggtgccccacacagcacagagggcagcatggaagagcccagaaaaagagaaaaccatggtgaacacactgtcacccagagggcaagatgcagggatggcctctggcaggacagaggcacaatcatggaagagccaggacacaaagacgacccaaggaaatgggggccagaccaggaagctgacggcctccaggacggtgtcagagaagcaccagggcaaagcggcaaccacagccaagacgctcattcccaaaagtcagcacagaatgctggctcccacaggagcagtgtcaacaaggacgagacagaaaggagtgaccacagcagtcatcccacctaaggagaagaaacctcaggccaccccaccccctgcccctttccagagccccacgacgcagagaaaccaaagactgaaggccgccaacttcaaatctgagcctcggtgggattttgaggaaaaatacagcttcgaaataggaggccttcagacgacttgccctgactctgtgaagatcaaagcctccaagtcgctgtggctccagaaactctttctgcccaacctcactctcttcctggactccagacacttcaaccagagtgagtgggaccgcctggaacactttgcaccaccctttggcttcatggagctcaactactccttggtgcagaaggtcgtgacacgcttccctccagtgccccagcagcagctgctcctggccagcctccccgctgggagcctccggtgcatcacctgtgccgtggtgggcaacgggggcatcctgaacaactcccacatgggccaggagatagacagtcacgactacgtgttccgattgagcggagctctcattaaaggctacgaacaggatgtggggactcggacatccttctacggctttaccgccttctccctgacccagtcactccttatattgggcaatcggggtttcaagaacgtgcctcttgggaaggacgtccgctacttgcacttcctggaaggcacccgggactatgagtggctggaagcactgcttatgaatcagacggtgatgtcaaaaaaccttttctggttcaggcacagaccccaggaagcttttcgggaagccctgcacatggacaggtacctgttgctgcacccagactttctccgatacatgaagaacaggtttctgaggtctaagaccctggatggtgcccactggaggatataccgccccaccactggggccctcctgctgctcactgcccttcagctctgtgaccaggtgagtgcttatggcttcatcactgagggccatgagcgcttttctgatcactactatgatacatcatggaagcggctgatcttttacataaaccatgacttcaagctggagagagaagtctggaagcggctacacgatgaagggataatccggctgtaccagcgtcctggtcccggaactgccaaagccaagaactgaccggggccagggctgccatggtctccttgcctgctccaaggcacaggatacagtgggaatcttgagactctttggccatttcccatggctcagactaagctccaagcccttcaggagttccaagggaacacttgaaccatggacaagactctctcaagatggcaaatggctaattgaggttctgaagttcttcagtacattgctgtaggtcctgaggccagggatttttaattaaatggggtgatgggtggccaataccacaattcctgctgaaaaacactcttccagtccaaaagcttcttgatacagaaaaaagagcctggatttacagaaacatatagatctggtttgaattccagatcgagtttacagttgtgaaatcttgaaggtattacttaacttcactacagattgtctagaagacctttctaggagttatctgattctagaagggtctatacttgtccttgtctttaagctatttgacaactctacgtgttgtagaaaactgataataatacaaatgattgttgtccatggaaaggcaaataaattttctacagtgaaga

SEQ ID NO: 186517 - DNA, 567 bp, Homo sapiens
  Payload ID: 16726
  Gene Symbol: ST6GALNAC1
  Gene Name: ST6 (alpha-N-acetyl-neuraminyl-2,3-beta-galactosyl-1,3) -N-acetylgalactosaminide alpha-2,6-sialyltransferase 1
  ENST ID: ENST00000589813
  CDS Start-End: 23-166
ctctagaacccgacccaccaccatgaggtcctgcctgtggagatgcaggcacctgagccaaggcgtccagtggtccttgcttctggctgtcctggtcttctttctcttcgccttgccctcttttattaaggagcctcaaacaaagccttccaggttgaccttgtaagtcacactatatcatggacatctttccatgtcgggacatacaggtccactcccttctttcaacagttgcttagcattccacagggcatcaacgcacagagaacattaaagaaaggtctctacagtccctggcaaagcctaagtcccaggcacccacaagggcaaggaggacaaccatctatgcagagccagtgccagagaacaatgccctcaacacacaaacccagcccaaggcccacaccaccggagacagaggaaaggaggccaaccaggcaccgccggaggagcaggacaaggtgccccacacagcacagagggcagcatggaagagcccagaaaaagagaaaaccatggtgaacacactgtcacccagagggcaagatgcagggatggcctctggca

SEQ ID NO: 186518 - DNA, 667 bp, Homo sapiens
  Payload ID: 16726
  Gene Symbol: ST6GALNAC1
  Gene Name: ST6 (alpha-N-acetyl-neuraminyl-2,3-beta-galactosyl-1,3) -N-acetylgalactosaminide alpha-2,6-sialyltransferase 1
  ENST ID: ENST00000585633
  CDS Start-End: 1-179
acgtccgctacttgcacttcctggaaggcacccgggactatgagtggctggaagcactgcttatgaatcagacggcacagaccccaggaagcttttcgggaagccctgcacatggacaggtacctgttgctgcacccagactttctccgatacatgaagaacaggtttctgaggtctaagaccctggatggtgcccactggaggatataccgccccaccactggggccctcctgctgctcactgcccttcagctctgtgaccaggtgagtgcttatggcttcatcactgagggccatgagcgcttttctgatcactactatgatacatcatggaagcggctgatcttttacataaaccatgacttcaagctggagagagaagtctggaagcggctacacgatgaagggataatccggctgtaccagcgtcctggtcccggaactgccaaagccaagaactgaccggggccagggctgccatggtctccttgcctgctccaaggcacaggatacagtgggaatcttgagactctttggccatttcccatggctcagactaagctccaagcccttcaggagttccaagggaacacttgaaccatggacaagactctctcaagatggcaaatggctaattgaggttctgaagttcttcagtacattgctg

SEQ ID NO: 186519 - DNA, 458 bp, Homo sapiens
  Payload ID: 16726
  Gene Symbol: ST6GALNAC1
  Gene Name: ST6 (alpha-N-acetyl-neuraminyl-2,3-beta-galactosyl-1,3) -N-acetylgalactosaminide alpha-2,6-sialyltransferase 1
  ENST ID: ENST00000590784
  CDS Start-End: 1-458
gggagcctccggtgcatcacctgtgccgtggtgggcaacgggggcatcctgaacaactcccacatgggccaggagatagacagtcacgactacgtgttccgattgagcggagctctcattaaaggctacgaacaggatgtggggactcggacatccttctacggctttaccgccttctccctgacccagtcactccttatattgggcaatcggggtttcaagaacgtgcctcttgggaaggacgtccgctacttgcacttcctggaaggcacccgggactatgagtggctggaagcactgcttatgaatcagacggtgatgtcaaaaaaccttttctggttcaggcacagaccccaggaagcttttcgggaagccctgcacatggacaggtttctgaggtctaagaccctggatggtgcccactggaggatataccgccccaccactggggccctcct

SEQ ID NO: 186520 - DNA, 419 bp, Homo sapiens
  Payload ID: 16726
  Gene Symbol: ST6GALNAC1
  Gene Name: ST6 (alpha-N-acetyl-neuraminyl-2,3-beta-galactosyl-1,3) -N-acetylgalactosaminide alpha-2,6-sialyltransferase 1
  ENST ID: ENST00000589992
  CDS Start-End: 23-214
ctctagaacccgacccaccaccatgaggtcctgcctgtggagatgcaggcacctgagccaaggcgtccagtggtccttgcttctggctgtcctggtcttctttctcttcgccttgccctcttttattaaggagcctcaaacaaagccttccaggatggtatcaagggctccaggacatctgatgcggtgccaaggcatgggagtgggacgctgacccttcgctattgagtagctgctgaaacagccattgttcctgccccttggctctttcaggtccacctggcttatgtgtgagagactttttttgggttttttttgttctgtttttttgaaaagccagtaccaaaagcttacataattgtatgattgcattcaaataacattcttgaaatgataaaattataaaaatacagaacaga

SEQ ID NO: 186521 - DNA, 2170 bp, Homo sapiens
  Payload ID: 16727
  Gene Symbol: ST6GALNAC2
  Gene Name: ST6 (alpha-N-acetyl-neuraminyl-2,3-beta-galactosyl-1,3) -N-acetylgalactosaminide alpha-2,6-sialyltransferase 2
  Uniprot ID: Q9UJ37
  ENST ID: ENST00000225276
  CDS Start-End: 321-1445
ctggagagagcgcagtggcaggagtggccgctgccgaagtcccccgggcagggggcagggccaaaggagcgcgcgctctgggcgccgggacgacactccagccccgggggacccgccgcccagctcccgagggtgcggcagcctctggccactcagccggggccgagagggagctgccgggcgggcaggcgccgcaggcacccggcgggcagggcggggcagggcaagacggccgcctccgcaagtgccacccggcccacccggttctctcccttctgcctgggacgtcagcggacggggcgctcgcgggccggggctgtatggggctcccgcgcgggtcgttcttctggctgctgctcctgctcacggctgcctgctcggggctcctctttgccctgtacttctcggcggtgcagcggtacccggggccagcggccggagccagggacaccacatcatttgaagcattctttcaatccaaggcatcgaattcttggacaggaaagggccaggcctgccgacacctgcttcacctggccattcagcggcacccccacttccgtggcctgttcaatctctccattccagtgctgctgtggggggacctcttcaccccagcgctctgggaccgcctgagccaacacaaagccccgtatggctggcgggggctctctcaccaagtcatcgcctccaccctgagccttctgaacggctcagagagtgccaagctgtttgccccgcccagggacacccctccaaagtgtatccggtgtgccgtggtgggcaacggaggcattctgaatgggtcccgccagggtcccaacatcgatgcccatgactatgtattcagactcaatggagctgtgatcaaaggcttcgagcgcgatgtgggcaccaagacttccttctatggtttcactgtgaacacgatgaagaactccctcgtctcctactggaatctgggcttcacctccgtgccacaaggacaggacctgcagtatatcttcatcccctcagacatccgcgactatgtgatgctgagatcggccattctgggcgtgcctgtccctgagggcctagataaaggggacaggccgcacgcctattttggaccagaagcctctgccagtaaattcaagctgctacatccggacttcatcagctacctgacagaaaggttcttgaaatcaaagttgattaacacacattttggagacctatatatgcctagtaccggggctctcatgctgctgacagctttgcatacctgtgaccaggtcagtgcctatggattcatcacaagcaactactggaaattttccgaccactatttcgaacgaaaaatgaagccattgatattttatgcaaaccacgatctgtccctggaagctgccctgtggagggacctgcacaaggccggcatccttcagctgtaccagcgctgaccccaatgcactgagccctttgcttcttcaagagttgcggccctgatcctctcaagtggccaaaagcttttttaacttttcaatcttcaccttcccttgccaacagagggcactggggtgaattcaagattttcatcgaggtctgttcaatataggacaccccagcttgtccttggctcatccaagaactcttctgtatctaaaacaatacatctcaatcttggccaagggaaaatggactgctttgctggattggcactgagcaactttaggaaatgtcggtggagtgttcagcaagatcagacagcagtccaggtcaaaggcaaacacacacgctccagcccaaatcctcctggtggcacatcctaccccagatgctaaagtgattcaaggactccaggacacctcttaagagcctttctaagaacatgataggcttacttctgctccataataaagtgggagaaaaaagccagaatataacttaagactagataactgcgtacatgatggaccatttttttttttttggctgggtagagaaatcatataaaacgcaggctgtttagcatggagatgactctcagaacactgggagggtctggcacttgatgggggttagttgcttggcagcctgcctgccactgagggaagtcccattagagatgtatcaccaccttgtcaccaacaggatgatgtcaccaggtaataaaccttcatcctca

SEQ ID NO: 186522 - DNA, 536 bp, Homo sapiens
  Payload ID: 16727
  Gene Symbol: ST6GALNAC2
  Gene Name: ST6 (alpha-N-acetyl-neuraminyl-2,3-beta-galactosyl-1,3) -N-acetylgalactosaminide alpha-2,6-sialyltransferase 2
  ENST ID: ENST00000585390
  CDS Start-End: 1-115
cgactatgtgatgctgagatcggccattctgggcgtgcctgtccctgagggcctagataaaggggacagccccgctcctaccgctcagggtaccgcggctactccggcgccctgaccctcccctccatctcccccttgcaatacgacggctctgggcgctctgtccacttctatcatgggtcctaggccgcacgcctattttggaccagaagcctctgccagtaaattcaagctgctacatccggacttcatcagctacctgacagaaaggttcttgaaatcaaagttgattaacacacattttggagacctatatatgcctagtaccggggctctcatgctgctgacagctttgcatacctgtgaccaggtcagtgcctatggattcatcacaagcaactactggaaattttccgaccactatttcgaacgaaaaatgaagccattgatattttatgcaaaccacgatctgtccctggaagctgccctgtggagggacctgcacaaggccggcatccttcagctgtaccagcgct

SEQ ID NO: 186523 - DNA, 746 bp, Homo sapiens
  Payload ID: 16727
  Gene Symbol: ST6GALNAC2
  Gene Name: ST6 (alpha-N-acetyl-neuraminyl-2,3-beta-galactosyl-1,3) -N-acetylgalactosaminide alpha-2,6-sialyltransferase 2
  ENST ID: ENST00000588120
  CDS Start-End: 49-303
cttctgcctgggacgtcagcggacggggcgctcgcgggccggggctgtatggggctcccgcgcgggtcgttcttctggctgctgctcctgctcacggctgcctgctcggggctcctctttgccctgtacttctcggcggtgcagcggtacccggggccagcggccggagccagggccaggcctgccgacacctgcttcacctggccattcagcggcacccccacttccgtggcctgttcaatctctccattccagtgctgctgtggggggacctcttcaccccagcgctctgggaccgcctgagccaacacaaagccccgtatggctggcgggggctctctcaccaagtcatcgcctccaccctgagccttctgaacggctcagagagtgccaagctgtttgccccgcccagggacacccctccaaagtgtatccggtgtgccgtggtgggcaacggaggcattctgaatgggtcccgccagggtcccaacatcgatgcccatgactatgtattcagactcaatggagctgtgatcaaaggcttcgagcgcgatgtgggcaccaagacttccttctatggtttcactgtgaacacgatgaagaactccctcgtctcctactggaatctgggcttcacctccgtgccacaaggacaggacctgcagtatatcttcatcccctcagacatccgcgactatgtgatgctgagatcggccattctgggcgtgcctgtccctgagggccta

SEQ ID NO: 186524 - DNA, 687 bp, Homo sapiens
  Payload ID: 16727
  Gene Symbol: ST6GALNAC2
  Gene Name: ST6 (alpha-N-acetyl-neuraminyl-2,3-beta-galactosyl-1,3) -N-acetylgalactosaminide alpha-2,6-sialyltransferase 2
  ENST ID: ENST00000585736
  CDS Start-End: 223-447
cagccccgggggacccgccgcccagctcccgagggtgcggcagcctctggccactcagccggggccgagagggagctgccgggcgggcaggcgccgcaggcacccggcgggcagggcggggcagggcaagacggccgcctccgcaagtgccacccggcccacccggttctctcccttctgcctgggacgtcagcggacggggcgctcgcgggccggggctgtatggggctcccgcgcgggtcgttcttctggctgctgctcctgctcacggctgcctgctcggggctcctctttgccctgtacttctcggcggtgcagcggtacccggggccagcggccggagccagctgccaacccagagtcccctccacctgtggctgctggggtgaagggaggggtctgagagaagcctggccaccttttgaaaggggacaccacatcatttgaagcattctttcaatccaaggcatcgaattcttggacaggaaagggccaggcctgccgacacctgcttcacctggccattcagcggcacccccacttccgtggcctgttcaatctctccattccagtgctgctgtggggggacctcttcaccccagcgctctgggaccgcctgagccaacacaaagccccgtatggctggcgggggctctctcaccaagtcatcgcctccaccctgagcct

SEQ ID NO: 186525 - DNA, 637 bp, Homo sapiens
  Payload ID: 16727
  Gene Symbol: ST6GALNAC2
  Gene Name: ST6 (alpha-N-acetyl-neuraminyl-2,3-beta-galactosyl-1,3) -N-acetylgalactosaminide alpha-2,6-sialyltransferase 2
  ENST ID: ENST00000588920
  CDS Start-End: 1-637
ctgagccttctgaacggctcagagagtgccaagctgtttgccccgcccagggacacccctccaaagtgtatccggtgtgccgtggtgggcaacggaggcattctgaatgggtcccgccagggtcccaacatcgatgcccatgactatgtattcagactcaatggagctgtgatcaaaggcttcgagcgcgatgtgggcaccaagacttccttctatggtttcactgtgaacacgatgaagaactccctcgtctcctactggaatctgggcttcacctccgtgccacaaggacaggacctgcagtatatcttcatcccctcagacatccgcgactatgtgatgctgagatcggccattctgggcgtgcctgtccctgagggcctagataaaggggacaggttcttgaaatcaaagttgattaacacacattttggagacctatatatgcctagtaccggggctctcatgctgctgacagctttgcatacctgtgaccaggtcagtgcctatggattcatcacaagcaactactggaaattttccgaccactatttcgaacgaaaaatgaagccattgatattttatgcaaaccacgatctgtccctggaagctgccctgtggagggacctgcacaagg

SEQ ID NO: 186526 - DNA, 5654 bp, Homo sapiens
  Payload ID: 16727
  Gene Symbol: ST6GALNAC2
  Gene Name: ST6 (alpha-N-acetyl-neuraminyl-2,3-beta-galactosyl-1,3) -N-acetylgalactosaminide alpha-2,6-sialyltransferase 2
  ENST ID: ENST00000589997
  CDS Start-End: 897-1748
ggtgtggggcgtggcagaggggcaagggacactgtggttatctcctttttgctcccagggcccatcatggggtaagaggaggtgggtgaagggcagtaagaacagccctaagaattcaatcatccccaattattcacataacagcactgggaaattctactttttgtctacccctggaaagcccaggtgaccctccgggttcccagtagccctctgggggcagtgggctgggggtgggagaggcagctcttctgaatggggtgagcaggtctggcttctcggctttgggctgcactctccctgcccagcccagccgccagcggctccgggtcacagactgggctgggtccgctgtcccactgagcacactgtgctggaaacaagagttggggccagtctgggccactcctcctgctgggcatccttcccagggtcatgcccatgaaacgggagagcagactcgaggcccagtgtcctgagaggcggaaacaatgggccctttgtcttctttcccaccttcctgcacagcaggcctgggtccagctctcttgagccacgacctgaccctcatctgaacctcctcccgggggttctgagacaatttcttgtccctgagatcaggtccctaaaaatcgacgccactgctgtggcccagacaaccagccctcctatctcggcgtctcgctgaggacatcttccccaccccccacagagcagctttacaggtggtccttatgggttaagggttctaaagccaggcccaccccacccccgcttggtgattacccaacaattgcttccactgctggtctgagctgggctttgtgacacgctgggcttgggcccttaggggctgcctcagagacatcgggtggacctaagcctccccaacaccaatgagctccccttcccacacccctaatccatcccctacccagtctccctcccagtcccgttccaacaacattgtcacccctccaggccagcagcctgccccttccccctcccccactcggggctcttcctcccggcccccctcccaccctcccaccccaaatgcctcacagccctcttcccggacttcgtccctgaaccccagtcctcaggtccaacacgtgccccgcggggctgcccaaacccccaccccacccacctccaaatctccctcccagtctggtttcaaatccctctctcgaaacccttccctaacccccgctgtgccccccaagtcctccttctacagccctgccacctcatcttcctatatcgggccaattcagaacatcccgtcctatatcaccccctatgtgccccgctttctgaaggagcccccctttttccagccccccacagcaccacttccccaaaacccatgctttgcctgtccctctccctgccctgcccggaagcccccaccccctcctgactcactctacttacctctccttcccccgcccccccaccacccccagtttaactgccccttcccaactccccccggtctgttcatgcccccctcctctctctcctacaccccgcccgtggaggtcctggtgagcgggaagccgcacgtggtccccaacgtactgcctgccaccttctacacccccttctcccgctactactcccagccccgctcctaccgctcagggtaccgcggctactccggcgccctgaccctcccctccatctcccccttgcaatacgacggctctgggcgctctgtccacttctatcatgggtcctaggccgcacgcctattttggaccagaagcctctgccagtaaattcaagctgctacatccggacttcatcagctacctgacagaaaggtacggagtggggtgcctgaagaacagcgtccccttccttcccccttttacacacccacccacatccagtcagcgccctcgcacgagccccacgcactgaccgataaccagagctccactgtcccgagtgctgtgtgcaaagcactgtcacttcatttactgttttatttagcaccttgatagagggagggtgatatatgtcagtcaccaggaaatggacaggaaactcaggataactcaaggaggtttatacaaaggcacagactgggagctgggaccataaggtgcacagcagcagtggcgccgtcagcagcagggcatcagaaccttcaggcccaaacacagccaacacaaggtgccggaaggaacccggggaccagcctcaacccccttccctccctcctgccaggggttctcaatgtggatgtgcatatggtcctcgtctggggttgtcacaagggtggtggcggcaagtgccatcagtgggtagaggccagggatgctgctgaacatcacaagaagcacctggccccaagtgtcaacagcactgagactgagaaaccctgctgtggaccagaggctcgaatcccagggcagggagcagttggagaggggtgtgtggatgtggggaggcaaatgaagcccctctaattagtcccgtgctacagaggaagacaggctctgagaggtcaggtgatcggcctggcacagctcgatgtgaactcaggcctgagggcagagcccgtggtcacaccctggcctcactcttggactgtgtgggtccggtcacagggtctgagctccctgtccctcacacgtgattcctacttaatcaagatgtggagtagagagaaactgcagtctcaggctaaataaacaggccacctatgcccttggcagtgtggttacttagtagcttggggtgaaaacaagctgttgccaaaagggggaacctgtggttcctttctcaccaccccctcccccaaccttacctaaggtctcaaagatctttgtatttagtccacttggaccgaataaagaactgactggagtagaaggccctcagtttttgaagttttcccacctatttgaatgtgtagttgtgaagtgtgatgatagccatcaagctagtgagctgaaatgtctctttttgcttccaggttcttgaaatcaaagttgattaacacacattttggagacctatatatgcctagtaccggggctctcatgctgctgacagctttgcatacctgtgaccaggtcagtgcctatggattcatcacaagcaactactggaaattttccgaccactatttcgaacgaaaaatgaagccattgatattttatgcaaaccacgatctgtccctggaagctgccctgtggagggacctgcacaaggccggcatccttcagctgtaccagcgctgaccccaatgcactgagccctttgcttcttcaagagttgcggccctgatcctctcaagtggccaaaagcttttttaacttttcaatcttcaccttcccttgccaacagagggcactggggtgaattcaagattttcatcgaggtctgttcaatataggacaccccagcttgtccttggctcatccaagaactcttctgtatctaaaacaatacatctcaatcttggccaagggaaaatggactgctttgctggattggcactgagcaactttaggaaatgtcggtggagtgttcagcaagatcagacagcagtccaggtcaaaggcaaacacacacgctccagcccaaatcctcctggtggcacatcctaccccagatgctaaagtgattcaaggactccaggacacctcttaagagcctttctaagaacatgataggcttacttctgctccataataaagtgggagaaaaaagccagaatataacttaagactagataactgcgtacatgatggaccatttttttttttttggctgggtagagaaatcatataaaacgcaggctgtttagcatggagatgactctcagaacactgggagggtctggcacttgatgggggttagttgcttggcagcctgcctgccactgagggaagtcccattagagatgtatcaccaccttgtcaccaacaggatgatgtcaccaggtaataaaccttcatcctcatatcatggcgtcagtaaatttgaactcagctgacggtagtttcccaagtttattgtaagtggttttaagttaagtctcatccaaacaagttatcacacagcacttaaccaagccctgggatttactgtcttgatgactacacggctttgcacagtctgagatgcttcagtgtgcaaggcagcagctgggggggaggaggggggtcttcacagggacagctggcaagagacttcctgaggcacatcagttacgttggtcaatttagggcacggtctggttctgcagctttgaaaggtggattctttctattagcacactttacaagagggattgtaaaggattaactcagtcaccagaaacgaaacaccacttcagaaattcagagacctctgatcaacagaacagacatttgggctttaactgctaaagcagctacctacttggggaaaccatggcattctgctgcctggacagcaggaattaagagagatttcagagttactggcacgaggacaaagcctctcagctcgcttcaccttggcaaccttaaacagtccctccttggtctctatgatagcagtatgttcctttggatggaatacttggtttggaaataatgtagtcaaatgtaggatatgtaagtactcctcaacagtcacaatccatcctagtatcttaaatagtgattttttttttttaatttacaaaagaggtttattggacttacagttctacatggctgggaaggcctcacaatcatggcggaaggtgaaagccacatctcacatggcagcagataagagaaaaaaaggtagtgatcttttagtaaagaaacctgagactggtagtgggcttggagccagaggatcgcttaagtccgggagttcgagaccagccagggtaacaaattgagacccccccccaactttaaaattaaaaaacgaaagaaaaaatagctgggtgtggtggctcacacctgtaatcctagcactttgggaggccaaggcgggtggattgcctgagctcaggagtttgagaccaacctgggcaacatggttgaaaccctgtctctactaaaacaaaaaaaatcagccaggtgtggtagcgtgcacctgtagtcccagttacttgggaggctgaggcacaagaattgcttgaacctgggaggtagaggttgcagagatcatgccactgcactcccagcctgggtgacagagcaagactgtctcaaaaacaacaacaacaacaacaacaaaacaaaacaaaaaaaacctctcaaaaaaatgaaaaaaaatttaaatttaaattaaaaaaaaaaatgctgggtctgatggctcacacctgtcatctcagcactttgggaagctgaggcaggcagatcacaaggtcaggagatagagaccatcctggccaacatggtgaaacccagtctctactaaagaaggtacgcgcctgtagtcccagcactcaggaggctgagccaggagaattgcttgaacccgggaggtggaggttgcagtgagccaagattgtaccacttcactccagcctggcgacagagtggaactccgtctcaaaaaataaaataaaataaaataaaataaaataaaataaaataaaataaagcaaaaatataaaatgttaaaaaaaaaacaaaaaaagggaaaaa

SEQ ID NO: 186527 - DNA, 6861 bp, Homo sapiens
  Payload ID: 16728
  Gene Symbol: ST6GALNAC3
  Gene Name: ST6 (alpha-N-acetyl-neuraminyl-2,3-beta-galactosyl-1,3) -N-acetylgalactosaminide alpha-2,6-sialyltransferase 3
  Uniprot ID: Q8NDV1
  ENST ID: ENST00000328299
  CDS Start-End: 149-1066
gcagcttacaccgcggtccccttatttggatctgcgggaatgtgggctggagaggtcctgccgtggtaccagcctccagcctgcccccaggactgcccctgacccaggcgcgcccgctgctcggtggcaggagggccggcggagcgccatggcctgcatcctgaagagaaagtctgtgattgctgtgagcttcatagcagcgttccttttcctgctggttgtgcgtcttgtaaatgaagtgaatttcccattgctactaaactgctttggacaacctggtacaaagtggataccattctcctacacatacaggcggccccttcgaactcactatggatacataaatgtgaagacacaagagcctttgcaactggactgtgacctttgtgccatagtgtcaaactcaggtcagatggttggccagaaggtgggaaatgagatagatcgatcctcctgcatttggagaatgaacaatgcccccaccaaaggttatgaagaagatgtcggccgcatgaccatgattcgagttgtgtcccataccagcgttcctcttttgctaaaaaaccctgattattttttcaaggaagcgaatactactatttatgttatttggggacctttccgcaatatgaggaaagatggcaatggcatcgtttacaacatgttgaaaaagacagttggtatctatccgaatgcccaaatatacgtgaccacagagaagcgcatgagttactgtgatggagtttttaagaaggaaactgggaaggacagagtccagtctggctcatatctcagcacagggtggtttaccttccttctggccatggacgcctgttatggcattcacgtctacgggatgataaatgacacctactgcaagacagaagggtatagaaaagtcccctaccattattatgaacaaggaagagatgagtgtgatgaatattttcttcatgaacatgccccatatgggggtcataggtttatcactgaaaagaaagtgtttgctaaatgggccaagaagcacaggataatatttacacatccaaactggacattgtcttgataatggttttcctgatcttgccgcatcacttaatgtgatccccatactgcaactgtgatgctgatgatgctaatggagatgatggtaatgataaagacaacaacaatgattatcaagttcctgtacactctcagatgtggatggtgactctgctagtaatttaaacttggcatttcatggaggatggttgtgctcatgatgttctttctggaggttcaacactacgtaccgcactttataatttaactggaattgagatgaaggccagtgacatgacaactgtgacctaagaaatgggaagattatctttcaagatagctgcctagaattgttcaacagtgagtaacttccagaagccaaaagagtttggcttcatgaggcaaggtgattgactcaatggcttgttgaatctcagcagttccgccatcttgaagaatgattgattgtcaaacactgacccaagaactgctatcagggtgcaagtatcttactacttagcctaaggatgggaaaatatctcttcctaatataccatctttctacagtatttcctacagctaaagcctcaggccattgcctaattaacaatgaagatttcatggacatcctacacttcaggattacttgactatctcaaacacataaatcaaaatgggccaagtagcaaatcttgatgaatttccactcttaccatccattcttactaccaacagtataactgaacatgtgattagaatgatctatattaatgtttagttatttttggttgagtgctaaatatttcagaaggctacttaacatgtaagataccaacttcaacactgtaataacatatactgtgaaaacattcctaaaaagtaaccaaagggtttgctaactctgcttcaacatccaacaacacaaaactatatgatttttaaaatcatgaaatagagacagcaaagcatatttttacatcaatttgtatcctatcatacttcataatatatatttgtatattcaaatttctattttataggcccaaggtgtgtttctccaaacattacattctcattgccaagtgccagctgttacacatggagaggaaatgattccttatattaaacctgaccagagctttttgccttctagggatttatttttcccatagtgtatcagttgttatgccacaataacaacaataataatgttcttaatgtccaaagtgctttgtcatttagagtcctttaacatctgttataccatgtgatgcccttgaacaccccattgggctattgtctgtgtattctgctctctttagcagatgatctgtaatttggtcattgttctgttatattccagattgctctacttgctaatatttgtatagaatagaatttatgtaaactagtaaccagttgatctctgtgccaaatacattatatcaggattacacaaaaagtatcacaaaggatggtcttggccatatgctagggcccctgtgaaaataagtagttttgagaagtttttctatatacgtatatatacacgtgtggttctatttaggtggggaaaaaatgaaaaagcagggacaacaggaggaaatgaaggcagagaaatatagtttcctttcctaggattgagacaattctatttttcatatactcgttgctcattaaatagtaaagggttgatttgctgcaagagtagctgagaattcaaaaacatccttgcagaatgattcaaaagacaaaagccaggctcaacttatagaatgttttggaaactggaagtaatgatacatttcacttcagaagcacttgtaggtctttactagtgctaagtattatggtgagctatcattaaagtgtgccatcttggataaaggccttttgcctactctcttctgcaattttgacacctcaatattcacacccataaacattactaagccccagttctatcgttggaaggagttgttattcttttgttgttcccttatgcaatttttaattctatgaatgttaagtttttttgagctaatgatagatagaaatgcccactcaaagaaaaataaacagagacaaatgttaaaattgccatacagactgtttttccccctgttgtttcactttaaaataaaaagaaatccttgattaatcagaatggcttgggacatgaacttaatttatttagttttctaataaatgaagggccaactcttatttgttctagcccctactgatgagaaacatttgaaaacttgcttgctctcctgcctcgttgtagctttctctgatgaagacttctgcagtatattgtatccctcactctatagcagaaggtgtgtgtggaatatgtagactccagtgttttcttaggaggggtgggaaagggctttctttcctctcctctcctctcgtctcctctttctttcctttctttttgcaactaaactgctactctacactttttattgttgttttctttgtctttttctttctacaaacaggaaacaaaaaaaaaaaaaaacaagtttttctcaatttggagactcaattgaataatttccagtataatcagcattttgatagaatctcacaacttatttttctctgcttttatttcctgtttttctttgttccatctttctaattctagtgaaaatgcaaagtctaatttctcccatgttgagaataaatttttcatctatgatttgctgatagagaagagcttggtaagggagcaattcaaggaaactattttgccatgcacatttctgatcaattcccacagattctggtcaaatgaaagatattctatccaacatttaaacattgaaaaatttaactgaacttacttatcactgatgtgtatttatcccagaaattaattaatatctgtgaaaaataaaaatatttcaatactatccgtgcttcttggaaaatgaactataaaaaagggtcacaatttttctgaaattggcatgaaaacattcaagataaaaataatagactaaacattattttctgttatgcataattctatgaaaaagcaaggtaatttaaaaagagttttaaaatgtgtgtttgaatcttttccaatttaaccaagtgagaagtagcaatgatttacattgttatgatgataatgtgaataagaaaccttttagagtatatgattttacattgctatcaaacctatcaaagaaaaggcaattggaatttggaggaatgtttgtatatatgcacatagagtctatttgtgtgtgtgtgaacgcacatatatatacatctatatacttataactatatataaaagcatatatataatcctatattcttcactggtgcatgtgaatcacagaaagccctattttagacttcatctgaaattcgttgggttacattttgaatcctgatgaaaaaagcaaaaatccaaattaaatggactgattgctaagagtacgtaaaatcatattcaaaagctggccagaagaataaagctagagaagctgctaaatctagaaaacacaatcagatgccacagttgtcacaaatcagacttgtaagtatagcaatctgtattgtaggttctgccgattgcaggcttagctaaagtcacattgaaaaacattgcatcaagcttcattcacactgaagtaaatgaacattggtcctcctattcaaataagccagtctttagcataagcaaaatccagatttgcatgatttttattatatagctacagaactgtgaccactgtgaaaaaggaaaattatacaaggagattgctcttggaggatttggtatgaatcagctgaggtaggaacaagagtctgaattggggacctgctgaccttccaagaagtagaaggccatcagaagaaaatcactgttacttagagaagagacaacactaaagtacttcacctggtagtgttaattggatgttaattatgagctcggtttaatttcaataagcaagaaaatataatcagatgactgatttaaaaaaaaacaacaacaatgtgcccatctagcctttaatgtgacatgtcaaatgcaaataataaattatgttattcagtatcagttgtttgcatgtcttagcacaacaaaggatttacagtctgagggccaagagagaaaaaatgcttttttcttaaaacagcatatttaaaagacaagacctcatcatttcagtagtgtacatagattagtgactgaaggagccagtgctagcctttttaagtaggtcaggcttttagagctgaaagagattttaaagaccagccaattcaactcctacaccttggagctgaggaaacagacagaggtgaagtgacttgcctgtagttataaactggactaatggcagtactgagactcaaattcttgtctcatgttttcttctctagtgctttttccactacactttttagacagaagagtagctggaaaaagaatgcctaactgatttactaaagagtctattcatggaatccaagggctccaaattgtgctaattctgctcaggatgaaacaaatccccacgctgaagtggagaaatattttcataattgaaggaacatatcccattgattgtctacactttcttctctctgtttgttgctattggtaaggctaggctatgttctgttatcacaaaattctaggacttgtttaaagaacttaaaggtcagtttcttagtttctctttgtgattgaggatgagcaagccattgatacaccaagagctgctgagtgttggaggttgcctggtgaaactggcaggccctgttgttgacatttccccagagctaaaatgtcctcatactcaaaccaactgtgctgcccaagttagtgaaattatccatcagcactaacaccaccctttgggttcatgctcatccctgcactccatgtgacctttgagcccagatacccttctagaaggtgaatgaaagccccacatgtcccgcaagacttagtctgcataaaagatttaaaaggatttttttttctctacagtccatttatatgatactgttagaagtgaagaattttgaaactacatacactggcctctgaaaatggttcttgtggctcagaaatagtatattgttctgttgcttgtttttgctgaactgtagagaaaacaccagagtaaaattccatgtaaattgctaaggcatcgaatcagaactgtccttgggcgttgtaacagtgcagaaaatctcatttagtttttttctttttttttttcagttaactacttgtttgtttcttttcagaataggcacttttttttgagtagaaaacctcttctttctccacagatacatctctttttgttcacgccttgaagacttcagaaaaatagaagctcacttccttccataaaggtgaagaacatcttgatgaataaacagtcaactaccaagttcacatatttgcctatgaagtgagagctatttctaagaaacttcaaaaagatcaaaacgaggcaattttatagctttttgttacctaatctacaaagtactaatttccttgtgtttagctttgttgtcactgttactgagtaaatacccatttctgttacatatggtacattttttgcttcacttattttcctgagttcccatgattttttttctgtagtttctcattcattttaaaacccataatcttcatctatttttagaagaaagtgtaaatgcacagttgtacgtttgttgagagtttttatggcattatagtgctttatttataagcattgtgtcttagaataaagcttacaaaatggcaaa

SEQ ID NO: 186528 - DNA, 617 bp, Homo sapiens
  Payload ID: 16728
  Gene Symbol: ST6GALNAC3
  Gene Name: ST6 (alpha-N-acetyl-neuraminyl-2,3-beta-galactosyl-1,3) -N-acetylgalactosaminide alpha-2,6-sialyltransferase 3
  ENST ID: ENST00000621530
  CDS Start-End: 201-617
tgtagagaaagtctgtgattgctgtgagcttcatagcagcgttccttttcctgctggttgtgcgtcttgtaaatgaagtgaatttcccattgctactaaactgctttggacaacctggtacaaagtggataccattctcctacacatacaggcggccccttcgaactcactatggatacataaatgtgaagacacaagagcctttgcaactggactgtgacctttgtgccatagtgtcaaactcaggtcagatggttggccagaaggtgggaaatgagatagatcgatcctcctgcatttggagaatgaacaatgcccccaccaaaggttatgaagaagatgtcggccgcatgaccatgattcgagttgtgtcccataccagcgttcctcttttgctaaaaaaccctgattattttttcaaggaagcgaatactactatttatgttatttggggacctttccgcaatatgaggaaagatggcaatggcatcgtttacaacatgttgaaaaagacagttggtatctatccgaatgcccaaatatacgtgaccacagagaagcgcatgagttactgtgatggagtttttaagaaggaaactgggaaggacagaaatgag

SEQ ID NO: 186529 - DNA, 1691 bp, Homo sapiens
  Payload ID: 16729
  Gene Symbol: ST6GALNAC4
  Gene Name: ST6 (alpha-N-acetyl-neuraminyl-2,3-beta-galactosyl-1,3) -N-acetylgalactosaminide alpha-2,6-sialyltransferase 4
  Uniprot ID: Q9H4F1
  ENST ID: ENST00000335791
  CDS Start-End: 277-1185
gcgcggatcagcttccagcccagtcggcccggcccgggggccatggagctccgagcggcggatcgcgagcctcctgcgaaccccagcctgcacgcccggttagcattcggccgggagatgcggcagtggaatctggaagggcggtgaaaaacctacgtcctgccctcgcccggcctctccattcgtcccccgggtagagaggtgcccggctcccaccccttcccagccccagccctggagacagcagcccctagactactgagggacagcgacagcatgaaggctccgggtcggctcgtgctcatcatcctgtgctccgtggtcttctctgccgtctacatcctcctgtgctgctgggccggcctgcccctctgcctggccacctgcctggaccaccacttccccacaggctccaggcccactgtgccgggacccctgcacttcagtggatatagcagtgtgccagatgggaagccgctggtccgcgagccctgccgcagctgtgccgtggtgtccagctccggccaaatgctgggctcaggcctgggtgctgagatcgacagtgccgagtgcgtgttccgcatgaaccaggcgcccaccgtgggctttgaggcggatgtgggccagcgcagcaccctgcgtgtcgtctcacacacaagcgtgccgctgctgctgcgcaactattcacactacttccagaaggcccgagacacgctctacatggtgtggggccagggcaggcacatggaccgggtgctcggcggccgcacctaccgcacgctgctgcagctcaccaggatgtaccccggcctgcaggtgtacaccttcacggagcgcatgatggcctactgcgaccagatcttccaggacgagacgggcaagaaccggaggcagtcgggctccttcctcagcaccggctggttcaccatgatcctcgcgctggagctgtgtgaggagatcgtggtctatgggatggtcagcgacagctactgcagggagaagagccacccctcagtgccttaccactactttgagaagggccggctagatgagtgtcagatgtacctggcacacgagcaggcgccccgaagcgcccaccgcttcatcactgagaaggcggtcttctcccgctgggccaagaagaggcccatcgtgttcgcccatccgtcctggaggactgagtagcttccgtcgtcctgccagtcgccatgccgttgcgaggcctccgggatgtcccatcccaagccatcacactccacaaaaacatttaatttatggatcctgcctcctgccacgtgctgggtggacctaaggttccttcccgccccattctggcgacacttggagccatctcaggcctcatgacttgaaggggagtggaggggggagccgtgtctcccccctccactccctgagtaattcacggcatttgggggctcaccccacctccaggtctgtcaagtggcctttgtccctggggctgatggcccccaactcaccagcatcatgaccttgtgccagtcctggtcctccctccccagccgctcctaccaccttttggtgccacacttctcaggctggccgccctggttggggcagccgagagcctggggttcattggtgaaggggccttggagttgtgactgccggggccgtatcaggaacgtacgggtaaacgtgtgttttctgga

SEQ ID NO: 186530 - DNA, 1013 bp, Homo sapiens
  Payload ID: 16729
  Gene Symbol: ST6GALNAC4
  Gene Name: ST6 (alpha-N-acetyl-neuraminyl-2,3-beta-galactosyl-1,3) -N-acetylgalactosaminide alpha-2,6-sialyltransferase 4
  ENST ID: ENST00000361444
  CDS Start-End: 412-1013
ggcccgggggccatggagctccgagcggcggatcgcgagcctcctgcgaaccccagcctgcacgcccggttagcattcggccgggagatgcggcagtggaatctggaagggcggtgaaaaacctacgtcctgccctcgcccggcctctccattcgtcccccgggtagagagggtcggctcgtgctcatcatcctgtgctccgtggtcttctctgccgtctacatcctcctgtgctgctgggccggcctgcccctctgcctggccacctgcctggaccaccacttccccacaggctccaggcccactgtgccgggacccctgcacttcagtggatatagcagtgtgccagatgggaagccgctggtccgcgagccctgccgcagctgtgccgtggtgtccagctccggccaaatgctgggctcaggcctgggtgctgagatcgacagtgccgagtgcgtgttccgcatgaaccaggcgcccaccgtgggctttgaggcggatgtgggccagcgcagcaccctgcgtgtcgtctcacacacaagcgtgccgctgctgctgcgcaactattcacactacttccagaaggcccgagacacgctctacatggtgtggggccagggcaggcacatggaccgggtgctcggcggccgcacctaccgcacgctgctgcagctcaccaggatgtaccccggcctgcaggtgtacaccttcacggagcgcatgatggcctactgcgaccagatcttccaggacgagacgggcaagaaccggaggcagtcgggctccttcctcagcaccggctggttcaccatgatcctcgcgctggagctgtgtgaggagatcgtggtctatgggatggtcagcgacagctactgcagggagaagagccacccctcagtgccttaccactactttgagaagggccggctagatgagtgtcagatgtacctggcacacgagcaggcgccccgaagcgcccaccgcttcatcactgagaaggcggtcttctcccg

SEQ ID NO: 186531 - DNA, 3751 bp, Homo sapiens
  Payload ID: 16730
  Gene Symbol: ST6GALNAC5
  Gene Name: ST6 (alpha-N-acetyl-neuraminyl-2,3-beta-galactosyl-1,3) -N-acetylgalactosaminide alpha-2,6-sialyltransferase 5
  Uniprot ID: Q9BVH7
  ENST ID: ENST00000477717
  CDS Start-End: 236-1246
agttgtgtagatcgctgagagactacgagggtccggttcagttttaattctgtctctaatctctgcaacagccgcgcttcccgggtcccgcggctcccgcgcgcgatctgccgcggccggctgctgggcaaaaatcagagccgcctccgccccattacccatcatggaaaccctccaggaaaaagtggccccggacgcgcgagcctgaggattctgcacaaaagaggtgcccaaaatgaagaccctgatgcgccatggtctggcagtgtgtttagcgctcaccaccatgtgcaccagcttgttgctagtgtacagcagcctcggcggccagaaggagcggcccccgcagcagcagcagcagcagcagcaacagcagcagcaggcgtcggccaccggcagctcgcagccggcggcggagagcagcacccagcagcgccccggggtccccgcgggaccgcggccactggacggatacctcggagtggcggaccacaagcccctgaaaatgcactgcagggactgtgccctggtgaccagctcagggcatctgctgcacagtcggcaaggctcccagattgaccagacagagtgtgtcatccgcatgaatgacgcccccacacgcggctatgggcgtgacgtgggcaatcgcaccagcctgagggtcatcgcgcattccagcatccagaggatcctccgcaaccgccatgacctgctcaacgtgagccagggcaccgtgttcatcttctggggccccagcagctacatgcggcgggacggcaagggccaggtctacaacaacctgcatctcctgagccaggtgctgccccggctgaaggccttcatgattactcgccacaagatgctgcagtttgatgagctcttcaagcaggagactggcaaagacaggaagatatccaacacttggctcagcactggctggtttacaatgacaattgcactggagctctgtgacaggatcaatgtttatggcatggtgcccccagacttctgcagggatcccaatcacccttcagtaccttatcattattatgaaccttttggacctgatgaatgtacaatgtacctctcccatgagcgaggacgcaagggcagtcatcaccgctttatcacagagaaacgagtctttaagaactgggcacggacattcaatattcacttttttcaaccagactggaaaccagaatcacttgctataaatcatcctgagaataaacctgtgttctaaggaatgagcatgccagactgtaatcccaggtattcactgcatcagacaccgagacactgaacttcctgagccaccagacaggaaagggtagcagaaaacagcttcactcctcaggaagtaccatggacagacgcctaccaggggtgacaaagcagtgcagttggattgtaaggaaaaattccggaattaatgcatcctaatgaatgttgtccccttcaatggtgttaccttaggagctgaacattcaattcagttacaccactatgactaaaaacagtttggatctcttagtattgcctttgaaactgcaacataagcaactcaacaatattagttgcattcctttatagacataccatgtcaaagacgtttttctatcaagttgtattctttcctgttctataacctttgtcatctgttagactctgtatgtgtgatttgtaaaaagcaggctgaaactatggacatgatttctgaagagcacatctccactgactttcataaagcaaatgtccaatatttatttattgagagttttttagtgcaatctgggccagtatttttatagattatgattatgtggtaatttatccttcctaactctttaatcctgaatgatggttggaaatggcctagaattaggttactctgttcacaatgctcattgttagcatgcaattggtatttgacttggaagtgttgtgttgtattttttgaacccctaggcttcaggaaaactgctcttttgtaaaaagaatagcgatgacattttctaatgtgcagaaatgttccaaaaggacaaaattgaaaaccaaaaactatgttattaaaacaaaaaaatgctaacaagagaaatttaaaggtagttttctttagtaataatttatgtaagtgtcctctcttgagccctagtttcctttttggcagaatgatgtcactgtaccagacaacctcttaggtttcatcccaaatctaaacttgtggcctcttcttgacccatttgaagactctgcacttggagtgatggggccccaacagtagcaggaactttattttggggagccttatctacattcatattacttatatcactcttgtggttaaaactacacttcttcctgtgtccacatgggctaaaatctaccccctgcttctctcgaagcatcaccatccgcctcttccccagcctctcaacacaaaaacacaggatacacacacacacacacacacaaaagacatagctccaaggggttccctggctacaatagcaaacagctgcccttctgtgaggaaaagagactacaaggacatgccctatcattcaactcatttatgctatgaactgtttagactcactacaaatcttcttagattatattcattaccattccctggtctgaaggagtataaaggacttattttattcagagccaagataaattcatattatagatttttatttaaacaagtaatattgttcaaaaatagtctcttataaatatactagtgttttctttacacatgacttagaaggcattagtttctctaatgccaaatttgaaggcaccagcaaatattatgtatgaagactgacattgttttacagacatgacctggcttatgataaaagaagttttatcgcattaccacttcttttcccttttcttaattagtacactaactagtactattaattacacggagtattgttgttaaaatgcaaacacaatcagggtactcacataacataaacaaagttgatattgatgtgtatggcttgggctgttcaaagccagtaagattgaaatggccgtccaaaacatactggaatatgttctttaagttttctcatagtttttaaagggactatgaattttattccaacacattgtcttccacagcatggactctgaacacatcatactttatcaacatatgaaaaagtgtattaattttatacaatttacttataggccacctttataatcacttgaagacgttatgttgctcaaacataagtggctcctttggcaatttctatatttgtggaaatttggaaaggcatagtttcaacatgcaagaatgtaattatattgcttcatctaataatatctcacatatctgtctatcttcagattttagattttctttattaaaaaaaccatcatggtagctccatctcgtttgtaacttctccctctcaaatactcagaagaatgaagaggccaaattcagaaaatcatggcttcactgggaaatgttttaaatctacatgtagctaggatatgtgatttcatattttttaaaaatgtggtgtaaataagtgtaaaaaattaccacttgcaaagtggttttattacagcgttaaagaaaatgactagaattctgatagattgtgctgatgaacctggttgtgggcaattgaattcttgtcttcccactaccatttcatgactgtcgtctgaacactattcaacaccattaaatataaactctgatataaaa

SEQ ID NO: 186532 - DNA, 2055 bp, Homo sapiens
  Payload ID: 16730
  Gene Symbol: ST6GALNAC5
  Gene Name: ST6 (alpha-N-acetyl-neuraminyl-2,3-beta-galactosyl-1,3) -N-acetylgalactosaminide alpha-2,6-sialyltransferase 5
  ENST ID: ENST00000318803
  CDS Start-End: 197-907
agttttaattctgtctctaatctctgcaacagccgcgcttcccgggtcccgcggctcccgcgcgcgatctgccgcggccggctgctgggcaaaaatcagagccgcctccgccccattacccatcatggaaaccctccaggaaaaagtggccccggacgcgcgagcctgaggattctgcacaaaagaggtgcccaaaatgaagaccctgatgcgccatggtctggcagtgtgtttagcgctcaccaccatgtgcaccagcttgttgctagtgtacagcagcctcggcggccagaaggagcggcccccgcagcagcagcagcagcagcagcaacagcagcagcaggcgtcggccaccggcagctcgcagccggcggcggagagcagcacccagcagcgccccggggtccccgcgggaccgcggccactggacggatacctcggagtggcggaccacaagcccctgaaaatgcactgcagggactgtgccctggtgaccagctcagggcatctgctgcacagtcggcaaggctcccagattgaccagacagagtgtgtcatccgcatgaatgacgcccccacacgcggctatgggcgtgacgtgggcaatcgcaccagcctgagggtcatcgcgcattccagcatccagaggatcctccgcaaccgccatgacctgctcaacgtgagccagggcaccgtgttcatcttctggggccccagcagctacatgcggcgggacggcaagggccaggtctacaacaacctgcatctcctgagccaggtgctgccccggctgaaggccttcatgattactcgccacaagatgctgcagtttgatgagctcttcaagcaggagactggcaaagacagatatccaacacttggctcagcactggctggtttacaatgacaattgcactggagctctgtgacaggatcaatgtttatggcatggtgcccccagacttctgcagggatcccaatcacccttcagtaccttatcattattatgaaccttttggacctgatgaatgtacaatgtacctctcccatgagcgaggacgcaagggcagtcatcaccgctttatcacagagaaacgagtctttaagaactgggcacggacattcaatattcacttttttcaaccagactggaaaccagaatcacttgctataaatcatcctgagaataaacctgtgttctaaggaatgagcatgccagactgtaatcccaggtattcactgcatcagacaccgagacactgaacttcctgagccaccagacaggaaagggtagcagaaaacagcttcactcctcaggaagtaccatggacagacgcctaccaggggtgacaaagcagtgcagttggattgtaaggaaaaattccggaattaatgcatcctaatgaatgttgtccccttcaatggtgttaccttaggagctgaacattcaattcagttacaccactatgactaaaaacagtttggatctcttagtattgcctttgaaactgcaacataagcaactcaacaatattagttgcattcctttatagacataccatgtcaaagacgtttttctatcaagttgtattctttcctgttctataacctttgtcatctgttagactctgtatgtgtgatttgtaaaaagcaggctgaaactatggacatgatttctgaagagcacatctccactgactttcataaagcaaatgtccaatatttatttattgagagttttttagtgcaatctgggccagtatttttatagattatgattatgtggtaatttatccttcctaactctttaatcctgaatgatggttggaaatggcctagaattaggttactctgttcacaatgctcattgttagcatgcaattggtatttgacttggaagtgttgtgttgtattttttgaacccctaggcttcaggaaaactgctcttttgtaaaaagaatagcgatgacattttctaatgtgcagaaatgttccaaaaggacaaaattgaaaaccaaaaactatgttattaaaacaaaaaaatgctaacaagag

SEQ ID NO: 186533 - DNA, 2280 bp, Homo sapiens
  Payload ID: 16731
  Gene Symbol: ST6GALNAC6
  Gene Name: ST6 (alpha-N-acetyl-neuraminyl-2,3-beta-galactosyl-1,3) -N-acetylgalactosaminide alpha-2,6-sialyltransferase 6
  Uniprot ID: Q969X2
  ENST ID: ENST00000291839
  CDS Start-End: 1-1002
atggcttgctcgaggccccccagccagtgtgaacccacatccctgcccccagggccacctgcaggacgccgacacctacccctcagcagacgccggagagaaatgagtagcaacaaagagcagcggtcagcagtgttcgtgatcctctttgccctcatcaccatcctcatcctctacagctccaacagtgccaatgaggtcttccattacggctccctgcggggccgtagccgccgacctgtcaacctcaagaagtggagcatcactgacggctatgtccccattctcggcaacaagacactgccctctcggtgccaccagtgtgtgattgtcagcagctccagccacctgctgggcaccaagctgggccctgagatcgagcgggctgagtgtacaatccgcatgaatgatgcacccaccactggctactcagctgatgtgggcaacaagaccacctaccgcgtcgtggcccattccagtgtgttccgcgtgctgaggaggccccaggagtttgtcaaccggacccctgaaaccgtgttcatcttctgggggcccccgagcaagatgcagaagccccagggcagcctcgtgcgtgtgatccagcgagcgggcctggtgttccccaacatggaagcatatgccgtctctcccggccgcatgcggcaatttgacgacctcttccggggtgagacgggcaaggacagggagaagtctcattcgtggttgagcacaggctggtttaccatggtgatcgcggtggagttgtgtgaccacgtgcatgtctatggcatggtcccccccaactactgcagccagcggccccgcctccagcgcatgccctaccactactacgagcccaaggggccggacgaatgtgtcacctacatccagaatgagcacagtcgcaagggcaaccaccaccgcttcatcaccgagaaaagggtcttctcatcgtgggcccagctgtatggcatcaccttctcccacccctcctggacctaggccacccagcctgtgggacctcaggagggtcagaggagaagcagcctccgcccagccgctaggccagggaccatcttctggccaatcaaggcttgctggagtgtctcccagccaatcagggccttgaggaggatgtatcctccagccaatcagggcctggggaatctgttggcgaatcagggatttgggagtctatgcggttaatcaggggtgtctttcttgtgcagtcagggtctgcgcacagtcaatcagggtagagggggtatttctgagtcaatctgaggctaaggacatgtcctttcccatgaggccttggttcagagccccaggaatggaccccccaatcactccccactctcctgggataatggggtcctgtcccaaggagctgggaacttggtgttgccccctcaatttccagcaccagaaagagagattgtgtgggggtagaagctgtctggaggcccggccagagaatttgtggggttgtggaggttgtgggggcggtggggaggtcccagaggtgggaggccggcatccaggtcttggctctgccctgagaccttggacaaacccttccccctctctgggcacccttctgcccacaccagtttccagtgcggagtctgagaccctttccacctcccctacaagtgccctcgggtctgtcctccccgtctggaccctcccagccactatcccttgctggaaggctcagctctttggggggtctggggtgacctccccacctcctggaaaactttagggtatttttgcgcaaactccttcagggttgggggactctgaaggaaacgggacaaaaccttaagctgttttcttagcccctcagccagctgccattagcttggctcttaaagggccaggcctccttttctgccctctagcagggaggttttccaactgttggaggcgcctttggggctgcccctttgtctggagtcactgggggcttccgagggtctccctcgaccctctgtcgtcctgggatggctgtcgggagctgtatcacctgggttctgtcccctggctctgtatcaggcactttattaaagctgggcctcagtggggtgtgtttgtctcctgctcttctggagcctggaaggaaagggcttcaggaggaggctgtgaggctggagggaccagatggaggaggccagcagctagccattgcacactggggtgatgggtgggggcggtgactgccccagacttggttttgtaatgatttgtacaggaataaacacacctacgctccgg

SEQ ID NO: 186534 - DNA, 2424 bp, Homo sapiens
  Payload ID: 16731
  Gene Symbol: ST6GALNAC6
  Gene Name: ST6 (alpha-N-acetyl-neuraminyl-2,3-beta-galactosyl-1,3) -N-acetylgalactosaminide alpha-2,6-sialyltransferase 6
  Uniprot ID: Q969X2
  ENST ID: ENST00000373141
  CDS Start-End: 248-1147
ggctattcctggtggccgtgtaggagtaaacagcggctaggtcaaagggctcagagaatacaggaactgagaggcccctggagcaggggacggagctgaggagggccccctaagccccagtttcttccctctgcactcctgcccgccctgcccccggcctgtctgctggaggtgtgaacccacatccctgcccccagggccacctgcaggacgccgacacctacccctcagcagacgccggagagaaatgagtagcaacaaagagcagcggtcagcagtgttcgtgatcctctttgccctcatcaccatcctcatcctctacagctccaacagtgccaatgaggtcttccattacggctccctgcggggccgtagccgccgacctgtcaacctcaagaagtggagcatcactgacggctatgtccccattctcggcaacaagacactgccctctcggtgccaccagtgtgtgattgtcagcagctccagccacctgctgggcaccaagctgggccctgagatcgagcgggctgagtgtacaatccgcatgaatgatgcacccaccactggctactcagctgatgtgggcaacaagaccacctaccgcgtcgtggcccattccagtgtgttccgcgtgctgaggaggccccaggagtttgtcaaccggacccctgaaaccgtgttcatcttctgggggcccccgagcaagatgcagaagccccagggcagcctcgtgcgtgtgatccagcgagcgggcctggtgttccccaacatggaagcatatgccgtctctcccggccgcatgcggcaatttgacgacctcttccggggtgagacgggcaaggacagggagaagtctcattcgtggttgagcacaggctggtttaccatggtgatcgcggtggagttgtgtgaccacgtgcatgtctatggcatggtcccccccaactactgcagccagcggccccgcctccagcgcatgccctaccactactacgagcccaaggggccggacgaatgtgtcacctacatccagaatgagcacagtcgcaagggcaaccaccaccgcttcatcaccgagaaaagggtcttctcatcgtgggcccagctgtatggcatcaccttctcccacccctcctggacctaggccacccagcctgtgggacctcaggagggtcagaggagaagcagcctccgcccagccgctaggccagggaccatcttctggccaatcaaggcttgctggagtgtctcccagccaatcagggccttgaggaggatgtatcctccagccaatcagggcctggggaatctgttggcgaatcagggatttgggagtctatgcggttaatcaggggtgtctttcttgtgcagtcagggtctgcgcacagtcaatcagggtagagggggtatttctgagtcaatctgaggctaaggacatgtcctttcccatgaggccttggttcagagccccaggaatggaccccccaatcactccccactctcctgggataatggggtcctgtcccaaggagctgggaacttggtgttgccccctcaatttccagcaccagaaagagagattgtgtgggggtagaagctgtctggaggcccggccagagaatttgtggggttgtggaggttgtgggggcggtggggaggtcccagaggtgggaggccggcatccaggtcttggctctgccctgagaccttggacaaacccttccccctctctgggcacccttctgcccacaccagtttccagtgcggagtctgagaccctttccacctcccctacaagtgccctcgggtctgtcctccccgtctggaccctcccagccactatcccttgctggaaggctcagctctttggggggtctggggtgacctccccacctcctggaaaactttagggtatttttgcgcaaactccttcagggttgggggactctgaaggaaacgggacaaaaccttaagctgttttcttagcccctcagccagctgccattagcttggctcttaaagggccaggcctccttttctgccctctagcagggaggttttccaactgttggaggcgcctttggggctgcccctttgtctggagtcactgggggcttccgagggtctccctcgaccctctgtcgtcctgggatggctgtcgggagctgtatcacctgggttctgtcccctggctctgtatcaggcactttattaaagctgggcctcagtggggtgtgtttgtctcctgctcttctggagcctggaaggaaagggcttcaggaggaggctgtgaggctggagggaccagatggaggaggccagcagctagccattgcacactggggtgatgggtgggggcggtgactgccccagacttggttttgtaatgatttgtacaggaataaacacacctacgctccg

SEQ ID NO: 186535 - DNA, 2448 bp, Homo sapiens
  Payload ID: 16731
  Gene Symbol: ST6GALNAC6
  Gene Name: ST6 (alpha-N-acetyl-neuraminyl-2,3-beta-galactosyl-1,3) -N-acetylgalactosaminide alpha-2,6-sialyltransferase 6
  Uniprot ID: Q969X2
  ENST ID: ENST00000373142
  CDS Start-End: 174-1298
gccgtgacggcggcgctaggacccggcgggccgcgggtgcggcgaggcctgggcggcctgaggagcgcggaccccggcgctcggctcccggcgccatgtgagggggctcgggggccgcggggggccgggcgctccccgccggagatgaggaaactgaggctcagagaggtcacatggcttgctcgaggccccccagccagtgtgaacccacatccctgcccccagggccacctgcaggacgccgacacctacccctcagcagacgccggagagaaatgagtagcaacaaagagcagcggtcagcagtgttcgtgatcctctttgccctcatcaccatcctcatcctctacagctccaacagtgccaatgaggtcttccattacggctccctgcggggccgtagccgccgacctgtcaacctcaagaagtggagcatcactgacggctatgtccccattctcggcaacaagacactgccctctcggtgccaccagtgtgtgattgtcagcagctccagccacctgctgggcaccaagctgggccctgagatcgagcgggctgagtgtacaatccgcatgaatgatgcacccaccactggctactcagctgatgtgggcaacaagaccacctaccgcgtcgtggcccattccagtgtgttccgcgtgctgaggaggccccaggagtttgtcaaccggacccctgaaaccgtgttcatcttctgggggcccccgagcaagatgcagaagccccagggcagcctcgtgcgtgtgatccagcgagcgggcctggtgttccccaacatggaagcatatgccgtctctcccggccgcatgcggcaatttgacgacctcttccggggtgagacgggcaaggacagggagaagtctcattcgtggttgagcacaggctggtttaccatggtgatcgcggtggagttgtgtgaccacgtgcatgtctatggcatggtcccccccaactactgcagcggccccgcctccagcgcatgccctaccactactacgagcccaaggggccggacgaatgtgtcacctacatccagaatgagcacagtcgcaagggcaaccaccaccgcttcatcaccgagaaaagggtcttctcatcgtgggcccagctgtatggcatcaccttctcccacccctcctggacctaggccacccagcctgtgggacctcaggagggtcagaggagaagcagcctccgcccagccgctaggccagggaccatcttctggccaatcaaggcttgctggagtgtctcccagccaatcagggccttgaggaggatgtatcctccagccaatcagggcctggggaatctgttggcgaatcagggatttgggagtctatgcggttaatcaggggtgtctttcttgtgcagtcagggtctgcgcacagtcaatcagggtagagggggtatttctgagtcaatctgaggctaaggacatgtcctttcccatgaggccttggttcagagccccaggaatggaccccccaatcactccccactctcctgggataatggggtcctgtcccaaggagctgggaacttggtgttgccccctcaatttccagcaccagaaagagagattgtgtgggggtagaagctgtctggaggcccggccagagaatttgtggggttgtggaggttgtgggggcggtggggaggtcccagaggtgggaggccggcatccaggtcttggctctgccctgagaccttggacaaacccttccccctctctgggcacccttctgcccacaccagtttccagtgcggagtctgagaccctttccacctcccctacaagtgccctcgggtctgtcctccccgtctggaccctcccagccactatcccttgctggaaggctcagctctttggggggtctggggtgacctccccacctcctggaaaactttagggtatttttgcgcaaactccttcagggttgggggactctgaaggaaacgggacaaaaccttaagctgttttcttagcccctcagccagctgccattagcttggctcttaaagggccaggcctccttttctgccctctagcagggaggttttccaactgttggaggcgcctttggggctgcccctttgtctggagtcactgggggcttccgagggtctccctcgaccctctgtcgtcctgggatggctgtcgggagctgtatcacctgggttctgtcccctggctctgtatcaggcactttattaaagctgggcctcagtggggtgtgtttgtctcctgctcttctggagcctggaaggaaagggcttcaggaggaggctgtgaggctggagggaccagatggaggaggccagcagctagccattgcacactggggtgatgggtgggggcggtgactgccccagacttggttttgtaatgatttgtacaggaataaacacacctacgctccg

SEQ ID NO: 186536 - DNA, 2406 bp, Homo sapiens
  Payload ID: 16731
  Gene Symbol: ST6GALNAC6
  Gene Name: ST6 (alpha-N-acetyl-neuraminyl-2,3-beta-galactosyl-1,3) -N-acetylgalactosaminide alpha-2,6-sialyltransferase 6
  Uniprot ID: Q969X2
  ENST ID: ENST00000373144
  CDS Start-End: 230-1129
ctgggccgggccgtgacggcggcgctaggacccggcgggccgcgggtgcggcgaggcctgggcggcctgaggagcgcggaccccggcgctcggctcccggcgccatgtgagggggctcgggggccgcggggggccgggcgctccccgccggaggtgtgaacccacatccctgcccccagggccacctgcaggacgccgacacctacccctcagcagacgccggagagaaatgagtagcaacaaagagcagcggtcagcagtgttcgtgatcctctttgccctcatcaccatcctcatcctctacagctccaacagtgccaatgaggtcttccattacggctccctgcggggccgtagccgccgacctgtcaacctcaagaagtggagcatcactgacggctatgtccccattctcggcaacaagacactgccctctcggtgccaccagtgtgtgattgtcagcagctccagccacctgctgggcaccaagctgggccctgagatcgagcgggctgagtgtacaatccgcatgaatgatgcacccaccactggctactcagctgatgtgggcaacaagaccacctaccgcgtcgtggcccattccagtgtgttccgcgtgctgaggaggccccaggagtttgtcaaccggacccctgaaaccgtgttcatcttctgggggcccccgagcaagatgcagaagccccagggcagcctcgtgcgtgtgatccagcgagcgggcctggtgttccccaacatggaagcatatgccgtctctcccggccgcatgcggcaatttgacgacctcttccggggtgagacgggcaaggacagggagaagtctcattcgtggttgagcacaggctggtttaccatggtgatcgcggtggagttgtgtgaccacgtgcatgtctatggcatggtcccccccaactactgcagccagcggccccgcctccagcgcatgccctaccactactacgagcccaaggggccggacgaatgtgtcacctacatccagaatgagcacagtcgcaagggcaaccaccaccgcttcatcaccgagaaaagggtcttctcatcgtgggcccagctgtatggcatcaccttctcccacccctcctggacctaggccacccagcctgtgggacctcaggagggtcagaggagaagcagcctccgcccagccgctaggccagggaccatcttctggccaatcaaggcttgctggagtgtctcccagccaatcagggccttgaggaggatgtatcctccagccaatcagggcctggggaatctgttggcgaatcagggatttgggagtctatgcggttaatcaggggtgtctttcttgtgcagtcagggtctgcgcacagtcaatcagggtagagggggtatttctgagtcaatctgaggctaaggacatgtcctttcccatgaggccttggttcagagccccaggaatggaccccccaatcactccccactctcctgggataatggggtcctgtcccaaggagctgggaacttggtgttgccccctcaatttccagcaccagaaagagagattgtgtgggggtagaagctgtctggaggcccggccagagaatttgtggggttgtggaggttgtgggggcggtggggaggtcccagaggtgggaggccggcatccaggtcttggctctgccctgagaccttggacaaacccttccccctctctgggcacccttctgcccacaccagtttccagtgcggagtctgagaccctttccacctcccctacaagtgccctcgggtctgtcctccccgtctggaccctcccagccactatcccttgctggaaggctcagctctttggggggtctggggtgacctccccacctcctggaaaactttagggtatttttgcgcaaactccttcagggttgggggactctgaaggaaacgggacaaaaccttaagctgttttcttagcccctcagccagctgccattagcttggctcttaaagggccaggcctccttttctgccctctagcagggaggttttccaactgttggaggcgcctttggggctgcccctttgtctggagtcactgggggcttccgagggtctccctcgaccctctgtcgtcctgggatggctgtcgggagctgtatcacctgggttctgtcccctggctctgtatcaggcactttattaaagctgggcctcagtggggtgtgtttgtctcctgctcttctggagcctggaaggaaagggcttcaggaggaggctgtgaggctggagggaccagatggaggaggccagcagctagccattgcacactggggtgatgggtgggggcggtgactgccccagacttggttttgtaatgatttgtacaggaataaacacacctacgctccg

SEQ ID NO: 186537 - DNA, 2460 bp, Homo sapiens
  Payload ID: 16731
  Gene Symbol: ST6GALNAC6
  Gene Name: ST6 (alpha-N-acetyl-neuraminyl-2,3-beta-galactosyl-1,3) -N-acetylgalactosaminide alpha-2,6-sialyltransferase 6
  Uniprot ID: Q969X2
  ENST ID: ENST00000373146
  CDS Start-End: 181-1182
gggccgggccgtgacggcggcgctaggacccggcgggccgcgggtgcggcgaggcctgggcggcctgaggagcgcggaccccggcgctcggctcccggcgccatgtgagggggctcgggggccgcggggggccgggcgctccccgccggagatgaggaaactgaggctcagagaggtcacatggcttgctcgaggccccccagccagtgtgaacccacatccctgcccccagggccacctgcaggacgccgacacctacccctcagcagacgccggagagaaatgagtagcaacaaagagcagcggtcagcagtgttcgtgatcctctttgccctcatcaccatcctcatcctctacagctccaacagtgccaatgaggtcttccattacggctccctgcggggccgtagccgccgacctgtcaacctcaagaagtggagcatcactgacggctatgtccccattctcggcaacaagacactgccctctcggtgccaccagtgtgtgattgtcagcagctccagccacctgctgggcaccaagctgggccctgagatcgagcgggctgagtgtacaatccgcatgaatgatgcacccaccactggctactcagctgatgtgggcaacaagaccacctaccgcgtcgtggcccattccagtgtgttccgcgtgctgaggaggccccaggagtttgtcaaccggacccctgaaaccgtgttcatcttctgggggcccccgagcaagatgcagaagccccagggcagcctcgtgcgtgtgatccagcgagcgggcctggtgttccccaacatggaagcatatgccgtctctcccggccgcatgcggcaatttgacgacctcttccggggtgagacgggcaaggacagggagaagtctcattcgtggttgagcacaggctggtttaccatggtgatcgcggtggagttgtgtgaccacgtgcatgtctatggcatggtcccccccaactactgcagccagcggccccgcctccagcgcatgccctaccactactacgagcccaaggggccggacgaatgtgtcacctacatccagaatgagcacagtcgcaagggcaaccaccaccgcttcatcaccgagaaaagggtcttctcatcgtgggcccagctgtatggcatcaccttctcccacccctcctggacctaggccacccagcctgtgggacctcaggagggtcagaggagaagcagcctccgcccagccgctaggccagggaccatcttctggccaatcaaggcttgctggagtgtctcccagccaatcagggccttgaggaggatgtatcctccagccaatcagggcctggggaatctgttggcgaatcagggatttgggagtctatgcggttaatcaggggtgtctttcttgtgcagtcagggtctgcgcacagtcaatcagggtagagggggtatttctgagtcaatctgaggctaaggacatgtcctttcccatgaggccttggttcagagccccaggaatggaccccccaatcactccccactctcctgggataatggggtcctgtcccaaggagctgggaacttggtgttgccccctcaatttccagcaccagaaagagagattgtgtgggggtagaagctgtctggaggcccggccagagaatttgtggggttgtggaggttgtgggggcggtggggaggtcccagaggtgggaggccggcatccaggtcttggctctgccctgagaccttggacaaacccttccccctctctgggcacccttctgcccacaccagtttccagtgcggagtctgagaccctttccacctcccctacaagtgccctcgggtctgtcctccccgtctggaccctcccagccactatcccttgctggaaggctcagctctttggggggtctggggtgacctccccacctcctggaaaactttagggtatttttgcgcaaactccttcagggttgggggactctgaaggaaacgggacaaaaccttaagctgttttcttagcccctcagccagctgccattagcttggctcttaaagggccaggcctccttttctgccctctagcagggaggttttccaactgttggaggcgcctttggggctgcccctttgtctggagtcactgggggcttccgagggtctccctcgaccctctgtcgtcctgggatggctgtcgggagctgtatcacctgggttctgtcccctggctctgtatcaggcactttattaaagctgggcctcagtggggtgtgtttgtctcctgctcttctggagcctggaaggaaagggcttcaggaggaggctgtgaggctggagggaccagatggaggaggccagcagctagccattgcacactggggtgatgggtgggggcggtgactgccccagacttggttttgtaatgatttgtacaggaataaacacacctacgctccgg

SEQ ID NO: 186538 - DNA, 802 bp, Homo sapiens
  Payload ID: 16731
  Gene Symbol: ST6GALNAC6
  Gene Name: ST6 (alpha-N-acetyl-neuraminyl-2,3-beta-galactosyl-1,3) -N-acetylgalactosaminide alpha-2,6-sialyltransferase 6
  ENST ID: ENST00000447681
  CDS Start-End: 201-802
ccaggcagatggagatgatccttgacaggtctggtggctggttcggggtctactgaaggctgtcttgatcaggaaactgaagactctctgcttttgccacagcagttcctgcagcttccttgaggtgtgaacccacatccctgcccccagggccacctgcaggacgccgacacctacccctcagcagacgccggagagaaatgagtagcaacaaagagcagcggtcagcagtgttcgtgatcctctttgccctcatcaccatcctcatcctctacagctccaacagtgccaatgaggtcttccattacggctccctgcggggccgtagccgccgacctgtcaacctcaagaagtggagcatcactgacggctatgtccccattctcggcaacaagacactgccctctcggtgccaccagtgtgtgattgtcagcagctccagccacctgctgggcaccaagctgggccctgagatcgagcgggctgagtgtacaatccgcatgaatgatgcacccaccactggctactcagctgatgtgggcaacaagaccacctaccgcgtcgtggcccattccagtgtgttccgcgtgctgaggaggccccaggagtttgtcaaccggacccctgaaaccgtgttcatcttctgggggcccccgagcaagatgcagaagccccagggcagcctcgtgcgtgtgatccagcgagcgggcctggtgttccccaacatggaagcatatgccgtctctcccggccgcatgcggcaatttgacgacctcttccggggtgagacgggcaaggacag

SEQ ID NO: 186539 - DNA, 2018 bp, Homo sapiens
  Payload ID: 16731
  Gene Symbol: ST6GALNAC6
  Gene Name: ST6 (alpha-N-acetyl-neuraminyl-2,3-beta-galactosyl-1,3) -N-acetylgalactosaminide alpha-2,6-sialyltransferase 6
  ENST ID: ENST00000542456
  CDS Start-End: 248-508
ggctattcctggtggccgtgtaggagtaaacagcggctaggtcaaagggctcagagaatacaggaactgagaggcccctggagcaggggacggagctgaggagggccccctaagccccagtttcttccctctgcactcctgcccgccctgcccccggcctgtctgctggaggtgtgaacccacatccctgcccccagggccacctgcaggacgccgacacctacccctcagcagacgccggagagaaatgagtagcaacaaagagcagcggtcagcagtgttcgtgatcctctttgccctcatcaccatcctcatcctctacagctccaacagtgccaatgaggtcttccattacggctccctgcggggccgtagccgccgacctgtcaacctcaagaagtggagcatcactgacggctatgtccccattctcggcaacaagggagaagtctcattcgtggttgagcacaggctggtttaccatggtgatcgcggtggagttgtgtgaccacgtgcatgtctatggcatggtcccccccaactactgcagccagcggccccgcctccagcgcatgccctaccactactacgagcccaaggggccggacgaatgtgtcacctacatccagaatgagcacagtcgcaagggcaaccaccaccgcttcatcaccgagaaaagggtcttctcatcgtgggcccagctgtatggcatcaccttctcccacccctcctggacctaggccacccagcctgtgggacctcaggagggtcagaggagaagcagcctccgcccagccgctaggccagggaccatcttctggccaatcaaggcttgctggagtgtctcccagccaatcagggccttgaggaggatgtatcctccagccaatcagggcctggggaatctgttggcgaatcagggatttgggagtctatgcggttaatcaggggtgtctttcttgtgcagtcagggtctgcgcacagtcaatcagggtagagggggtatttctgagtcaatctgaggctaaggacatgtcctttcccatgaggccttggttcagagccccaggaatggaccccccaatcactccccactctcctgggataatggggtcctgtcccaaggagctgggaacttggtgttgccccctcaatttccagcaccagaaagagagattgtgtgggggtagaagctgtctggaggcccggccagagaatttgtggggttgtggaggttgtgggggcggtggggaggtcccagaggtgggaggccggcatccaggtcttggctctgccctgagaccttggacaaacccttccccctctctgggcacccttctgcccacaccagtttccagtgcggagtctgagaccctttccacctcccctacaagtgccctcgggtctgtcctccccgtctggaccctcccagccactatcccttgctggaaggctcagctctttggggggtctggggtgacctccccacctcctggaaaactttagggtatttttgcgcaaactccttcagggttgggggactctgaaggaaacgggacaaaaccttaagctgttttcttagcccctcagccagctgccattagcttggctcttaaagggccaggcctccttttctgccctctagcagggaggttttccaactgttggaggcgcctttggggctgcccctttgtctggagtcactgggggcttccgagggtctccctcgaccctctgtcgtcctgggatggctgtcgggagctgtatcacctgggttctgtcccctggctctgtatcaggcactttattaaagctgggcctcagtggggtgtgtttgtctcctgctcttctggagcctggaaggaaagggcttcaggaggaggctgtgaggctggagggaccagatggaggaggccagcagctagccattgcacactggggtgatgggtgggggcggtgactgccccagacttggttttgtaatgatttgtacaggaataaacacacctacgctccgg

SEQ ID NO: 186540 - DNA, 2396 bp, Homo sapiens
  Payload ID: 16731
  Gene Symbol: ST6GALNAC6
  Gene Name: ST6 (alpha-N-acetyl-neuraminyl-2,3-beta-galactosyl-1,3) -N-acetylgalactosaminide alpha-2,6-sialyltransferase 6
  Uniprot ID: Q969X2
  ENST ID: ENST00000622357
  CDS Start-End: 219-1118
atgcgtcagtcacttcctccaggcagatggagatgatccttgacaggtctggtggctggttcggggtctactgaaggctgtcttgatcaggaaactgaagactctctgcttttgccacagcagttcctgcagcttccttgaggtgtgaacccacatccctgcccccagggccacctgcaggacgccgacacctacccctcagcagacgccggagagaaatgagtagcaacaaagagcagcggtcagcagtgttcgtgatcctctttgccctcatcaccatcctcatcctctacagctccaacagtgccaatgaggtcttccattacggctccctgcggggccgtagccgccgacctgtcaacctcaagaagtggagcatcactgacggctatgtccccattctcggcaacaagacactgccctctcggtgccaccagtgtgtgattgtcagcagctccagccacctgctgggcaccaagctgggccctgagatcgagcgggctgagtgtacaatccgcatgaatgatgcacccaccactggctactcagctgatgtgggcaacaagaccacctaccgcgtcgtggcccattccagtgtgttccgcgtgctgaggaggccccaggagtttgtcaaccggacccctgaaaccgtgttcatcttctgggggcccccgagcaagatgcagaagccccagggcagcctcgtgcgtgtgatccagcgagcgggcctggtgttccccaacatggaagcatatgccgtctctcccggccgcatgcggcaatttgacgacctcttccggggtgagacgggcaaggacagggagaagtctcattcgtggttgagcacaggctggtttaccatggtgatcgcggtggagttgtgtgaccacgtgcatgtctatggcatggtcccccccaactactgcagccagcggccccgcctccagcgcatgccctaccactactacgagcccaaggggccggacgaatgtgtcacctacatccagaatgagcacagtcgcaagggcaaccaccaccgcttcatcaccgagaaaagggtcttctcatcgtgggcccagctgtatggcatcaccttctcccacccctcctggacctaggccacccagcctgtgggacctcaggagggtcagaggagaagcagcctccgcccagccgctaggccagggaccatcttctggccaatcaaggcttgctggagtgtctcccagccaatcagggccttgaggaggatgtatcctccagccaatcagggcctggggaatctgttggcgaatcagggatttgggagtctatgcggttaatcaggggtgtctttcttgtgcagtcagggtctgcgcacagtcaatcagggtagagggggtatttctgagtcaatctgaggctaaggacatgtcctttcccatgaggccttggttcagagccccaggaatggaccccccaatcactccccactctcctgggataatggggtcctgtcccaaggagctgggaacttggtgttgccccctcaatttccagcaccagaaagagagattgtgtgggggtagaagctgtctggaggcccggccagagaatttgtggggttgtggaggttgtgggggcggtggggaggtcccagaggtgggaggccggcatccaggtcttggctctgccctgagaccttggacaaacccttccccctctctgggcacccttctgcccacaccagtttccagtgcggagtctgagaccctttccacctcccctacaagtgccctcgggtctgtcctccccgtctggaccctcccagccactatcccttgctggaaggctcagctctttggggggtctggggtgacctccccacctcctggaaaactttagggtatttttgcgcaaactccttcagggttgggggactctgaaggaaacgggacaaaaccttaagctgttttcttagcccctcagccagctgccattagcttggctcttaaagggccaggcctccttttctgccctctagcagggaggttttccaactgttggaggcgcctttggggctgcccctttgtctggagtcactgggggcttccgagggtctccctcgaccctctgtcgtcctgggatggctgtcgggagctgtatcacctgggttctgtcccctggctctgtatcaggcactttattaaagctgggcctcagtggggtgtgtttgtctcctgctcttctggagcctggaaggaaagggcttcaggaggaggctgtgaggctggagggaccagatggaggaggccagcagctagccattgcacactggggtgatgggtgggggcggtgactgccccagacttggttttgtaatgatttgtacaggaataaacacacctacgctccgg

SEQ ID NO: 186541 - DNA, 4645 bp, Homo sapiens
  Payload ID: 16732
  Gene Symbol: ST6GAL1
  Gene Name: ST6 beta-galactosamide alpha-2,6-sialyltranferase 1
  Uniprot ID: P15907
  ENST ID: ENST00000169298
  CDS Start-End: 675-1895
gcatacggaggcgactcgcttccttcccgcccctccgccgcgctcttcttccttccttctccagtcccttccactgtgcgtcttctgtcccccgttcttccccagcggacccctctttcgagactccctagtggggtccccagctcccgggcgatcctgcccttgccgagcgcgttttctggagtcacctgggggaggggagtcctgggcagggccgggctggggaagacgcctggggcactgcccggcgttaacaaagggagccgataccgaccggcgtgggcgcggagcgggcggccgccaccgagcgtgctgagcaaccgcagcctccgcggccgagagtgcagcgagcaaggggagagccagttgcgcagagccctgcaaccagcagtccagggagaagtggtgaatgtcatggagcccagctgaaatggactggcccccttgagcctgtcccaagccctggtgccaggtgtccatccccgtgctgagatgagttttgatcatcctgagaaaaatgggccttggcctgcagacccaataaaccttccctcccatggataatagtgctaattcctgaggacctgaagggcctgccgcccctgggggattagccagaagcaggcttgttttcctgctcagaacaaagtgacttccctgaacacatcttcattatgattcacaccaacctgaagaaaaagttcagctgctgcgtcctggtctttcttctgtttgcagtcatctgtgtgtggaaggaaaagaagaaagggagttactatgattcctttaaattgcaaaccaaggaattccaggtgttaaagagtctggggaaattggccatggggtctgattcccagtctgtatcctcaagcagcacccaggacccccacaggggccgccagaccctcggcagtctcagaggcctagccaaggccaaaccagaggcctccttccaggtgtggaacaaggacagctcttccaaaaaccttatccctaggctgcaaaagatctggaagaattacctaagcatgaacaagtacaaagtgtcctacaaggggccaggaccaggcatcaagttcagtgcagaggccctgcgctgccacctccgggaccatgtgaatgtatccatggtagaggtcacagattttcccttcaatacctctgaatgggagggttatctgcccaaggagagcattaggaccaaggctgggccttggggcaggtgtgctgttgtgtcgtcagcgggatctctgaagtcctcccaactaggcagagaaatcgatgatcatgacgcagtcctgaggtttaatggggcacccacagccaacttccaacaagatgtgggcacaaaaactaccattcgcctgatgaactctcagttggttaccacagagaagcgcttcctcaaagacagtttgtacaatgaaggaatcctaattgtatgggacccatctgtataccactcagatatcccaaagtggtaccagaatccggattataatttctttaacaactacaagacttatcgtaagctgcaccccaatcagcccttttacatcctcaagccccagatgccttgggagctatgggacattcttcaagaaatctccccagaagagattcagccaaaccccccatcctctgggatgcttggtatcatcatcatgatgacgctgtgtgaccaggtggatatttatgagttcctcccatccaagcgcaagactgacgtgtgctactactaccagaagttcttcgatagtgcctgcacgatgggtgcctaccacccgctgctctatgagaagaatttggtgaagcatctcaaccagggcacagatgaggacatctacctgcttggaaaagccacactgcctggcttccggaccattcactgctaagcacaggctcctcactcttctccatcaggcattaaatgaatggtctcttggccaccccagcctgggaagaacattttcctgaacaattccagcctgctccttttactctaggggcctctgtcagcaagaccatggggacttcaagagcctgtggtcaggaaatcaggtccagccttccctgtagccagacagtttatgagcccagagcctcctgccacacacatgcacacatatctagcattctttccagacagcatcctccccgccttccaccttggtagatgcaaggtctatctctcccatcagggctgccaaagctgggctttgtttttcccagcagaatgatgccattctcacaaaccaatgctctatattgcttgaagtctgcatctaaatattgatttcacgttttaaagaaattctcttaaattacaattgtgcccaatgcagggtggctctggggggcaagtaggtggtacaggggattggaaacatgctccgcgcctccagagaaaagttgctcccgaggtccatgcccctggaacgtgttcctatcactctggctggttgggctggtccttagactgggtgcttatgattaaagggtcttggttagcccactttccctctccatgtggagatggaaggtagagaaggatacagtgtctatcctcaagttgctacggttcagtgagagaggcagacatctgaacaggcaggtaggattcagtgtgctcagtgcactggggatttggagagagatgggcttgctctctctgtgcacccaggagggccacgcacttaaaactgtgtttgtggatcagagaaggctttatagcacagggggcattcagatgagtcttagaggaagagaagaaacatggcaagcagattacatctgagccgtttgaattgtgtttttctttcttcccatgtttattttctaagatctacctgaacttagagactcaagatatttttttaggaaacctcctacccatgtctgaggtagcaagtgcagcctcacgacagataccaggcaatccagagccacaaaacgtgattcctccaggctctgcctggcctgaccctgtcctgtcagctgggtttacataccagtcccattcttccttttcaatacctacccccaaatcttctcctaaccaccatctgttttttttttttaaagcattttttgctttaaaagcatcctgaccccaatttctttgagctcacgggccttttgctgaaggtctctcagggtgtagtggtgtggctctctggacttaacgtcactctcagaggtcagaaccttggagatcagaactgattctcaccaggtgtgagaggtgtggtagcagattgcaatgctctgcacctcttccttgcaagtgagcaacttcaggctctctgggcagaggctggcccactgtagtttgcagacatgctctccagatggttttactaagtcccctctccctgatagggaatcctgctggaccagcgcagccctggtgtggagaggttaaaagacttgcacaggatcaccaagtcatgctgtagagccaggattcctagacccagggctctgcactctcaaggctggccccatgtgctcaaggggatctaatgtttgggctccaaactaaccatctcggagctgggctcctcatttactgccaaaccctcagcttatgtagctagaaagggccctggagtgagaaagcctggattttcaaattgatgctcccctactgactagctgtgccactctgggcaaatgctcttccttgagcctgtttccacacctgtaaagtggggatgatgatcctatctcactgcttttgtgaggattacaggaaagcacctgtcctggctctgtacctggcacgtagtaggtgctcagttcatgctggtttccttcctgcctttagtagggacctgctctgtgctcacacctcggctgcatgcaccctgctgtgacggaggctagtgtggaagaggtcctgtcctcagggaattaactgtcttattgggagacaacaactgtcctccttggaacacccaagaaaccatgcaaagcagtggacaacacagaacacgccctcctcctcgctgcctgcagctccaatctgattctgcttgggaatgggcggagcacgtgggctgcttaactgctgtataggacaagccccttacccctctctgggcccatgaattcctggcttggtttatgttctgatttgacacactgattttaatcttcgaatcatgacactgagtgcagaggaggtggcattccgacagcaggacatacatgttggtgtgaagactgggacgacactgggtagaatctagtttttaattattattaatataaaggatcaaattaatttaaatatgattctgaagtctacagaacttttagttctgtgctgtctatgtggacactttggtaaaatgcaaattatgatatggacgttatcattggtctggtgagatgtttcatatttgtgacagttaatttaaaaattatgagttaatgctgcctgtgtctatggggttctgtcttctttgatagccatctattcatctggatcatgggaccctctctaatccttccaccaatcaaataagctattgctattggtttggagttgagatatcagtctcggaaacttctgaaaaatgctaataattacccaaggattatgtcaaattttaaaataaatgtgtgtgtgtttctttaa

SEQ ID NO: 186542 - DNA, 588 bp, Homo sapiens
  Payload ID: 16732
  Gene Symbol: ST6GAL1
  Gene Name: ST6 beta-galactosamide alpha-2,6-sialyltranferase 1
  ENST ID: ENST00000446170
  CDS Start-End: 315-588
aatgctgatttaccaagcggagtgcaaattgtgtgagatggagtttcaccgtgttagccaagatggtcttgatctcctgtcctcatgatcctgatccgcctgcctcggcctcccaaagtgctgggattacagatgagttttgatcatcctgagaaaaatgggccttggcctgcagacccaataaaccttccctcccatggataatagtgctaattcctgaggacctgaagggcctgccgcccctgggggattagccagaagcaggcttgttttcctgctcagaacaaagtgacttccctgaacacatcttcattatgattcacaccaacctgaagaaaaagttcagctgctgcgtcctggtctttcttctgtttgcagtcatctgtgtgtggaaggaaaagaagaaagggagttactatgattcctttaaattgcaaaccaaggaattccaggtgttaaagagtctggggaaattggccatggggtctgattcccagtctgtatcctcaagcagcacccaggacccccacaggggccgccagaccctcggcagtctcagaggcctagccaaggccaaaccagaggcct

SEQ ID NO: 186543 - DNA, 568 bp, Homo sapiens
  Payload ID: 16732
  Gene Symbol: ST6GAL1
  Gene Name: ST6 beta-galactosamide alpha-2,6-sialyltranferase 1
  ENST ID: ENST00000440338
  CDS Start-End: 433-568
gaactttctgatagcttaataggaggaggttcctgtagggcggcacaaccagggagggcgtggaagctctgcatcccttctcccataccttgctctacacatctcttcatctgtatcctctgcagcatccttgatgataaaccagtaaattagagatggagtttcaccgtgttagccaagatggtcttgatctcctgtcctcatgatcctgatccgcctgcctcggcctcccaaagtgctgggattacagatgagttttgatcatcctgagaaaaatgggccttggcctgcagacccaataaaccttccctcccatggataatagtgctaattcctgaggacctgaagggcctgccgcccctgggggattagccagaagcaggcttgttttcctgctcagaacaaagtgacttccctgaacacatcttcattatgattcacaccaacctgaagaaaaagttcagctgctgcgtcctggtctttcttctgtttgcagtcatctgtgtgtggaaggaaaagaagaaagggagttactatgattcctttaaattgcaaaccaaggaattcc

SEQ ID NO: 186544 - DNA, 4302 bp, Homo sapiens
  Payload ID: 16732
  Gene Symbol: ST6GAL1
  Gene Name: ST6 beta-galactosamide alpha-2,6-sialyltranferase 1
  Uniprot ID: P15907
  ENST ID: ENST00000448044
  CDS Start-End: 332-1552
aactttctgatagcttaataggaggaggttcctgtagggcggcacaaccagggagggcgtggaagctctgcatcccttctcccataccttgctctacacatctcttcatctgtatcctctgcagcatccttgatgataaaccagtaaatatgagttttgatcatcctgagaaaaatgggccttggcctgcagacccaataaaccttccctcccatggataatagtgctaattcctgaggacctgaagggcctgccgcccctgggggattagccagaagcaggcttgttttcctgctcagaacaaagtgacttccctgaacacatcttcattatgattcacaccaacctgaagaaaaagttcagctgctgcgtcctggtctttcttctgtttgcagtcatctgtgtgtggaaggaaaagaagaaagggagttactatgattcctttaaattgcaaaccaaggaattccaggtgttaaagagtctggggaaattggccatggggtctgattcccagtctgtatcctcaagcagcacccaggacccccacaggggccgccagaccctcggcagtctcagaggcctagccaaggccaaaccagaggcctccttccaggtgtggaacaaggacagctcttccaaaaaccttatccctaggctgcaaaagatctggaagaattacctaagcatgaacaagtacaaagtgtcctacaaggggccaggaccaggcatcaagttcagtgcagaggccctgcgctgccacctccgggaccatgtgaatgtatccatggtagaggtcacagattttcccttcaatacctctgaatgggagggttatctgcccaaggagagcattaggaccaaggctgggccttggggcaggtgtgctgttgtgtcgtcagcgggatctctgaagtcctcccaactaggcagagaaatcgatgatcatgacgcagtcctgaggtttaatggggcacccacagccaacttccaacaagatgtgggcacaaaaactaccattcgcctgatgaactctcagttggttaccacagagaagcgcttcctcaaagacagtttgtacaatgaaggaatcctaattgtatgggacccatctgtataccactcagatatcccaaagtggtaccagaatccggattataatttctttaacaactacaagacttatcgtaagctgcaccccaatcagcccttttacatcctcaagccccagatgccttgggagctatgggacattcttcaagaaatctccccagaagagattcagccaaaccccccatcctctgggatgcttggtatcatcatcatgatgacgctgtgtgaccaggtggatatttatgagttcctcccatccaagcgcaagactgacgtgtgctactactaccagaagttcttcgatagtgcctgcacgatgggtgcctaccacccgctgctctatgagaagaatttggtgaagcatctcaaccagggcacagatgaggacatctacctgcttggaaaagccacactgcctggcttccggaccattcactgctaagcacaggctcctcactcttctccatcaggcattaaatgaatggtctcttggccaccccagcctgggaagaacattttcctgaacaattccagcctgctccttttactctaggggcctctgtcagcaagaccatggggacttcaagagcctgtggtcaggaaatcaggtccagccttccctgtagccagacagtttatgagcccagagcctcctgccacacacatgcacacatatctagcattctttccagacagcatcctccccgccttccaccttggtagatgcaaggtctatctctcccatcagggctgccaaagctgggctttgtttttcccagcagaatgatgccattctcacaaaccaatgctctatattgcttgaagtctgcatctaaatattgatttcacgttttaaagaaattctcttaaattacaattgtgcccaatgcagggtggctctggggggcaagtaggtggtacaggggattggaaacatgctccgcgcctccagagaaaagttgctcccgaggtccatgcccctggaacgtgttcctatcactctggctggttgggctggtccttagactgggtgcttatgattaaagggtcttggttagcccactttccctctccatgtggagatggaaggtagagaaggatacagtgtctatcctcaagttgctacggttcagtgagagaggcagacatctgaacaggcaggtaggattcagtgtgctcagtgcactggggatttggagagagatgggcttgctctctctgtgcacccaggagggccacgcacttaaaactgtgtttgtggatcagagaaggctttatagcacagggggcattcagatgagtcttagaggaagagaagaaacatggcaagcagattacatctgagccgtttgaattgtgtttttctttcttcccatgtttattttctaagatctacctgaacttagagactcaagatatttttttaggaaacctcctacccatgtctgaggtagcaagtgcagcctcacgacagataccaggcaatccagagccacaaaacgtgattcctccaggctctgcctggcctgaccctgtcctgtcagctgggtttacataccagtcccattcttccttttcaatacctacccccaaatcttctcctaaccaccatctgttttttttttttaaagcattttttgctttaaaagcatcctgaccccaatttctttgagctcacgggccttttgctgaaggtctctcagggtgtagtggtgtggctctctggacttaacgtcactctcagaggtcagaaccttggagatcagaactgattctcaccaggtgtgagaggtgtggtagcagattgcaatgctctgcacctcttccttgcaagtgagcaacttcaggctctctgggcagaggctggcccactgtagtttgcagacatgctctccagatggttttactaagtcccctctccctgatagggaatcctgctggaccagcgcagccctggtgtggagaggttaaaagacttgcacaggatcaccaagtcatgctgtagagccaggattcctagacccagggctctgcactctcaaggctggccccatgtgctcaaggggatctaatgtttgggctccaaactaaccatctcggagctgggctcctcatttactgccaaaccctcagcttatgtagctagaaagggccctggagtgagaaagcctggattttcaaattgatgctcccctactgactagctgtgccactctgggcaaatgctcttccttgagcctgtttccacacctgtaaagtggggatgatgatcctatctcactgcttttgtgaggattacaggaaagcacctgtcctggctctgtacctggcacgtagtaggtgctcagttcatgctggtttccttcctgcctttagtagggacctgctctgtgctcacacctcggctgcatgcaccctgctgtgacggaggctagtgtggaagaggtcctgtcctcagggaattaactgtcttattgggagacaacaactgtcctccttggaacacccaagaaaccatgcaaagcagtggacaacacagaacacgccctcctcctcgctgcctgcagctccaatctgattctgcttgggaatgggcggagcacgtgggctgcttaactgctgtataggacaagccccttacccctctctgggcccatgaattcctggcttggtttatgttctgatttgacacactgattttaatcttcgaatcatgacactgagtgcagaggaggtggcattccgacagcaggacatacatgttggtgtgaagactgggacgacactgggtagaatctagtttttaattattattaatataaaggatcaaattaatttaaatatgattctgaagtctacagaacttttagttctgtgctgtctatgtggacactttggtaaaatgcaaattatgatatggacgttatcattggtctggtgagatgtttcatatttgtgacagttaatttaaaaattatgagttaatgctgcctgtgtctatggggttctgtcttctttgatagccatctattcatctggatcatgggaccctctctaatccttccaccaatcaaataagctattgctattggtttggagttgagatatcagtctcggaaacttctgaaaaatgctaataattacccaaggattatgtcaaattttaaaataaatgtgtgtgtgtttctttaa

SEQ ID NO: 186545 - DNA, 1005 bp, Homo sapiens
  Payload ID: 16732
  Gene Symbol: ST6GAL1
  Gene Name: ST6 beta-galactosamide alpha-2,6-sialyltranferase 1
  ENST ID: ENST00000448408
  CDS Start-End: 711-1005
actcagtccaggcctctatcatgcctggcacatagtgttgaatattgtattcaataaatattcaacagtaaatatttgttgaatacagtattaaatactatagaatttagacaggtccctgtatcaacaacagcaacaatgaccaccaccaccaccaccaccaccacaacaaaataacaagaatgtccaatgtagggggttgctttttgatccacttgcctttggctagtggtgtctttctctccttagcgccatattcttcagcacttttcggcagctgtatgtggttctattttggtctcctctttactgcacggcgattatgttttcaagaggcaaatcttcagggtgactagagtgacacgttatctgagttctggatggaggtaaaggaatatcacggtggtacttaagctccaagaacttacggcacacctgcttgagtggatcatgggtgagctggagaacctgaagtagcaaaggcaagaaggcaacgacgttccatctgtggaaggacctaccaaccagatgagttttgatcatcctgagaaaaatgggccttggcctgcagacccaataaaccttccctcccatggataatagtgctaattcctgaggacctgaagggcctgccgcccctgggggattagccagaagcaggcttgttttcctgctcagaacaaagtgacttccctgaacacatcttcattatgattcacaccaacctgaagaaaaagttcagctgctgcgtcctggtctttcttctgtttgcagtcatctgtgtgtggaaggaaaagaagaaagggagttactatgattcctttaaattgcaaaccaaggaattccaggtgttaaagagtctggggaaattggccatggggtctgattcccagtctgtatcctcaagcagcacccaggacccccacaggggccgccagaccctcggcagtctcagaggcctagccaaggccaaaccagaggcctccttccaggtgtggaacaagg

SEQ ID NO: 186546 - DNA, 596 bp, Homo sapiens
  Payload ID: 16732
  Gene Symbol: ST6GAL1
  Gene Name: ST6 beta-galactosamide alpha-2,6-sialyltranferase 1
  ENST ID: ENST00000455441
  CDS Start-End: 532-596
cttccttccttctccagtcccttccactgtgcgtcttctgtcccccgttcttccccagcggacccctctttcgagactccctagtggggtccccagctcccgggcgatcctgcccttgccgagcgcgttttctggagtcacctgggggaggggagtcctgggcagggccgggctggggaagacgcctggggcactgcccggcgttaacaaagggagccgataccgaccggcgtgggcgcggagcgggcggccgccaccgagcgtgctgagcaaccgcagcctccgcggccgagagtgcagcgagcaaggggagagccagttgcgcagagccctgcaaccagcagtccagggagaagtggtgaatgtcatggagcccagctgaaatggactggcccccttgagcctgtcccaagccctggtgccaggtgtccatccccgtgctgagatgatcatgacgcagtcctgaggtttaatggggcacccacagccaacttccaacaagatgtgggcacaaaaactaccattcgcctgatgaactctcagttggttaccacagagaagcgcttcctcaaagacagtttgtacaatgaaggaat

SEQ ID NO: 186547 - DNA, 504 bp, Homo sapiens
  Payload ID: 16732
  Gene Symbol: ST6GAL1
  Gene Name: ST6 beta-galactosamide alpha-2,6-sialyltranferase 1
  ENST ID: ENST00000430309
  CDS Start-End: 377-504
aacaaacccacgtgcgcacagccccggggaacacggatttctccacggcaccgcaaggggagagccagttgcgcagagccctgcaaccagcagtccagggagaagtggtgaatgtcatggagcccagctgaaatggactggcccccttgagcctgtcccaagccctggtgccaggtgtccatccccgtgctgagatgagttttgatcatcctgagaaaaatgggccttggcctgcagacccaataaaccttccctcccatggataatagtgctaattcctgaggacctgaagggcctgccgcccctgggggattagccagaagcaggcttgttttcctgctcagaacaaagtgacttccctgaacacatcttcattatgattcacaccaacctgaagaaaaagttcagctgctgcgtcctggtctttcttctgtttgcagtcatctgtgtgtggaaggaaaagaagaaagggagttactatgattcctttaaattgcaaaccaa

SEQ ID NO: 186548 - DNA, 507 bp, Homo sapiens
  Payload ID: 16732
  Gene Symbol: ST6GAL1
  Gene Name: ST6 beta-galactosamide alpha-2,6-sialyltranferase 1
  ENST ID: ENST00000458216
  CDS Start-End: 431-507
cggccgccaccgagcgtgctgagcaaccgcagcctccgcggccgagagtgcagcgagcaaggggagagccagttgcgcagagccctgcaaccagcagtccagggagaagtggtgaatgtcatggagcccagctgaaatggactggcccccttgagcctgtcccaagccctggtgccaggtgtccatccccgtgctgagatgagttttgatcatcctgagaaaaatgggccttggcctgcagacccaataaaccttccctcccatggataatagtgctaattcctgaggacctgaagggcctgccgcccctgggggattagccagaagcagttggctacatgtctgctatcttacccagaattcctagcctctatcatgaggcttgttttcctgctcagaacaaagtgacttccctgaacacatcttcattatgattcacaccaacctgaagaaaaagttcagctgctgcgtcctggtctttcttctgtttgcagtcatctgtgtgtg

SEQ ID NO: 186549 - DNA, 570 bp, Homo sapiens
  Payload ID: 16732
  Gene Symbol: ST6GAL1
  Gene Name: ST6 beta-galactosamide alpha-2,6-sialyltranferase 1
  ENST ID: ENST00000442023
  CDS Start-End: 224-570
cgctgctaccaataatcaaaagcctacaattgacctttgaaaagacttgaagcatagatctgcacatcatttccaggttctgaaattctgttgtttttcctgattagtggaggactctattggcctcaacaacctggatgatcatgacgcagtcctgaggtttaatggggcacccacagccaacttccaacaagatgtgggcacaaaaactaccattcgcctgatgaactctcagttggttaccacagagaagcgcttcctcaaagacagtttgtacaatgaaggaatcctaattgtatgggacccatctgtataccactcagatatcccaaagtggtaccagaatccggattataatttctttaacaactacaagacttatcgtaagctgcaccccaatcagcccttttacatcctcaagccccagatgccttgggagctatgggacattcttcaagaaatctccccagaagagattcagccaaaccccccatcctctgggatgcttggtatcatcatcatgatgacgctgtgtgaccaggtggatatttatgagttcctcccatccaa

SEQ ID NO: 186550 - DNA, 707 bp, Homo sapiens
  Payload ID: 16732
  Gene Symbol: ST6GAL1
  Gene Name: ST6 beta-galactosamide alpha-2,6-sialyltranferase 1
  ENST ID: ENST00000417392
  CDS Start-End: 368-707
gaggcgccacttgctggaagagggcgagagagacatttaaaaggcaaggggagagccagttgcgcagagccctgcaaccagcagtccagggagaagtggtgaatgtcatggagcccagctgaaatggactggcccccttgagcctgtcccaagccctggtgccaggtgtccatccccgtgctgagatgagttttgatcatcctgagaaaaatgggccttggcctgcagacccaataaaccttccctcccatggataatagtgctaattcctgaggacctgaagggcctgccgcccctgggggattagccagaagcaggcttgttttcctgctcagaacaaagtgacttccctgaacacatcttcattatgattcacaccaacctgaagaaaaagttcagctgctgcgtcctggtctttcttctgtttgcagtcatctgtgtgtggaaggaaaagaagaaagggagttactatgattcctttaaattgcaaaccaaggaattccaggtgttaaagagtctggggaaattggccatggggtctgattcccagtctgtatcctcaagcagcacccaggacccccacaggggccgccagaccctcggcagtctcagaggcctagccaaggccaaaccagaggcctccttccaggtgtggaacaaggacagctcttccaaaaaccttatccctaggctgcaaaagatctgga

SEQ ID NO: 186551 - DNA, 602 bp, Homo sapiens
  Payload ID: 16732
  Gene Symbol: ST6GAL1
  Gene Name: ST6 beta-galactosamide alpha-2,6-sialyltranferase 1
  ENST ID: ENST00000423451
  CDS Start-End: 222-602
gcttaatgctgatttaccaagcggagtgcaaattgtgtgatgagttttgatcatcctgagaaaaatgggccttggcctgcagacccaataaaccttccctcccatggataatagtgctaattcctgaggacctgaagggcctgccgcccctgggggattagccagaagcaggcttgttttcctgctcagaacaaagtgacttccctgaacacatcttcattatgattcacaccaacctgaagaaaaagttcagctgctgcgtcctggtctttcttctgtttgcagtcatctgtgtgtggaaggaaaagaagaaagggagttactatgattcctttaaattgcaaaccaaggaattccaggtgttaaagagtctggggaaattggccatggggtctgattcccagtctgtatcctcaagcagcacccaggacccccacaggggccgccagaccctcggcagtctcagaggcctagccaaggccaaaccagaggcctccttccaggtgtggaacaaggacagctcttccaaaaaccttatccctaggctgcaaaagatctggaagaattacctaagcatgaacaagtacaaagtgtcctacaag

SEQ ID NO: 186552 - DNA, 3947 bp, Homo sapiens
  Payload ID: 16732
  Gene Symbol: ST6GAL1
  Gene Name: ST6 beta-galactosamide alpha-2,6-sialyltranferase 1
  Uniprot ID: P15907
  ENST ID: ENST00000457772
  CDS Start-End: 670-1197
gctcttcttccttccttctccagtcccttccactgtgcgtcttctgtcccccgttcttccccagcggacccctctttcgagactccctagtggggtccccagctcccgggcgatcctgcccttgccgagcgcgttttctggagtcacctgggggaggggagtcctgggcagggccgggctggggaagacgcctggggcactgcccggcgttaacaaagggagccgataccgaccggcgtgggcgcggagcgggcggccgccaccgagcgtgctgagcaaccgcagcctccgcggccgagagtgcagcgagcaaggggagagccagttgcgcagagccctgcaaccagcagtccagggagaagtggtgaatgtcatggagcccagctgaaatggactggcccccttgagcctgtcccaagccctggtgccaggtgtccatccccgtgctgagatgagttttgatcatcctgagaaaaatgggccttggcctgcagacccaataaaccttccctcccatggataatagtgctaattcctgaggacctgaagggcctgccgcccctgggggattagccagaagcagatgatcatgacgcagtcctgaggtttaatggggcacccacagccaacttccaacaagatgtgggcacaaaaactaccattcgcctgatgaactctcagttggttaccacagagaagcgcttcctcaaagacagtttgtacaatgaaggaatcctaattgtatgggacccatctgtataccactcagatatcccaaagtggtaccagaatccggattataatttctttaacaactacaagacttatcgtaagctgcaccccaatcagcccttttacatcctcaagccccagatgccttgggagctatgggacattcttcaagaaatctccccagaagagattcagccaaaccccccatcctctgggatgcttggtatcatcatcatgatgacgctgtgtgaccaggtggatatttatgagttcctcccatccaagcgcaagactgacgtgtgctactactaccagaagttcttcgatagtgcctgcacgatgggtgcctaccacccgctgctctatgagaagaatttggtgaagcatctcaaccagggcacagatgaggacatctacctgcttggaaaagccacactgcctggcttccggaccattcactgctaagcacaggctcctcactcttctccatcaggcattaaatgaatggtctcttggccaccccagcctgggaagaacattttcctgaacaattccagcctgctccttttactctaggggcctctgtcagcaagaccatggggacttcaagagcctgtggtcaggaaatcaggtccagccttccctgtagccagacagtttatgagcccagagcctcctgccacacacatgcacacatatctagcattctttccagacagcatcctccccgccttccaccttggtagatgcaaggtctatctctcccatcagggctgccaaagctgggctttgtttttcccagcagaatgatgccattctcacaaaccaatgctctatattgcttgaagtctgcatctaaatattgatttcacgttttaaagaaattctcttaaattacaattgtgcccaatgcagggtggctctggggggcaagtaggtggtacaggggattggaaacatgctccgcgcctccagagaaaagttgctcccgaggtccatgcccctggaacgtgttcctatcactctggctggttgggctggtccttagactgggtgcttatgattaaagggtcttggttagcccactttccctctccatgtggagatggaaggtagagaaggatacagtgtctatcctcaagttgctacggttcagtgagagaggcagacatctgaacaggcaggtaggattcagtgtgctcagtgcactggggatttggagagagatgggcttgctctctctgtgcacccaggagggccacgcacttaaaactgtgtttgtggatcagagaaggctttatagcacagggggcattcagatgagtcttagaggaagagaagaaacatggcaagcagattacatctgagccgtttgaattgtgtttttctttcttcccatgtttattttctaagatctacctgaacttagagactcaagatatttttttaggaaacctcctacccatgtctgaggtagcaagtgcagcctcacgacagataccaggcaatccagagccacaaaacgtgattcctccaggctctgcctggcctgaccctgtcctgtcagctgggtttacataccagtcccattcttccttttcaatacctacccccaaatcttctcctaaccaccatctgttttttttttttaaagcattttttgctttaaaagcatcctgaccccaatttctttgagctcacgggccttttgctgaaggtctctcagggtgtagtggtgtggctctctggacttaacgtcactctcagaggtcagaaccttggagatcagaactgattctcaccaggtgtgagaggtgtggtagcagattgcaatgctctgcacctcttccttgcaagtgagcaacttcaggctctctgggcagaggctggcccactgtagtttgcagacatgctctccagatggttttactaagtcccctctccctgatagggaatcctgctggaccagcgcagccctggtgtggagaggttaaaagacttgcacaggatcaccaagtcatgctgtagagccaggattcctagacccagggctctgcactctcaaggctggccccatgtgctcaaggggatctaatgtttgggctccaaactaaccatctcggagctgggctcctcatttactgccaaaccctcagcttatgtagctagaaagggccctggagtgagaaagcctggattttcaaattgatgctcccctactgactagctgtgccactctgggcaaatgctcttccttgagcctgtttccacacctgtaaagtggggatgatgatcctatctcactgcttttgtgaggattacaggaaagcacctgtcctggctctgtacctggcacgtagtaggtgctcagttcatgctggtttccttcctgcctttagtagggacctgctctgtgctcacacctcggctgcatgcaccctgctgtgacggaggctagtgtggaagaggtcctgtcctcagggaattaactgtcttattgggagacaacaactgtcctccttggaacacccaagaaaccatgcaaagcagtggacaacacagaacacgccctcctcctcgctgcctgcagctccaatctgattctgcttgggaatgggcggagcacgtgggctgcttaactgctgtataggacaagccccttacccctctctgggcccatgaattcctggcttggtttatgttctgatttgacacactgattttaatcttcgaatcatgacactgagtgcagaggaggtggcattccgacagcaggacatacatgttggtgtgaagactgggacgacactgggtagaatctagtttttaattattattaatataaaggatcaaattaatttaaatatgattctgaagtctacagaacttttagttctgtgctgtctatgtggacactttggtaaaatgcaaattatgatatggacgttatcattggtctggtgagatgtttcatatttgtgacagttaatttaaaaattatgagttaatgctgcctgtgtctatggggttctgtcttctttgatagccatctattcatctggatcatgggaccctctctaatccttccaccaatcaaataagctattgctattggtttggagttgagatatcagtctcggaaacttctgaaaaatgctaataattacccaaggattatgtcaaattttaaaataaatgtgtgtgtgtttctttaa

SEQ ID NO: 186553 - DNA, 544 bp, Homo sapiens
  Payload ID: 16732
  Gene Symbol: ST6GAL1
  Gene Name: ST6 beta-galactosamide alpha-2,6-sialyltranferase 1
  ENST ID: ENST00000427315
  CDS Start-End: 388-544
tccttccttctccagtcccttccactgtgcgtcttctgtcccccgttcttccccagcggacccctctttcgagactccctagtggggtccccagctcccgggcgatcctgcccttgccgagcgcgttttctggagtcacctgggggaggggagtcctgggcagggccgggctggggaagacgcctggggcactgcccggcgttaacaaagggagccgataccgaccggcgtgggcgcggagcgggcggccgccaccgagcgtgctgagcaaccgcagcctccgcggccgagagtgcagcgaatgatcatgacgcagtcctgaggtttaatggggcacccacagccaacttccaacaagatgtgggcacaaaaactaccattcgcctgatgaactctcagttggttaccacagagaagcgcttcctcaaagacagtttgtacaatgaaggaatcctaattgtatgggacccatctgtataccactcagatatcccaaagtggtaccagaatccggattataatttctttaacaactacaagactt

SEQ ID NO: 186554 - DNA, 577 bp, Homo sapiens
  Payload ID: 16732
  Gene Symbol: ST6GAL1
  Gene Name: ST6 beta-galactosamide alpha-2,6-sialyltranferase 1
  ENST ID: ENST00000416235
  CDS Start-End: 354-577
ataagccactccacaggagaaatgacttcattttttcaacaaatatatgccgtggaaaagaagaagtaagggagcgaggaactcttctagataagagagaattgaaaatggcacatcatccagtcatccaaacaaaatgtcctgtccttgtttggatccccttttgagcagatgagttttgatcatcctgagaaaaatgggccttggcctgcagacccaataaaccttccctcccatggataatagtgctaattcctgaggacctgaagggcctgccgcccctgggggattagccagaagcaggcttgttttcctgctcagaacaaagtgacttccctgaacacatcttcattatgattcacaccaacctgaagaaaaagttcagctgctgcgtcctggtctttcttctgtttgcagtcatctgtgtgtggaaggaaaagaagaaagggagttactatgattcctttaaattgcaaaccaaggaattccaggtgttaaagagtctggggaaattggccatggggtctgattcccagtctgtatcctcaagcagcacccaggacccccacaggggccg

SEQ ID NO: 186555 - DNA, 1055 bp, Homo sapiens
  Payload ID: 16732
  Gene Symbol: ST6GAL1
  Gene Name: ST6 beta-galactosamide alpha-2,6-sialyltranferase 1
  ENST ID: ENST00000448449
  CDS Start-End: 1-537
cttatccctaggctgcaaaagatctggaagaattacctaagcatgaacaagtacaaagtgtcctacaaggggccaggaccaggcatcaagttcagtgcagaggccctgcgctgccacctccgggaccatgtgaatgtatccatggtagaggtcacagattttcccttcaatacctctgaatgggagggttatctgcccaaggagagcattaggaccaaggctgggccttggggcaggtgtgctgttgtgtcgtcagcgggatctctgaagtcctcccaactaggcagagaaatcgatgatcatgacgcagtcctgaggtttaatggggcacccacagccaacttccaacaagatgtgggcacaaaaactaccattcgcctgatgaactctcagatctctgtgcaccattgtgccagggctgcgaggaaggtggcccacttcccgggatacactacccaccctcaagagagcctttcctgctgcttcttagttggttaccacagagaagcgcttcctcaaagacagtttgtacaatgaaggaatcctaattgtatgggacccatctgtataccactcagatatcccaaagtggtaccagaatccggattataatttctttaacaactacaagacttatcgtaagctgcaccccaatcagcccttttacatcctcaagccccagatgccttgggagctatgggacattcttcaagaaatctccccagaagagattcagccaaaccccccatcctctgggatgcttggtatcatcatcatgatgacgctgtgtgaccaggtggatatttatgagttcctcccatccaagcgcaagactgacgtgtgctactactaccagaagttcttcgatagtgcctgcacgatgggtgcctaccacccgctgctctatgagaagaatttggtgaagcatctcaaccagggcacagatgaggacatctacctgcttggaaaagccacactgcctggcttccggaccattcactgctaagcacaggctcctcactcttctccatcaggcattaaatgaatggtctctt

SEQ ID NO: 186556 - DNA, 608 bp, Homo sapiens
  Payload ID: 16732
  Gene Symbol: ST6GAL1
  Gene Name: ST6 beta-galactosamide alpha-2,6-sialyltranferase 1
  ENST ID: ENST00000438590
  CDS Start-End: 317-608
attattgactgagcagacagagagacgtgtcctcgccaacatctacaaatagctctgggctttggcaggcctggatgcaggatcttggaaaagaggagcgtgggtctgctgtttacagtgcaaagatttgacagatgagttttgatcatcctgagaaaaatgggccttggcctgcagacccaataaaccttccctcccatggataatagtgctaattcctgaggacctgaagggcctgccgcccctgggggattagccagaagcaggcttgttttcctgctcagaacaaagtgacttccctgaacacatcttcattatgattcacaccaacctgaagaaaaagttcagctgctgcgtcctggtctttcttctgtttgcagtcatctgtgtgtggaaggaaaagaagaaagggagttactatgattcctttaaattgcaaaccaaggaattccaggtgttaaagagtctggggaaattggccatggggtctgattcccagtctgtatcctcaagcagcacccaggacccccacaggggccgccagaccctcggcagtctcagaggcctagccaaggccaaaccagaggcctccttccaggtgtggaaca

SEQ ID NO: 186557 - DNA, 6857 bp, Homo sapiens
  Payload ID: 16733
  Gene Symbol: ST6GAL2
  Gene Name: ST6 beta-galactosamide alpha-2,6-sialyltranferase 2
  Uniprot ID: Q96JF0
  ENST ID: ENST00000361686
  CDS Start-End: 190-1779
ttccgccggggcaggcgccgggactccctcctggccgcccacagcctgtgcgcattcctgcattcctgccgccgcccgggacccgagtgccccggaggtgtccaggcgcggtgccaggcgggtactgtgcaggttcattctgccacccatctgcattaagacacaaggtgctgaccgcagagacctgccatgaaaccacacttgaagcaatggagacaacgaatgcttttcggaatattcgcttgggggctcctctttttgctgattttcatctacttcaccgacagcaaccccgctgagcctgtacccagctccctctccttcctggagaccaggaggctcctgccggtgcaggggaagcagcgggccatcatgggcgccgcacatgagccctccccgcctgggggcctggacgcacgccaggcgctgccccgcgcccacccagccggttcctttcatgcggggcctggagacctgcagaaatgggcccagtcccaagatgggtttgaacataaagagtttttttcatcccaggtggggagaaaatctcaaagtgctttctacccggaggatgacgactacttttttgctgctggtcagccagggtggcacagccacactcaggggacattgggattcccttcccccggggagccaggcccacgggagggggcttttccggctgcacaggtccagaggaggcgggtgaagaagaggcaccggaggcagagaaggagccacgtgttggaggagggcgacgacggcgacaggctgtactcctccatgtccagggccttcctgtaccggctctggaaggggaacgtctcttccaaaatgctgaacccgcgcctgcagaaggcgatgaaggattacctgaccgccaacaagcacggggtgcgcttccgcgggaagcgggaggccgggctgagcagggcacagctgctgtgccagctgcggagccgcgcgcgcgtgcggacgctggacggcaccgaggcgcccttttctgcgctgggctggcggcgcctggtgcccgccgtgcccctgagccagctgcacccccgcggcctgcgcagctgcgctgtcgtcatgtctgcaggcgcaatcctcaactcttccttgggcgaggaaatagattctcatgatgcggttttgagatttaactctgctcctacacgtggttatgagaaagatgttgggaataaaaccaccatacgcatcattaattcgcagattctgaccaaccccagccatcacttcattgacagttcactgtataaagacgtcattttggtggcctgggaccctgccccatattccgcaaatcttaacctgtggtacaaaaaaccggattacaacctgttcactccatatattcagcatcgtcagagaaacccaaatcagccattttacattcttcatcctaaatttatatggcagctctgggatattatccaggagaacactaaagagaagattcaaccaaacccaccatcttctggtttcattggaatcctcataatgatgtccatgtgcagagaggtgcacgtgtatgaatatatcccatccgtgcggcagacggagctgtgccactaccacgagctgtactacgacgcagcctgcaccctcggggcgtaccacccactactctatgagaagctcctggtgcagcgcctgaacatgggcacgcagggggatttgcatcgcaagggcaaggtggttcttcccggcttccaggcggtgcactgccctgcaccaagtccagtcattccacactcttaaaaagggtttcttgggaatcaatgtgcaataaggtactactgttgtactcaaagtcacaaaagaatacttgaagatagattttagacagtgtagttttgagtctttaaacagtaatttagtggtggtcatgataatccttctctttctaagccattgagtatgtattactgctttgaacatagaaatggtttttttaaaaaaataaggctcaagaaagatgcaaaaccaaggatagctagaaagaaaacacatgtatgaccatgggtatgatacctccagaaatgttaacaacttattcttctgccatgagtacccctcatcagggttggtttcaatgacaggttttggtgatgttcctgaccatatgaagtggtttatgtttagaaacattcaaattgagggacatcatttacagcatcgagtgtgtcagttatacatgcattcatcattaaatatcctaggttttatgacagacattgaaattatcactcagatgtgtttaacagcaaaaaattcccagcacatcctggcaaaggcttttatttccaaccgttgcattcttcatctctgcctcccattgcccactgaatgctttgctttctgtgcatcaagacagagttctaaaaccagaaaacatccatcttgaaaggtccaagaaaaagccaaattccatatagcaccacagaggaggccctttgtttccctgcagtatttcaaccaggaacattagtatcacatccaccaggaggcacatcactggcaagtaacatagaatcacagggctgcaggtgcccctggacactccccggttctggcttttctgccttgtacctcctcacctgcagatctaccctgcagcttttgcatagtcagtgacacacttgacaattggcacagctgtgctggggaagacgggagacaccttgctccttccaaactagaaggaaagattttggagccatcaccctgtgcttctagggatgcacgcctgtctttattatacaggtttcttgcaggtttttatcagccagtgggaactccacagtgatgagcactgaatcttcactaaatcttcctacagacatttaggaatccagtccttgcttttgcagatatgttttatgtcagcagcatgacaaagccatataattaaataatttatgtgaaagcattgcttattaacaaggaaaatatgtagatgcttcagagggaaaggcagctagagggaaattttcatcccaatatgttagctatattcagggttgattttttctttaatctcaactgtcactgatacattgaaaaatttttgctatgaatatagtgaaacagaaacattctgtaataccttaattaaacatgctattatttcaatgtataaccaaaacatatctccatggtacagttaagacttgttgcaatgacaatagcagcttaattaaatgcgttctcccttgcaaaatgtatgaatgtcaggagagtttagtggaaaagttttctttgtttcaggattggtttcttctagactgttctcaggactactttcttgagcaagaatggcttacagagactgaaggcttctgtttggttagtctattcagcagatatggagctggaaaacaagacatctcctatagcttgctataatagtgaaggagaaattggaaagttttaatcacaataatatccaataaaagcccattttgagagttttgttattaagtcaatgagaagggataggtaactttgtcctatatattaacttatgtctaaatagacatggttaagccatgttcctttctaatttcttttcttttcttttttttttttttttttgagacagtctctcgctctgtcgcccaggctagagtgcagtggtgcgatcttggttcactgccagctctgcctcccacgttcacaccattctcctgcctcagcctcctgagtagctggggactacaggcacccgccaccacgcccagctaattttttgtatttttagtagagacagggtttcaccgtgttagccagggtggtctcgatctcctgaccttgtgatctgcctgcctcggcctcccaaagtgatgggattataggcgtgagccaccaccgcgcccggtcattcctttctaatttcttgaaaaaactttgtcttgtccttatgtttacatgtgtgtaataatttcagcaactctggaatgtgggtgaggtggctgtggtggatgaatattactccctaccctccttggatctttctagatcttccagaccattaaatgcccctgaagctccttttatagttttgcaagtggatttacttgtagacatccttactatccagcataatcccccttggctgacatgagaacttggttagaggagaatttattggggtcagtgtaaatattcaagttcaaaagcctcagaacccaacactttaaagatttttaaatggaattttgtcgtagtcattgtacttttaaaatagtactttcagtttcattgaggttacaagaaagactgaagagtacaaaggaaatttagttacaatttttgcatttattatggccttaaagactcttgggaatcaggctctgttcaacagtcaataaatgtaatacacacattaatatagtactgactgggcgttcttctataaaagtttaagttctttggcttctaagaaaatgttgggcagttacagttaacttgatgactacttctagtattagccaaatgggtcctaagtggcagcattttgccagacattgactaaatccttacatgccacatttactgaattccaataaacatatagttcttctgtggagtagttaacagtaagtggcagctcactgaatttctcccaggttctgtctcttccaaaatcctccatcctctcttatgaagggaagctgataaaaaaaaatcctcttggtgcaagctgaagctgttaaggattccttttttcactctcaggaccaacagacgttcttttgtatttcaagataatttcacctgttgttgttgttgttgttgttgttgttgttgttgttgttgttgttacaaagaaacaaattttgagcagcaatgacaattcaaccatatctagattctccctaccttatttctccagccagtcacaccaggcagacgggtaacctttaacagacctggtgttctcatggaataccgatgctcgtcccagggagctgacctttctcactatgtccttatagagctgctcttacagagaactttgtgctcaggaccaagggatggtcaattaaaagttgcatgtaagcatcaggcttggatgggcaagggagggcttttatacatctttgaacgaccaggtctttccttgtctgcctgaaggcagagcttcgagaaacagcacttcccatgtgtctggtcctcttggtctctcagccagacacttaatcaatcctggactctccagtagtcctcagtcattgtagccatagcatctgcaaaaaaagaaatgctaaaataatcattagcgttttcaaaattaggaaatcaaagtagctgggtcactctcttacatgtgtatgagccagttaattctgctggacagatcatacttacgctgctgattgactcttctgagcagtaacacatctcctgaattaattaggtaggtcccgtttgggtgctttaagtgggatcagtcttagatgagtgccagtatgtgattgaatttcatacgcacaaatgccatgattcaagttctctctccagtttttcttatagatcaacacacagtacatgtggtcagttacttggttgaatttctgcttagctgtggtaagagacagagaaagggagtgaggtgggaccaggggaattatcagaaagacatgagtgaacctattggccaggtagcttccaagtatgttctattgtattgtctgttttgattctgatagtttagaactctttctgatagtttagaactcttacccagtggttacatgactgatcaaggcaactccatctggaaattaattgcttgggtaaaatgtccctgagtttcaacttgtcttttatctctggatattctcttatgagattattatgcatgtttctgtcacatgggcattatttacacacttgataaatgaaaggtatttctctgtccgttcaaggaaataaaatgtaagttcttgttttattaaatgaatgaagccttttggttaaaaaaaaagtaatgtaatatgtttctgttcaaacttgagctaatgacatttaaggaattaaagacattgatctagttcttagtatgaaaagtgtacatgtagatatagttatataattgtgtatatacatatctacacacatggttggttttatattgctttttcatcaatatttttgactgaaacctttacaataaattttattttaattatgtaaccactaatattttgagagaaggaagcaaatgttatatgtccttctgttaaaagaaaaaaaattcagtcctccgccaaccgcttcccacacactcatactctgcacatcttggctacattaaaatggactgacagaattatttaaaaggcactatgaaggtagaacactaccttaatattttatcctagtcagaagcctgatttaacactgaactttgaagggaagcttagctgtagctcatggctttcaaagattagaagaaacatttactggttctatggaaaatagtcttcttgctaggtagattggaaacaaagaaattgcattggtggtgttaaaatctaacatttataacaaatcctgttttattctagatgaaatacttagacaattcttccagtggaaaccagtgaacttttttaacagctttgggaattcttttgtatgataatttttaaaatgaaatgtgtactcttcaaactaattaaagcttgaagttttccaggagtcgcattttaaaagtgtttgtacacattttaacacttggatattttctattttggttttgtatatttttatgtatacacaatgtacagacttttttcttgtaaataaaacatgttttcatttgtctagaa

SEQ ID NO: 186558 - DNA, 574 bp, Homo sapiens
  Payload ID: 16733
  Gene Symbol: ST6GAL2
  Gene Name: ST6 beta-galactosamide alpha-2,6-sialyltranferase 2
  ENST ID: ENST00000361803
  CDS Start-End: 1-286
ttctggtttcattggaatcctcataatgatgtccatgtgcagagaggtgcacgtgtatgaatatatcccatccgtgcggcagacggagctgtgccactaccacgagctgtactacgacgcagcctgcaccctcggggcgtaccacccactactctatgagaagctcctggtgcagcgcctgaacatgggcacgcagggggatttgcatcgcaagggcaaggtggttcttcccggcttccaggcggtgcactgccctgcaccaagtccagtcattccacactcttaaaaagggtttcttgggaatcaatgtgcaataagatgaaatacttagacaattcttccagtggaaaccagtgaacttttttaacagctttgggaattcttttgtatgataatttttaaaatgaaatgtgtactcttcaaactaattaaagcttgaagttttccaggagtcgcattttaaaagtgtttgtacacattttaacacttggatattttctattttggttttgtatatttttatgtatacacaatgtacagacttttttcttgtaaataaaacatgttttcattt

SEQ ID NO: 186559 - DNA, 7275 bp, Homo sapiens
  Payload ID: 16733
  Gene Symbol: ST6GAL2
  Gene Name: ST6 beta-galactosamide alpha-2,6-sialyltranferase 2
  Uniprot ID: Q96JF0
  ENST ID: ENST00000409382
  CDS Start-End: 612-2201
gcagcctcggtgcgtgggccgggaaccgccgcctctccccggggctcggggccgcggttcctctggccgcgggagccgccgccgcgctgcccgaaacaatgaggcgtgcagcgcggggctgagcgtagcctcccgccggctttgaggccgagccacccgctgtgccccgccgcccgcgcttgcagctgccgccggcgcggagcagcgctggccccggagaggtgatcccgcaggccgcctgggacgggagcgcggggcagctccgagaccccacggtggcaggaggaggactcgagcctgcggcaggacgactcccgccgcgcactcgccttctgcagcccccaagttccgcggcgtgagtcggggaccccggccagggtcccagctctagcgggcgccagcgtgagtgtgggagcgcgtagcgcgcgcacccgagcggctgccggggaataaaatgtgacacgcacgccttggactccagtgccgcgctgccagggggagcaccgagcaccacggtgtcgtgcgcttcgaggcgcggcgtgggaagaaggctggttcattctgccacccatctgcattaagacacaaggtgctgaccgcagagacctgccatgaaaccacacttgaagcaatggagacaacgaatgcttttcggaatattcgcttgggggctcctctttttgctgattttcatctacttcaccgacagcaaccccgctgagcctgtacccagctccctctccttcctggagaccaggaggctcctgccggtgcaggggaagcagcgggccatcatgggcgccgcacatgagccctccccgcctgggggcctggacgcacgccaggcgctgccccgcgcccacccagccggttcctttcatgcggggcctggagacctgcagaaatgggcccagtcccaagatgggtttgaacataaagagtttttttcatcccaggtggggagaaaatctcaaagtgctttctacccggaggatgacgactacttttttgctgctggtcagccagggtggcacagccacactcaggggacattgggattcccttcccccggggagccaggcccacgggagggggcttttccggctgcacaggtccagaggaggcgggtgaagaagaggcaccggaggcagagaaggagccacgtgttggaggagggcgacgacggcgacaggctgtactcctccatgtccagggccttcctgtaccggctctggaaggggaacgtctcttccaaaatgctgaacccgcgcctgcagaaggcgatgaaggattacctgaccgccaacaagcacggggtgcgcttccgcgggaagcgggaggccgggctgagcagggcacagctgctgtgccagctgcggagccgcgcgcgcgtgcggacgctggacggcaccgaggcgcccttttctgcgctgggctggcggcgcctggtgcccgccgtgcccctgagccagctgcacccccgcggcctgcgcagctgcgctgtcgtcatgtctgcaggcgcaatcctcaactcttccttgggcgaggaaatagattctcatgatgcggttttgagatttaactctgctcctacacgtggttatgagaaagatgttgggaataaaaccaccatacgcatcattaattcgcagattctgaccaaccccagccatcacttcattgacagttcactgtataaagacgtcattttggtggcctgggaccctgccccatattccgcaaatcttaacctgtggtacaaaaaaccggattacaacctgttcactccatatattcagcatcgtcagagaaacccaaatcagccattttacattcttcatcctaaatttatatggcagctctgggatattatccaggagaacactaaagagaagattcaaccaaacccaccatcttctggtttcattggaatcctcataatgatgtccatgtgcagagaggtgcacgtgtatgaatatatcccatccgtgcggcagacggagctgtgccactaccacgagctgtactacgacgcagcctgcaccctcggggcgtaccacccactactctatgagaagctcctggtgcagcgcctgaacatgggcacgcagggggatttgcatcgcaagggcaaggtggttcttcccggcttccaggcggtgcactgccctgcaccaagtccagtcattccacactcttaaaaagggtttcttgggaatcaatgtgcaataaggtactactgttgtactcaaagtcacaaaagaatacttgaagatagattttagacagtgtagttttgagtctttaaacagtaatttagtggtggtcatgataatccttctctttctaagccattgagtatgtattactgctttgaacatagaaatggtttttttaaaaaaataaggctcaagaaagatgcaaaaccaaggatagctagaaagaaaacacatgtatgaccatgggtatgatacctccagaaatgttaacaacttattcttctgccatgagtacccctcatcagggttggtttcaatgacaggttttggtgatgttcctgaccatatgaagtggtttatgtttagaaacattcaaattgagggacatcatttacagcatcgagtgtgtcagttatacatgcattcatcattaaatatcctaggttttatgacagacattgaaattatcactcagatgtgtttaacagcaaaaaattcccagcacatcctggcaaaggcttttatttccaaccgttgcattcttcatctctgcctcccattgcccactgaatgctttgctttctgtgcatcaagacagagttctaaaaccagaaaacatccatcttgaaaggtccaagaaaaagccaaattccatatagcaccacagaggaggccctttgtttccctgcagtatttcaaccaggaacattagtatcacatccaccaggaggcacatcactggcaagtaacatagaatcacagggctgcaggtgcccctggacactccccggttctggcttttctgccttgtacctcctcacctgcagatctaccctgcagcttttgcatagtcagtgacacacttgacaattggcacagctgtgctggggaagacgggagacaccttgctccttccaaactagaaggaaagattttggagccatcaccctgtgcttctagggatgcacgcctgtctttattatacaggtttcttgcaggtttttatcagccagtgggaactccacagtgatgagcactgaatcttcactaaatcttcctacagacatttaggaatccagtccttgcttttgcagatatgttttatgtcagcagcatgacaaagccatataattaaataatttatgtgaaagcattgcttattaacaaggaaaatatgtagatgcttcagagggaaaggcagctagagggaaattttcatcccaatatgttagctatattcagggttgattttttctttaatctcaactgtcactgatacattgaaaaatttttgctatgaatatagtgaaacagaaacattctgtaataccttaattaaacatgctattatttcaatgtataaccaaaacatatctccatggtacagttaagacttgttgcaatgacaatagcagcttaattaaatgcgttctcccttgcaaaatgtatgaatgtcaggagagtttagtggaaaagttttctttgtttcaggattggtttcttctagactgttctcaggactactttcttgagcaagaatggcttacagagactgaaggcttctgtttggttagtctattcagcagatatggagctggaaaacaagacatctcctatagcttgctataatagtgaaggagaaattggaaagttttaatcacaataatatccaataaaagcccattttgagagttttgttattaagtcaatgagaagggataggtaactttgtcctatatattaacttatgtctaaatagacatggttaagccatgttcctttctaatttcttttcttttcttttttttttttttttttgagacagtctctcgctctgtcgcccaggctagagtgcagtggtgcgatcttggttcactgccagctctgcctcccacgttcacaccattctcctgcctcagcctcctgagtagctggggactacaggcacccgccaccacgcccagctaattttttgtatttttagtagagacagggtttcaccgtgttagccagggtggtctcgatctcctgaccttgtgatctgcctgcctcggcctcccaaagtgatgggattataggcgtgagccaccaccgcgcccggtcattcctttctaatttcttgaaaaaactttgtcttgtccttatgtttacatgtgtgtaataatttcagcaactctggaatgtgggtgaggtggctgtggtggatgaatattactccctaccctccttggatctttctagatcttccagaccattaaatgcccctgaagctccttttatagttttgcaagtggatttacttgtagacatccttactatccagcataatcccccttggctgacatgagaacttggttagaggagaatttattggggtcagtgtaaatattcaagttcaaaagcctcagaacccaacactttaaagatttttaaatggaattttgtcgtagtcattgtacttttaaaatagtactttcagtttcattgaggttacaagaaagactgaagagtacaaaggaaatttagttacaatttttgcatttattatggccttaaagactcttgggaatcaggctctgttcaacagtcaataaatgtaatacacacattaatatagtactgactgggcgttcttctataaaagtttaagttctttggcttctaagaaaatgttgggcagttacagttaacttgatgactacttctagtattagccaaatgggtcctaagtggcagcattttgccagacattgactaaatccttacatgccacatttactgaattccaataaacatatagttcttctgtggagtagttaacagtaagtggcagctcactgaatttctcccaggttctgtctcttccaaaatcctccatcctctcttatgaagggaagctgataaaaaaaaatcctcttggtgcaagctgaagctgttaaggattccttttttcactctcaggaccaacagacgttcttttgtatttcaagataatttcacctgttgttgttgttgttgttgttgttgttgttgttgttgttgttgttacaaagaaacaaattttgagcagcaatgacaattcaaccatatctagattctccctaccttatttctccagccagtcacaccaggcagacgggtaacctttaacagacctggtgttctcatggaataccgatgctcgtcccagggagctgacctttctcactatgtccttatagagctgctcttacagagaactttgtgctcaggaccaagggatggtcaattaaaagttgcatgtaagcatcaggcttggatgggcaagggagggcttttatacatctttgaacgaccaggtctttccttgtctgcctgaaggcagagcttcgagaaacagcacttcccatgtgtctggtcctcttggtctctcagccagacacttaatcaatcctggactctccagtagtcctcagtcattgtagccatagcatctgcaaaaaaagaaatgctaaaataatcattagcgttttcaaaattaggaaatcaaagtagctgggtcactctcttacatgtgtatgagccagttaattctgctggacagatcatacttacgctgctgattgactcttctgagcagtaacacatctcctgaattaattaggtaggtcccgtttgggtgctttaagtgggatcagtcttagatgagtgccagtatgtgattgaatttcatacgcacaaatgccatgattcaagttctctctccagtttttcttatagatcaacacacagtacatgtggtcagttacttggttgaatttctgcttagctgtggtaagagacagagaaagggagtgaggtgggaccaggggaattatcagaaagacatgagtgaacctattggccaggtagcttccaagtatgttctattgtattgtctgttttgattctgatagtttagaactctttctgatagtttagaactcttacccagtggttacatgactgatcaaggcaactccatctggaaattaattgcttgggtaaaatgtccctgagtttcaacttgtcttttatctctggatattctcttatgagattattatgcatgtttctgtcacatgggcattatttacacacttgataaatgaaaggtatttctctgtccgttcaaggaaataaaatgtaagttcttgttttattaaatgaatgaagccttttggttaaaaaaaaagtaatgtaatatgtttctgttcaaacttgagctaatgacatttaaggaattaaagacattgatctagttcttagtatgaaaagtgtacatgtagatatagttatataattgtgtatatacatatctacacacatggttggttttatattgctttttcatcaatatttttgactgaaacctttacaataaattttattttaattatgtaaccactaatattttgagagaaggaagcaaatgttatatgtccttctgttaaaagaaaaaaaattcagtcctccgccaaccgcttcccacacactcatactctgcacatcttggctacattaaaatggactgacagaattatttaaaaggcactatgaaggtagaacactaccttaatattttatcctagtcagaagcctgatttaacactgaactttgaagggaagcttagctgtagctcatggctttcaaagattagaagaaacatttactggttctatggaaaatagtcttcttgctaggtagattggaaacaaagaaattgcattggtggtgttaaaatctaacatttataacaaatcctgttttattctagatgaaatacttagacaattcttccagtggaaaccagtgaacttttttaacagctttgggaattcttttgtatgataatttttaaaatgaaatgtgtactcttcaaactaattaaagcttgaagttttccaggagtcgcattttaaaagtgtttgtacacattttaacacttggatattttctattttggttttgtatatttttatgtatacacaatgtacagacttttttcttgtaaataaaacatgttttcatttgtct

SEQ ID NO: 186560 - DNA, 1657 bp, Homo sapiens
  Payload ID: 16733
  Gene Symbol: ST6GAL2
  Gene Name: ST6 beta-galactosamide alpha-2,6-sialyltranferase 2
  Uniprot ID: Q96JF0
  ENST ID: ENST00000409087
  CDS Start-End: 191-1591
cttccgccggggcaggcgccgggactccctcctggccgcccacagcctgtgcgcattcctgcattcctgccgccgcccgggacccgagtgccccggaggtgtccaggcgcggtgccaggcgggtactgtgcaggttcattctgccacccatctgcattaagacacaaggtgctgaccgcagagacctgccatgaaaccacacttgaagcaatggagacaacgaatgcttttcggaatattcgcttgggggctcctctttttgctgattttcatctacttcaccgacagcaaccccgctgagcctgtacccagctccctctccttcctggagaccaggaggctcctgccggtgcaggggaagcagcgggccatcatgggcgccgcacatgagccctccccgcctgggggcctggacgcacgccaggcgctgccccgcgcccacccagccggttcctttcatgcggggcctggagacctgcagaaatgggcccagtcccaagatgggtttgaacataaagagtttttttcatcccaggtggggagaaaatctcaaagtgctttctacccggaggatgacgactacttttttgctgctggtcagccagggtggcacagccacactcaggggacattgggattcccttcccccggggagccaggcccacgggagggggcttttccggctgcacaggtccagaggaggcgggtgaagaagaggcaccggaggcagagaaggagccacgtgttggaggagggcgacgacggcgacaggctgtactcctccatgtccagggccttcctgtaccggctctggaaggggaacgtctcttccaaaatgctgaacccgcgcctgcagaaggcgatgaaggattacctgaccgccaacaagcacggggtgcgcttccgcgggaagcgggaggccgggctgagcagggcacagctgctgtgccagctgcggagccgcgcgcgcgtgcggacgctggacggcaccgaggcgcccttttctgcgctgggctggcggcgcctggtgcccgccgtgcccctgagccagctgcacccccgcggcctgcgcagctgcgctgtcgtcatgtctgcaggcgcaatcctcaactcttccttgggcgaggaaatagattctcatgatgcggttttgagatttaactctgctcctacacgtggttatgagaaagatgttgggaataaaaccaccatacgcatcattaattcgcagattctgaccaaccccagccatcacttcattgacagttcactgtataaagacgtcattttggtggcctgggaccctgccccatattccgcaaatcttaacctgtggtacaaaaaaccggattacaacctgttcactccatatattcagcatcgtcagagaaacccaaatcagccattttacattcttcatcctaaatttatatggcagctctgggatattatccaggagaacactaaagagaagattcaaccaaacccaccatcttctggtttcattggctcatttgtaaaaattggccatatcagagcttgcagtgagccgagatcacgcgactgcactccagcctggacgacagagtgagactccatctcaaaaaaaaaaaaaaaactggccatataagaaacttaacattcatactgtttaaag

SEQ ID NO: 186561 - DNA, 308 bp, Homo sapiens
  Payload ID: 16733
  Gene Symbol: ST6GAL2
  Gene Name: ST6 beta-galactosamide alpha-2,6-sialyltranferase 2
  ENST ID: ENST00000419159
  CDS Start-End: 205-308
acactccgtgtttaggagcgagacccgtgtgtggggaatgttgaaggtggtttggggaaaagcaggaaattctggagaagcgaacgggaggacggcttgcgctttggggacgggcggatacagttgtgcccctgtggctcagtaaaggttcattctgccacccatctgcattaagacacaaggtgctgaccgcagagacctgccatgaaaccacacttgaagcaatggagacaacgaatgcttttcggaatattcgcttgggggctcctctttttgctgattttcatctacttcaccgacagcaaccc

SEQ ID NO: 186562 - DNA, 1996 bp, Homo sapiens
  Payload ID: 16734
  Gene Symbol: ST8SIA1
  Gene Name: ST8 alpha-N-acetyl-neuraminide alpha-2,8-sialyltransferase 1
  Uniprot ID: Q92185
  ENST ID: ENST00000261197
  CDS Start-End: 483-890
ggggggggttgcctggcggcgcagcagcgcgggaggcggcgaagggcgcaggagcatcgctcggaggggacaaggggacgccacgggccacatgtttaggagggagccgagccttctcccggaccctcgccgagggcgaccgtgatgctgcagaaccggcgggagcgactcgccgccgccgctctctgcgcactcggagaccccagcgcccgccttctgcaggggaagcgaccatggccatagatcgtgacttcacccccagccacttcccctagaaagaaatccttggaaaagttgcatttgaaaaaatccttgcgctgacctttggggccgacggggccgaagaagcgtgcgtgcgtttgcaagtaagagaaccaaaggtgtgtgtgcatggggggctggcggtgggggaccctccgctgccacttcgcctagctttgtgctgaggccccggcccccgcccctgggacgccggggctgcgatgagcccctgcgggcgggcccggcgacaaacgtccagaggggccatggctgtactggcgtggaagttcccgcggacccggctgcccatgggagccagtgccctctgtgtcgtggtcctctgttggctctacatcttccccgtctaccggctgcccaacgagaaagagatcgtgcagggggtgctgcaacagggcacggcgtggaggaggaaccagaccgcggccagagcgttcaggaaacaaatggaagactgctgcgaccctgcccatctctttgctatgactaaaatgaattcccctatggggaagagcatgtggtatgacggggagtttttatactcattcaccattgacaattcaacttactctctcttcccacagatgcaatctccctcctttgtcaagtgaatacactaaggatgttggatccaaaagtcagttagtgacagctaatcccagcataattcggcaaaggtttcagaaccttctgtggtccagaaagacatttgtggacaacatgaaaatttataaccacagttacatctacatgcctgccttttctatgaagacaggaacagagccatctttgagggtttattatacactgtcagatgttggtgccaatcaaacagtgctgtttgccaaccccaactttctgcgtagcattggaaagttctggaaaagtagaggaatccatgccaagcgcctgtccacaggactttttctggtgagcgcagctctgggtctctgtgaagaggtggccatctatggcttctggcccttctctgtgaatatgcatgagcagcccatcagccaccactactatgacaacgtcttacccttttctggcttccatgccatgcccgaggaatttctccaactctggtatcttcataaaatcggtgcactgagaatgcagctggacccatgtgaagatacctcactccagcccacttcctaggaacaatggaagaagaaaggactgaaccagggtatttttgttaggttttctatgtgactccaagagggaatggtcaagttgtttcatgagtttgcatgggcccttggaaaaacaggaaaggagcaatgaagatccaagcaaaactttactttcagcgttggcttggaggacaaataagaaatgaaacatcctatgaaatactttatagcacatggcagatttgcaactagtaaaatgctggtgaaatgctgttggtaaagcacatggttcaaatctagaagatgcagttcaaaaacaagacagactcgagttgttagggctgaggaaccaatcaaggtagaacaaagaaaatgttggggtaaaagtgttgctgattgtcaacacaaactggcttaataatattaataagaacctgtcttattaagactggctttagaaccgtaggtttttttaaaaaattattatttatttttgccctctttggggaagtgggtgggtagatttaaaaaatcccttcctgagtaataaagatacaaaatgttactgctgataa

SEQ ID NO: 186563 - DNA, 1036 bp, Homo sapiens
  Payload ID: 16734
  Gene Symbol: ST8SIA1
  Gene Name: ST8 alpha-N-acetyl-neuraminide alpha-2,8-sialyltransferase 1
  ENST ID: ENST00000381424
  CDS Start-End: 440-691
gggcgcaggagcatcgctcggaggggacaaggggacgccacgggccacatgtttaggagggagccgagccttctcccggaccctcgccgagggcgaccgtgatgctgcagaaccggcgggagcgactcgccgccgccgctctctgcgcactcggagaccccagcgcccgccttctgcaggggaagcgaccatggccatagatcgtgacttcacccccagccacttcccctagaaagaaatccttggaaaagttgcatttgaaaaaatccttgcgctgacctttggggccgacggggccgaagaagcgtgcgtgcgtttgcaagtaagagaaccaaaggtgtgtgtgcatggggggctggcggtgggggaccctccgctgccacttcgcctagctttgtgctgaggccccggcccccgcccctgggacgccggggctgcgatgagcccctgcgggcgggcccggcgacaaacgtccagaggggccatggctgtactggcgtggaagttcccgcggacccggctgcccatgggagccagtgccctctgtgtcgtggtcctctgttggctctacatcttccccgtctaccggctgcccaacgagaaagagatcgtgcagggggtgctgcaacagggcacggcgtggaggaggaaccagaccgcggccagagcgttcagctgtggcattgcatgagagggaagcagccaagaccgtaagagctgtgtcgctctaattaggtgccaggaggaagtggaaatgaattcagagccacacattctccatttttcagatcttaaacacagaagacactatcagagatttccaggtgaccacaatgagaaaagggcctttcgtcccactacatcttgcctgggatgcaaaatctttagtttgtttccattattgataaaataaacatatatagtacatgattttatgtcccccatgttcatttaaacaatttatagtgtttattatttgtctgattttggaaagaatacatatttactatagaaaacttttaaatgtagtaaaaaa

SEQ ID NO: 186564 - DNA, 9714 bp, Homo sapiens
  Payload ID: 16734
  Gene Symbol: ST8SIA1
  Gene Name: ST8 alpha-N-acetyl-neuraminide alpha-2,8-sialyltransferase 1
  Uniprot ID: Q92185
  ENST ID: ENST00000396037
  CDS Start-End: 483-1553
ggggggggttgcctggcggcgcagcagcgcgggaggcggcgaagggcgcaggagcatcgctcggaggggacaaggggacgccacgggccacatgtttaggagggagccgagccttctcccggaccctcgccgagggcgaccgtgatgctgcagaaccggcgggagcgactcgccgccgccgctctctgcgcactcggagaccccagcgcccgccttctgcaggggaagcgaccatggccatagatcgtgacttcacccccagccacttcccctagaaagaaatccttggaaaagttgcatttgaaaaaatccttgcgctgacctttggggccgacggggccgaagaagcgtgcgtgcgtttgcaagtaagagaaccaaaggtgtgtgtgcatggggggctggcggtgggggaccctccgctgccacttcgcctagctttgtgctgaggccccggcccccgcccctgggacgccggggctgcgatgagcccctgcgggcgggcccggcgacaaacgtccagaggggccatggctgtactggcgtggaagttcccgcggacccggctgcccatgggagccagtgccctctgtgtcgtggtcctctgttggctctacatcttccccgtctaccggctgcccaacgagaaagagatcgtgcagggggtgctgcaacagggcacggcgtggaggaggaaccagaccgcggccagagcgttcaggaaacaaatggaagactgctgcgaccctgcccatctctttgctatgactaaaatgaattcccctatggggaagagcatgtggtatgacggggagtttttatactcattcaccattgacaattcaacttactctctcttcccacaggcaaccccattccagctgccattgaagaaatgcgcggtggtgggaaatggtgggattctgaagaagagtggctgtggccgtcaaatagatgaagcaaattttgtcatgcgatgcaatctccctcctttgtcaagtgaatacactaaggatgttggatccaaaagtcagttagtgacagctaatcccagcataattcggcaaaggtttcagaaccttctgtggtccagaaagacatttgtggacaacatgaaaatttataaccacagttacatctacatgcctgccttttctatgaagacaggaacagagccatctttgagggtttattatacactgtcagatgttggtgccaatcaaacagtgctgtttgccaaccccaactttctgcgtagcattggaaagttctggaaaagtagaggaatccatgccaagcgcctgtccacaggactttttctggtgagcgcagctctgggtctctgtgaagaggtggccatctatggcttctggcccttctctgtgaatatgcatgagcagcccatcagccaccactactatgacaacgtcttacccttttctggcttccatgccatgcccgaggaatttctccaactctggtatcttcataaaatcggtgcactgagaatgcagctggacccatgtgaagatacctcactccagcccacttcctaggaacaatggaagaagaaaggactgaaccagggtatttttgttaggttttctatgtgactccaagagggaatggtcaagttgtttcatgagtttgcatgggcccttggaaaaacaggaaaggagcaatgaagatccaagcaaaactttactttcagcgttggcttggaggacaaataagaaatgaaacatcctatgaaatactttatagcacatggcagatttgcaactagtaaaatgctggtgaaatgctgttggtaaagcacatggttcaaatctagaagatgcagttcaaaaacaagacagactcgagttgttagggctgaggaaccaatcaaggtagaacaaagaaaatgttggggtaaaagtgttgctgattgtcaacacaaactggcttaataatattaataagaacctgtcttattaagactggctttagaaccgtaggtttttttaaaaaattattatttatttttgccctctttggggaagtgggtgggtagatttaaaaaatcccttcctgagtaataaagatacaaaatgttactgctgataattgtgatttgttgagccacgtctatattaactatagctcccctctatttttaaaattttacataagaattgcttcttcctcttttgtcaagtccacagagacaatgtgaagcattattgaatttagactgtgttgcttcatagtctggataacaggagccactttccttcctcagaatttaggacataaacccaattttaggtctgcattatgtaagcctgtttgcattgtcatttttattttagtgcaaaagactaccaatatgagtgaattatttgtttgtaaattggcataattgtcttcataatttaatgttcagaaatgcagtaaagcacgttgatgaaaagcttagtctctgtggaagacagaccagaagacaaatcccttttctatctactgtggcatattcactgcaaggtaaaggacatgtatgcatacatgcaagaatgaattgagcgaaactttgaatatgtttcctcttttgagctattgttatttagtagttacctaaaaaagaatacatttttactagtataccattaaaaatgtaaaaggcttaacatgtatgcatacatgtagacacacatacacacacacaaagttaaacaaagctcattactgtgcaactatgaaagctgaactcatatgacctggtatggcaaaaatttgtaaccagtgttggagaatcacaaatgtgttatgcactatccattacatgttgatataagacaaccgagctcactggttgccgcacataatacccatagcagcacaagatgcaagtcttacccccaaatgcttacccggaatgagcagaattgtcttactcatcctgattttacccaaaatctcatgaatgggcttgctgttgagcgtggtcacacaaggtatagtttgtacaagtaaagaaatgtgaattagtagctatttatttccttagtagcaggtaggactacttagcttgttacaacagctttgatacacagtaagaaaactctactgacagattacaagcagccaaatgtgtttacatttcagagaagggtaagggaagcctctcgttgtcttcatactttggaatgtcttaagctaaaatgtgacactagagttcaatttcttttttattttaaatgtcactaaattgtaggtaaactgtaccaaaaagttctagtttaattttaacagtaaaaactcagcataccatgttaccacgtaaacaataatggctggtattttctgtgggttaatttaacatgacataaacataggaaagcccttggcaaaattctacatcattgaagtagaccatttctaaatgcaattaaatagtgaggttattataaaaattagaatttaaaatatgacttgttgatagtgcagattataatgttacttagaaagttaagaattcgagagtaatgatgctattggagaactggtttgctatacggcagcaaaaacataatgagaatgtaccatgaagaaattgtgttaaatattcactttgagtgaaactttaaatatgtttcctcttttgagctactgttatttagcagttacctaaaaaagaatacatttttactagtctaccattaaaaatataaaaggcttaacaaaaacgcatataaaagttaataaaatgttactcagattagtactttaattgttaaaatgtaattaatgagctccatagagcccatacatcacagttccattgaaaatatcatctggactagaatctcttaaacccaggaagtggaggttgcagtgagccaagatggtgccactgcactccagcctgggtgacagggcaagaccctgtctcaaaaaaaaaaaaaagaaaagaaaaagaaagaaaatattatgtggaaatttttcatctttttatgatgcctgggatagatttatgcagtagatttatatataatgtttagtttacaaacttgtgaaactatttcatgtgggttctgaaaggcaaaacagaaatggccagtgctggtgatgtttgattagaccagctcttctcagctggggtgattcattatccctctctggtgacatttggcaatgtctggagaccagagacattttttattttcatgactcaagggtgctaatagcatgtacttagtagaggttagggatcctgctaaagatcttacaatgcacaagtcagcctctcacagcaaaataattatccaggctgagatgtcagtagtatcaaggttgacatctcagacctggattagacctggattagaccaaaatgaaattttgattgttccaccttgtcttcacttaaagatagatatacatgctcacagcattcaaaatatgactacaatttaatgaaaatattttcttatggtagattacaactcactagatacaccatacatatgccttttggacataattggttagataggagtgtgtgtgtgtgtgtgtgtgtgtgtgtgtgtgtgtgtgtgtgtgtagcatgaagttaggcatctctatccttaactgtgctatgtgttcctaagtaaggacctcgctagaatcatcctgtagagtgctctggaatactctattattaagatcttcaattctaagctcccattatctttctttgtttatctgaaattaagaccttcagaattaggcctggtacttttccagatttgatcagttacattttgatataactgactcttaaaattcagcttagaagacattcaataagaaaatctttaatcacttttggtgatgcacctgccaagagggggcatcactttgtaccatcagactaattaaaaaaattgttgtgtagtcataaaaattaggctgatccataggggcaaaaggaagggtgaagagactaaaaactagtaccctgatagaattttagtttttattagcctcgatttgagaactgcattgattccaaagatcatgaaggtaggtgaaggattaagtcattccataattaagaaaagtaatgtttatatgaaagatttttatatggacaatgactcacagacacatatgctttgtatagaggattttgccaaaagtttatacaaaattgcacatctaaactgcataattctcatacaagaagttaaggaagtgctcactggattttgcttctgtatagttcacttttatctgtcttcacaagggtaggaagtaaatgatctcaaatggcacatgttcagacaatactgtgtttggctttgtgatgtctcatgtctttctcttggctaaaaaaaattgtttaggctatatataacttgtacctgaagcaatctggacaacatggcttaaaatggaaaataactgaaaaaatcctgggattttaaatttgccaaaaatacccttggattagtcaaaggctttacaagagtgttatagatgatccaaaatggaaacaatattgataacatttcttttcgtcagcagctacatattccagttttataactttattatatacattttttgattattaatagaaagtcagccatccagagttttaacttctgtggttgaaatattgactttgtgaaatttttcactgacaaatacttgttaggagggacctaagggggaggggaatgttaccagtccactgaaaactttaggaaatgttcattgtgttgtgtaaatactttcccaccagcaccaggtaatatattctctatgtttgtagaattccaaagatcaaaagctgtaaggacgtttatgtgaacttgacgcaaacttgtggaggaataaggactgagagtaatgttgtgctttttctttatcttcccgtcgtataggtcgactctcaggttatatgacttttattgggcacacgtcaggggtggaagtggtagaagtgggttaacaatttcaaggcctggcaacctaggtcaaaacctctaataaagtcagcagtaaacataactagcaacttcattccactatgtgctaggaggagggtgaggcaagttgaaaggagatgaccctatccccacactctcaggatgtaaaagggcagagtgctctctacccttaaccttggctttttagcaccgtcagtctctgtcctctcccaggagagctgccttggctccagagttgagctagtagcattgtgactagagaggtagtgtggaaattcgctgaggacctcaaaattttacactgccttaaactgttttgtttttgcttaaactcgtgctgtctaaatgtgggtgttttgtggcagagtctgatcaccccgacctagttatagccctgccagtgattctaaagtggaacttttccccctcattcatatggatagtctgagtccttgaagctagggagatatcaaatattctaccagttcctacatagcttctttaaaagtcctagagactaactcacaggaagtctgaagcccagagcgtctgtttataaactcctaaatatgaggccacaatatttaggttgagcactagaaaatttctattttgcaagtggaaggagacttgaatctataattgctgtagctttttttcccttctatcataagaaaatggataccatctgctttaccctcagcccagacttgtcttttgaattttttacatacatcttaggggtgagagattgaaacaagtgcatgaatgaaaagcttattgaaacataacacagcccctgctcaccatttcagtaagggaaaatacatgtttctgtttccctctaatttgttttctctggtgccaacatttctgatttcttctgtctctaatacataaggaataaataccatattttaaattgacttacatgcctgcgagcatttgccagataatcaaagcctatgactctaactttttaaagcacagaagaggaattatattttatggtcactcctctgtgtttctattgatctctatattgtgctaaaattctttcaggtaatttttttcttgttgaagctgtgggatataatcaatgatgccaagctgtctgagaattttatagaataatatccaaatatattgatcctgcctctttctgcttctatgtaattaaactttcttttgatgtttatttttaaaatgtatgcttcacacaacaccaataaacatctaagagatgtgatataatccaaggcaaagaaaagtaagaatcagttaatgtctattttatctgcacagcattacgaacagaaaattgtaataaaaaaaggtttaaccaaactgaaaaaaagagagacaaaatcttggttttaatttgaaaagatgattgggagtgatctcagaagagagttcagcaggaagcaaggaagaggctgttgaccttgagtgcagcctcaagaatggaacctttttgaaatattttaaaggaaatatcttgtcatccagctgttatggttaataatgaatagttttctctgggtgaagcttatccattgcacacctgatgtgctggcccctgcgatttccccaaatgttggaatgttgcctgcataatttgtggtaatgggggactgtgttcctgcttttacctggttacaaaaaacaaaacaaaacaaaacaaaacaacaaacagaaaaaaaaagagagaaaagatgctagaggaagcagtgtgacagacagatcatgagatgctgacggagagaacagagtggtacctgtttacccacttggaccatgacagtatcaaggctccaccccttgctgtcccttcccaagaggtgctctcctgggagtttgatcacagtgaaacaacactcccgttttctttttcctttctttctttctttcttttttttttttttttttttttttgttgagacagagttttttgctcttgttgcccaggctggagtgcaatggcgtgatctcggctcaccgcaacctccgcctcccaggttcaagcgattctcgtgcctcagcctctggagtagctgggattacaggcatgcgccaccacacccggctaattttgtacttttagtagagatggggtttctccatattggtcaggctggtcccgaactcctgacctcaggtgatctgcccgcctcagcctcccaaagtgctgggattacaggcataagccaccgagcccagccccacactcctgttttcatagcccttttttgtctgtactttggtacatattccccaaataagattattatttacatctgtcatgatgaggcagtgatagcagcaagtgtcactttgaccctcacccttggaaagtgggctatgcatagctagagttagaacaggaggttctaatcctgcttccacaattacttcagtaacaggcttttgtatccatgattacttaagctgacttagatgcattttctaccctgtattctagtgtacacaacacaaacacacataagccctttacctgtggagaagagggagatggttgattcagtgggagtggggagtggcagagggtgccttaactttttctggcttgacccctacttccttatgtgtttccttcatatacctctgtcactttagagatgtaatcatgtctgttccaagttgtatcgttattatcaagaagtcctataaatgtagcaaatgtgactattttatagaaatgcacaatagtttataggccttggagaagtctgataatagtatgtaaatatccttcattgaagtcatagaaccttctagtaggaagctccataggtgataactgcaagaggattaatgtttgtttctccagtaaacaccggaagcaaggaatcaatctgtcactgtttatcattcagtcttgagcaccgttgggtgttgataggttactatagacactccccttataattaatatacaggactcacaatttaggatgtctgatggccactagggtacatcatagagacactagagagaagagaacaaatatagctccatcaaaaagcctgcttaatctttaacaagtctgaaatattactaaaattccagttaccgtgcagcatagtcagtctaaaaagcactggggaaaaaggtgtctttttggtctctttaattctattatggcacattttaatattattccacatgtgtgcaaactatttctcaagagcaaagtttgaggctggagttaagaaaatagaaaaattaaaacattattttttctcatataatataatctgactactagttcatggatataataattctgggaaaaattttagattaaactataaaattgaaatcacctttgaagagtatatggaattgcttctttctattaaagccaacctacattggcaaaaagtgtggagaaaatcagtgtgctcaattctttttgtagagtttcatctaaaatgttgcaggtaaaaaagaaaactttaattggtactttctacggtgtgattagaaaaattagtatctatctctgttggttctgctgacttgcttctttccaccgaatctaaatgcaatgtcataggaggaggtttgctgtaaaaacatgtctttttctttggtgtattcattgtaattatggctggcagtgagaaggttcggtaagtctcaatttctctacctcctttacttggagaaaatttgtaaatgtaccctgtgaataaaatgattttttata

SEQ ID NO: 186565 - DNA, 1920 bp, Homo sapiens
  Payload ID: 16734
  Gene Symbol: ST8SIA1
  Gene Name: ST8 alpha-N-acetyl-neuraminide alpha-2,8-sialyltransferase 1
  ENST ID: ENST00000404299
  CDS Start-End: 469-831
ggcggcgcagcagcgcgggaggcggcgaagggcgcaggagcatcgctcggaggggacaaggggacgccacgggccacatgtttaggagggagccgagccttctcccggaccctcgccgagggcgaccgtgatgctgcagaaccggcgggagcgactcgccgccgccgctctctgcgcactcggagaccccagcgcccgccttctgcaggggaagcgaccatggccatagatcgtgacttcacccccagccacttcccctagaaagaaatccttggaaaagttgcatttgaaaaaatccttgcgctgacctttggggccgacggggccgaagaagcgtgcgtgcgtttgcaagtaagagaaccaaaggtgtgtgtgcatggggggctggcggtgggggaccctccgctgccacttcgcctagctttgtgctgaggccccggcccccgcccctgggacgccggggctgcgatgagcccctgcgggcgggcccggcgacaaacgtccagaggggccatggctgtactggcgtggaagttcccgcggacccggctgcccatgggagccagtgccctctgtgtcgtggtcctctgttggctctacatcttccccgtctaccggctgcccaacgagaaagagatcgtgcagggggtgctgcaacagggcacggcgtggaggaggaaccagaccgcggccagagcgttcagcgtctccacactgttgacacttgctgcccatgagtcacttaatatccatcttggtggtgggatcaccgtgcttgtgttcaaggaacaccgattttattttaccagtggccccaaaatgcaagactgatgatgcagctgtggcattgcatgagagggaagcagccaagaccgtaagagctgtgtcgctctaattaggtgccaggaggaagtggaaatgaattcagagccacacattctccatttttcagatcttaaacacagaagacactatcagagatttccaggtgaccacaatgagaaaagggcctttcgtcccactacatcttgcctgggatgcaaaatctttagtttgtttccattattgataaaataaacatatatagtacatgattttatgtcccccatgttcatttaaacaatttatagtgtttattatttgtctgattttggaaagaatacatatttactatagaaaacttttaaatgtagtaaaaaagaagaaaaagcctgctgaaattccctcactcggaagtacttattgtaaacagtctcttttgtgtatgtttgtttgtgtgtattactaaattgtatgtattttgtatatttaattttatatcctcttttattcactcaaaattatacctttagaattttctcatataattaaataacttttaatttataaacttgtgaaaaaatagctttataattttttattttggaaaaataattatttattgtccaagtattaccataaaaatactttaaaaaaagattatgctgctgacaaatttatgttagacttttttctttaatgatttcttcatatgtagttgttgtatagctgagcataggaaattaaaaagcctctttaaagatctgtactgtcttgaggttgatatttaaaggataaaagcaacactattttcatttgtaaaagtaattgacatttaacaaacatcgctaatattttggtttatattcttctggatcattcaatgccaatgtgtgtataaatgaaacaaaaatataatgaattcaacagtacattgcaaatatttttctagtaatagtatatgcagtctacatcatctcttctaatggctgtaagattttccattgttaggatagatacaaatgtatttaattaatatactgttattggatatttatgttgtaatttctcacttttatgaataaagatgtggtgatcatc

SEQ ID NO: 186566 - DNA, 695 bp, Homo sapiens
  Payload ID: 16734
  Gene Symbol: ST8SIA1
  Gene Name: ST8 alpha-N-acetyl-neuraminide alpha-2,8-sialyltransferase 1
  ENST ID: ENST00000541868
  CDS Start-End: 1-519
ccgcggacccggctgcccatgggagccagtgccctctgtgtcgtggtcctctgttggctctacatcttccccgtctaccggctgcccaacgagaaagagatcgtgcagggggtgctgcaacagggcacggcgtggaggaggaaccagaccgcggccagagcgttcaggaaacaaatggaagactgctgcgaccctgcccatctctttgctatgactaaaatgaattcccctatggggaagagcatgtggtatgacggggagtttttatactcattcaccattgacaattcaacttactctctcttcccacaggcaaccccattccagctgccattgaagaaatgcgcggtggtgggaaatggtgggattctgaagaagagtggctgtggccgtcaaatagatgaagcaaattttgtcatgcgatgcaatctccctcctttgtcaagtgaatacactaaggatgttggatccaaaagtcagttagtgacagctaatcccagcataattcggcaaaggtaagagtttatgacttctgtttgtgacgaacgaagatgaagtcttctcaagtacttagcatttcaaaggcagtgagcataattcagtttgggaaatcaagaggaaaaccatctggacaggcaggaaggatgaagggaattgtaaataaagaaaacaggattatgggaatccaaacaata

SEQ ID NO: 186567 - DNA, 572 bp, Homo sapiens
  Payload ID: 16734
  Gene Symbol: ST8SIA1
  Gene Name: ST8 alpha-N-acetyl-neuraminide alpha-2,8-sialyltransferase 1
  ENST ID: ENST00000540824
  CDS Start-End: 1-572
cttttccaggatagaagagagttggctggttactttgcaggacttaagatgatcttcattttaaagaatctgtatcagcctccactgtggaaacaaatggaagactgctgcgaccctgcccatctctttgctatgactaaaatgaattcccctatggggaagagcatgtggtatgacggggagtttttatactcattcaccattgacaattcaacttactctctcttcccacaggcaaccccattccagctgccattgaagaaatgcgcggtggtgggaaatggtgggattctgaagaagagtggctgtggccgtcaaatagatgaagcaaattttgtcatgcgatgcaatctccctcctttgtcaagtgaatacactaaggatgttggatccaaaagtcagttagtgacagctaatcccagcataattcggcaaaggtttcagaaccttctgtggtccagaaagacatttgtggacaacatgaaaatttataaccacagttacatctacatgcctgccttttctatgaagacaggaacagagccatctttgagggtttattatacactgtc

SEQ ID NO: 186568 - DNA, 543 bp, Homo sapiens
  Payload ID: 16734
  Gene Symbol: ST8SIA1
  Gene Name: ST8 alpha-N-acetyl-neuraminide alpha-2,8-sialyltransferase 1
  ENST ID: ENST00000538256
  CDS Start-End: 1-75
agtcagttagtgacagctaatcccagcataattcggcaaagggattttacagctgtcgagagggtgaagaaatagattcttgattaaggaaatggaaaacagctccaaaagccaaatgacagaacgtctccagcaatcaatagactgcagaatcagtcagaatcagaatccctgccacgttgagaagccacaacttcagctgctcactccagactcatgctgcttgaatcagaatctggcttgaaaaatgggcccctgtctcctcatttaacccagttcagaagtcaggactcacacaggtacatgacattggctgcgccagcatcacagctggaatcccggctataaagaagtctgagaaaggcagttcttagcttttccactttggactacaggaagatacagaaggaggttgaaatgattattttgtgatccagtccatacatgcaccacactctaaacattcaaattataagaaatgtattcaatggctttaaatgactctgaaatacttttgattaaacattttttaaaaagcatgaa

SEQ ID NO: 186569 - DNA, 5708 bp, Homo sapiens
  Payload ID: 16735
  Gene Symbol: ST8SIA2
  Gene Name: ST8 alpha-N-acetyl-neuraminide alpha-2,8-sialyltransferase 2
  Uniprot ID: Q92186
  ENST ID: ENST00000268164
  CDS Start-End: 238-1365
gggagggaggggcaggcgggagccgggagggagcgagcgggctcgccgcgcctgagcaacccctgcctgtcgctgccgctgccgctgccgctgccgccgccggcccggactcgtccggagcgcagggtgtctgcccagctgcgcgcggcgcgcggaggctccggcgtccgccgctgcgccctccggcccctgctcctcgcgccggcccgcgtgggtcccggcgggcgcgaacccaccatgcagctgcagttccggagctggatgctggccgcgctcacgctgctcgtggtcttcctcatcttcgcagacatctcagagatcgaagaagaaatcgggaattcgggaggcagaggtacaatcagatcagctgtgaacagcttacatagcaaatctaatagagctgaagttgtaataaacggctcctcatcaccagctgttgttgacagaagtaatgaaagcatcaagcacaacatccagccagcctcgtccaaatggagacataaccagacgctctctctgaggatcaggaagcagattttaaagttcttggatgctgaaaaggacatttctgtcctaaagggaaccctgaagcctggagatattattcattacatcttcgatcgagacagcaccatgaatgtgtcccagaacctctacgagctcctccccaggacttcgccactgaagaataagcactttgggacttgtgccatcgtgggcaactcgggggtcttgctgaacagcggctgtgggcaggagattgacgcccacagcttcgtcatcaggtgcaacctggccccagtacaggagtatgcccgggatgtggggctcaagacagacctggtaaccatgaacccctcggtcatccagcgggcctttgaggacttggtcaatgccacgtggcgggagaagctgctgcaacggctgcacagcctcaatggcagcatcctgtggatccctgccttcatggcccggggcggcaaggagcgtgttgagtgggtcaacgagcttatcctgaagcaccacgtcaacgtgcgcactgcatacccctcgctgcgcctgctgcacgccgttcgcggatactggctgaccaacaaagtccacatcaaaagacccaccaccggcctcttgatgtataccctggccacacgtttctgcaaacaaatctacctctacggcttctggccctttccgctggatcagaaccagaacccagtcaagtaccactattatgacagcctcaagtatggctacacctcccaggccagcccgcataccatgcccttggagtttaaggccctcaagagcctacatgagcagggggctttgaaactgactgtcggccagtgcgatggggccacgtagggtgggcaccccatgggactcagtggctcacatttcctgccagctacaccacaggcagatgggagtcggggtggcacaaacaatagaacaagcaggctagtggttttctttgttaaagtgtaaaacagtgaccagaatatatatatctatacctgcatatatatattgacctgagtatttataactgtgtggtgttcatctagcattaggcagataggccacaggaagaaggtgtggagaacccacctgaaccagattgagactcaatccatctttgggggtggaaggacttgacatgaaaagaagccagtcccatgactttggatgacaaactgcctcctggcttggagggatctttgggctcatggatgaatggcgagccacctgttgtcagctgccccaagcctctgggatatgtggattcggagaaagctgaggcccagaggggacactcgacccagtctaaagtgggtgccattcacggaggagagggaggttggagacttcaaccgggcaaaggagcacaaggaaaccaagcagcagaggccccatcagcacagagggcctcgttccacgaacgtagagtttgactgcctaagggacagcacgaatgactcacatgtttcagacaggcctccacggctatggagagaaggctggaggagacacaatggatggttcatgttctggcttagcaagagccaccaagaactttgggtgaagcaagcagatgacaatgaagaggagtaatgttccgaatcatgtttttgaaaaatcaagacctcctgttaagggcccacttgaccctagaataaggcaggagagtgtctaaaatctagctgctttgggtgttttttaaagcaatgtgagtccactgaggaggaagagaccctgggatttcaccctctgggttagtctctgtctcaccctgttagaatgtcacgagggactgtactgtcccctctgtcaccagggaagccacaatgagagcttgaaagggtgctgtcaagataaatgtcatccttcttaaaatacatatgattgcctttttgggtgcctcacagagccccagagtgtgagacctgaaagaatgttcagcatctagctccatgtccctgcaaccactctctgtttgccttctgcattctgcactctgcggggcctttgcagccagactgctgtgtcaatgttactttcttgtcactttcctaccctgatggtcacactagcccaccccaagctccgacattgaggttttcatctctgcagggagaggttccaatgtccaccccacccccaggtacccgcctcttcccacagaagcaattttagaattttgcaaaattcttttccccttattgagattaatatttaagattaaaaaaaaaatacccaaagccaaatgcagttccaaatagtggacataatctcccagggaaatctgggctcgaggcctacaacttaggggctggaatcacaggtctcacatagagaaatagccagcttgaatttgttagtcgtattccttcacctgatgaataacagtgttttaaaacatatttgaaaggtaagtaaaaaactaccatcttgaaggtgaagggagttaagaaaagtaatcaagacctgctcctaagcatatgagaccagatgtaattaatcaatggcaatgcagaacaggaccttggctctaaattaatggttgaccggaagggattggaggcggcagaaccattaaccctacacaagaacactccagcccaaaaccgtgaggaaggtgatatatctctgcattttcccttgttgttgcttgaagtctgtgattggggatttgcgttataaaatgaatattttaaaaagcaacagccctaatagcctctgtgggaactgagtggtttcggactcctcacaggcggtggaaataattaataccatattttatacatctccagagcctttcatcttgaggatctcaaagaccgtagaagacatttaatttctaaagcttgaagtgccccgaggagcaggtagaatttccagcagggccttggtggattaaccaaggccttggattccagaatgtttcatggtaagcactgtggagaacctacatgtcaggttctggagttggccctgagctctatccaccaagccagcaccccaccatccctttgcaggggagtcaaagggccagaactccttgggggaccagaacatggttttccttctgcctatcttagtcatggctcctaaaattgaagctgatatgagctggagtgcaaggagtccttccaccctgccttcaggttctctctggagaaaggttagagaccccaggacaatcaacatgtgcaccgttcccctcctcggcttgagtcctgcactaccaaaatggcctggccatttgatggcggagctccaggggccttggctttctctggctcattgtccttctccatctgggccaattgtccttccctgcccattcagagttcaatttgagcctccactgcagttcctggtgtgggccagctggtgttgggtggccccagggagtcacacagtctgtacccggccccgagatcctctgctgtaactgcagggtcacaggcatcccgggagaatgggcctccaccctcagccagccctcactgctgacaggcacccctctgtcacctcctgccacctgtcagatacccagcctgcccgccatcagccacccgagtggttccgacctccattcacctcaagccccaacaggcccctgtcattccacttcatggaagagacggagccttctgaaatgagatctaccctgaaaatctcttctccttcccctttctgagaaacgtcatccccaccagttaacgtttcctgtacaccctcaccctctctcgtccatctctgttgcctctgcacatcagcacacactgactccacctgggctggctcctgccgcctcttccctacctcctccactagccgcaggaagggcctccagcacccacaactgcccttcctcttgatgcccctcggcttccccccagcctggcagcagcgtcccagcgcctccacattgcccctctcacctcccagctctccacgccacttggctctgcagcgacccctcctagacgctccctggcccctcggcacccagaatgccacattcttgtgtttttttcctccttctttcccaatccctctcaaccatgtatttatttatatatgtatgtatttttttatttattatttatttattgaaacccctactttgattgacaaaggaatcaaggtagatctgaccagtattcccctctcttctccttgtcccaccacatggacatgccttacactggcgtcctctcctgagtccctccgcactctccatcagcaacctcacacctgccttcagacccggctgcaacttcctaagctgcccctgccccagctcctctctgcaacccagccctctcctgagctctaggctgggattacacccgctggagggacactcaccccatctgctcccacggcagcaccatcaactcaacaagtcagaagccaagtggatcatctgtgtccccttcccccacaatccctcctttttctagtaaaagacccgtgatcccgtcagccacccagtctgagatgctgacgttatcttcgactattcttccctgtcctgccttgctaattcttcccactagcactaatctcgactctttgtcacttggactatttcagcaacagtctcatctcccagattacctctgtgcacactgacacgtggtcccgtccatcctgaacatgcacagtgattttcctctcccgttgcacacaaacctttaaaagttccccggcccgtgaacaaatgtacaattctctattctgacattacagaccaccggataaggccccattcttcctttacaccctcccctggtcagcctaggagagttgtttttcctggaaagggtgcctgcgttttactgtctctgtgcctttggtcttgctatccccatcccctggaatgctcccttttcttcccttcaaagcccatgcggaaaccacgtccttcatgaagccctccctgatgtaccaaccactgggatctctccctctgctgaaccaccgtagcactttatttgtacctttctcatggcacttaccatattctgccttgtattatagttatttgtgcacttgtcctttgactgttcttagactgtaagcttgccaagggcagggactgtgttttattcatctgtatccatcacagcactaggcgtggtgcatagcacacagcagttgctcaataaatgtttgttggattaaatccttaa

SEQ ID NO: 186570 - DNA, 1089 bp, Homo sapiens
  Payload ID: 16735
  Gene Symbol: ST8SIA2
  Gene Name: ST8 alpha-N-acetyl-neuraminide alpha-2,8-sialyltransferase 2
  ENST ID: ENST00000539113
  CDS Start-End: 25-1089
ggtcccggcgggcgcgaacccaccatgcagctgcagttccggagctggatgctggccgcgctcacgctgctcgtggtcttcctcatcttcgcagacatctcagagatcgaagaagaaatcggagctgaagttgtaataaacggctcctcatcaccagctgttgttgacagaagtaatgaaagcatcaagcacaacatccagccagcctcgtccaaatggagacataaccagacgctctctctgaggatcaggaagcagattttaaagttcttggatgctgaaaaggacatttctgtcctaaagggaaccctgaagcctggagatattattcattacatcttcgatcgagacagcaccatgaatgtgtcccagaacctctacgagctcctccccaggacttcgccactgaagaataagcactttgggacttgtgccatcgtgggcaactcgggggtcttgctgaacagcggctgtgggcaggagattgacgcccacagcttcgtcatcaggtgcaacctggccccagtacaggagtatgcccgggatgtggggctcaagacagacctggtaaccatgaacccctcggtcatccagcgggcctttgaggacttggtcaatgccacgtggcgggagaagctgctgcaacggctgcacagcctcaatggcagcatcctgtggatccctgccttcatggcccggggcggcaaggagcgtgttgagtgggtcaacgagcttatcctgaagcaccacgtcaacgtgcgcactgcatacccctcgctgcgcctgctgcacgccgttcgcggatactggctgaccaacaaagtccacatcaaaagacccaccaccggcctcttgatgtataccctggccacacgtttctgcaaacaaatctacctctacggcttctggccctttccgctggatcagaaccagaacccagtcaagtaccactattatgacagcctcaagtatggctacacctcccaggccagcccgcataccatgcccttggagtttaaggccctcaagagcctacatgagcagggggctttgaaactgactgtcggccagtgcgatggggccacgtag

SEQ ID NO: 186571 - DNA, 998 bp, Homo sapiens
  Payload ID: 16735
  Gene Symbol: ST8SIA2
  Gene Name: ST8 alpha-N-acetyl-neuraminide alpha-2,8-sialyltransferase 2
  ENST ID: ENST00000555434
  CDS Start-End: 1-998
atgcagctgcagttccggagctggatgctggccgcgctcacgctgctcgtggtcttcctcatcttcgcagacatctcagagatcgaagaagaaatcgggaattcgggaggcagaggtacaatcagatcagctgtgaacagcttacatagcaaatctaataggaagcagattttaaagttcttggatgctgaaaaggacatttctgtcctaaagggaaccctgaagcctggagatattattcattacatcttcgatcgagacagcaccatgaatgtgtcccagaacctctacgagctcctccccaggacttcgccactgaagaataagcactttgggacttgtgccatcgtgggcaactcgggggtcttgctgaacagcggctgtgggcaggagattgacgcccacagcttcgtcatcaggtgcaacctggccccagtacaggagtatgcccgggatgtggggctcaagacagacctggtaaccatgaacccctcggtcatccagcgggcctttgaggacttggtcaatgccacgtggcgggagaagctgctgcaacggctgcacagcctcaatggcagcatcctgtggatccctgccttcatggcccggggcggcaaggagcgtgttgagtgggtcaacgagcttatcctgaagcaccacgtcaacgtgcgcactgcatacccctcgctgcgcctgctgcacgccgttcgcggatactggctgaccaacaaagtccacatcaaaagacccaccaccggcctcttgatgtataccctggccacacgtttctgcaaacaaatctacctctacggcttctggccctttccgctggatcagaaccagaacccagtcaagtaccactattatgacagcctcaagtatggctacacctcccaggccagcccgcataccatgcccttggagtttaaggccctcaagagcctacatgagcagggggctttgaaactgactgtcggccagtgcgatggggccacgta

SEQ ID NO: 186572 - DNA, 11833 bp, Homo sapiens
  Payload ID: 16736
  Gene Symbol: ST8SIA3
  Gene Name: ST8 alpha-N-acetyl-neuraminide alpha-2,8-sialyltransferase 3
  Uniprot ID: O43173
  ENST ID: ENST00000324000
  CDS Start-End: 2035-3177
agatcttactccctttggcattttacaccttactcatacaatcatttttaaaaaatagcaatttaaaaaaatacagttcaagtgttcatcatatccaggcatgcaagccttttctaaatttttttaaataataaaaaagccccacagaggaaaggaggttatttgtgtcctcctgacacacacttttagattttggttaaaaagtctctagtgggtgcaaagtgaccccctttgtcactggaaacaaataggagcattctttgtgccactgtccacaaccacacagatatgtttcccaagggagctcatcaggtcttcaaacatttagcaagcatgacatgtgtaagagacagtattggagaagtaagacaagccttgctctgccgaagcttacaatccaggagctcaccccttcaaggaatttacagcctccagacagataataacattaggtccatgaaagcctacaaggcaagaagttcaggagagaaagaagtcataaccatcttggaagaatctcaacttgttttatcagaactcaaacgccaatttctcacccctagcttccctcattagtgcttattaactagtattgggaggaccaagcgaagagtaaagctagggtagcagaggccataagctaattgcaaaggacagagctaaagaaacatgctagtttcccctgagcacccaactgcatgactgaaaatggattaatttgtatttctaatggatatacaagaaacacgtgaatatgctaaaataaatttaaggtcaagcaatgcaaagtgttagtgcgtttgccttccactctcagaggcagcctctattatttggttcttgggctgcttcataaaaagttctgtgttttttaatggcctcagcttttgggaggctcaggccacctagcccatcaggagaccaggcccgaaggatggatctgaagagtgggcaacggagagttaaaccagggctgacttcaacaggcccagtcaagtcaggggcaagcacattgtccatccactggaagacggaaaggggagaggaaggcaggccctcccgactcacaggtcacctcgcaactttgctaggcactacccaccctttagggataagtgaagtatgtggtgggcatacaaggcgcacaggggagtcattctggcaaattccaagaaggttttaagggctcccgaggcaggcaggcccagttgctgtttggagcttcctttggggtgggaggatggcgggggcagggggccggggcggtgccttaacgaggggagatgcttttaaatagctgccttccaaaaaccatcctccctgcttctttgagaagcacccagctgttgtttaccctccaggacagcaaatccggttatttgtctctctattccgtgatattataaagtaatgaatggtccattaaactaagtttgggatcccgtctccccacagccacctcctcgccggcaccctcagccggggaggccgtaggctcgggctgcagcctggcagcctcagtccccctccctccaccatttccctctactccctccctctcctgcaccccctccccccggttatttgggagattagagttcattaattaaatcctgtgcttagatcgaactgtaacattattccaatcacatttatcttgcaggcggcggaggagatggcagcctcgctggaaacgcgcgggggagcctgagccggcggccggggacgcacggcgctgcgcgctccttcgccacgccgccgcgcagcccctccatcttcctgctcggcaccgggccccgcgcgcccctgcctacggggtcccgctgctctccggggctcctgccagccccaacccccggccccggtggcctccccccacccccgcccgggtccccctcctccgccacacgcgcgcgcgctcacacacacacacacacacacacacacacacacacacatatatacacgccagcgagctgctggccgctcaatggaccgatttccccggtttccctgaacccagcccagcccgggatgagaaactgcaaaatggcccgggtcgccagtgtgctggggctggtcatgctcagcgtcgccctgctgattttatcgctcatcagctacgtgtccctgaaaaaggagaacatcttcaccactcccaagtacgccagcccgggggcgccccgaatgtacatgttccacgcgggattccggtcacaatttgcgctgaagtttctagacccgtcattcgtgcccattacgaattctctcacccaggaactccaagagaaaccttctaagtggaaatttaatcggacagcgtttttacatcaaaggcaagaaattcttcagcatgtcgatgtaataaaaaatttttctttgaccaagaatagtgttcggattggacaactgatgcactatgattattccagccataaatatgttttctctattagcaataacttccggtcacttcttccagatgtgtcacccattatgaacaagcattataatatttgtgctgtggttggaaatagtgggatcctgacagggagccagtgtggacaagaaatagataaatcagattttgttttccgttgcaatttcgcccctacggaggctttccaaagagatgttggaagaaaaaccaatcttaccaccttcaaccccagcatcctggaaaaatattacaacaatctcttgactattcaggaccgtaacaactttttcctcagtttaaaaaagcttgacggggccattctttggatccctgcatttttcttccacacttcagcaactgtgaccaggacattagttgacttttttgttgaacacagaggtcagttaaaagtccaactggcttggccgggaaatataatgcaacatgtcaacaggtactggaaaaacaaacatttgtcacctaaacggctgagcacaggtattcttatgtacacccttgcatcagcaatatgtgaagagatccacttgtatggattttggccgtttggatttgaccccaacacaagggaagatcttccataccattactatgacaaaaaaggaaccaaatttaccaccaagtggcaggagtcccaccagctgcctgctgagtttcagctgctgtaccgaatgcatggggaagggctcaccaagctgactctgtcacactgtgcctaagaactccaaacggaaagcgccaaatggctgtttaaaaagtgccccaaatcaaattgaatagccttcagaatagaaccctagagaatgtcttataaggattgtctgccatttaaaaggaaagatgtcttttctcttttgcactgctcttttaagagttttagcagatttagcaggacagatgcattgaagccacatggtttagacttgattgataaagggaatgttgcatttgggactatgctgctaacgaaatggtttgaagtattttcatgtttggattttaataataaactgcctctcatttttatgaggactagagctatagtttctgcagctctgctcagatagtcctcataatcagaggcctctggccaactggggcaggacctgttttgctggtgggatcagactctgaaaaatggaaacgtaaaaaactggtttgcatatctcatcttctatctatctccctatctccatctctatcaccatctcactccttccctctgcaactactccctgccctaccaccgtggagtttaataatttgctaggaatcctattgaattcgctttgcttgtatatgttgcatttgtacttgatgtgtttaaggttctgggtaactttgatgcttcatgacaaaataggcaaatcacgatggactcccttgtgattccttttttaaagaaatgcctctgatgcagtcctcaccagtccattcagtcattctacagcaagatggtccctctgtggtgagtgggatataaggcagtgcatctttcatgatcacaaagaaagcctatgttgtggatagcattgcgtctcttgatgtaggcattgttatggcaaataatagcactgtggccacatctgtaaggccattccagcctaaatttagtgtctcccataatcccaacccatgcactaggctgggtgttctctcagaatatagaggcaatgaatcagcttaagaccctgggacacacaaaggaaaaggaagaagaatatttagaagttgttatggaatcctgtgtaccctaaagtgtggtaaccatgttacccattccagctgggttaaagtggaggaggatcttggccaggccaggtgcccaggtgactagtgctgaggtgcgatcgttttccgtatcattgtgtgcaccaccaccaatccagaaccatttgctctctttgagaacattgtagcactggatattccctctttccactgaagtcagatctatacaactacaaattaagcatttcaaaagaaaaagccattgtgcagtggcaagagttggaatccaagattatgtagacctgcgatgaaggaagtagctggccattctcattttctttatttcagccatatgagtagaaatcaaatcattcccatccctggctttttactgagcagcactttgttcttccaattcagcccaacgtctggccaagttgatgttaaattttaataagagtttctttcttctttccaaatgccagtcaagcatatttgttatgcatttgagtggggtagctcattcttttcctgaaatctcatctagattgcttgcaatgcgacaaataactgtttaaaaaatgtgctgtagttcagtgatgagctcattgcccctctttaggaaggtaagatcatgcctaaaattaaaccgaatatggtaaggaaagacactatcgttatgctcacgttctgcctggtcctaaacctgccttattattattttcagaaagcaatctaattagagcaacttgcatagatctagatattaactaatgaaagaaacaccaagttcaaatgtgttaccaattatgacacacattacaatataattataaggggagacattaaaaacattttgtaattcagtggtataatttgatgggtatcacaaccacaccgtgtttgttccctgtccctttgaagaggactgtactaccatcctcacactgtgctctgttgggatcactgagagattgacaactgacagaagtgtttagttggctgttcctgagcacttagttcatttggttatagctaagtgatattaatgccaatattacttgggccagattctgactctggagttttaatcccaatgtgcccattcattttcactaaatataaatgcatagacactttaaaccaagaagattaaaagaggaaaagaccagaatctctaaaaaacagtttactgttctgtagtggacaatttaaattttatctcatcataatgccaaggatttttgtttgttttttaagttcagggagattttttaaatctccttgcagtcttggctccatcttaaccttagagtgggaggactttcccatcccccaccaccgtgttatctatcactttaatgaaaactcaaaatagtgaggaaatggacttttcttcagaacttgaggggtttagagatcaggctcatctctgcttataaggaggacttcctggagatgatcccaatagatcacccttcacttttgaagaatagcagcttctagctgaccatgcaaaatctctgtttgtttttaaagactgtttcaaagattaaatctatacaaccacttttatgaccaaaaaagttgttgtgtcccaagtgtcctaattagaaaggcagctggctctcctgcagctcccaggcttgtgtagtcaagtgcagtgaactgggcagtaatcagctcaggaccattggctctttcctcctctttcagctacagacacatgccctggcttttgcattgaccttgctttgttagttctagactaatttatccttttgtcagacactttcccttttttaggatactcacaacagagtccactttcagctattggaatacattttaccataaagcccccaaggctttctacccataacaccaacacaaaaaaccaattaagttgcagaggggggaaataatcacaaacttttggcaacctgcttaatgctagacgctctgttttcactggttattctgagtgtcatatgcagatgcagatccaagggagacagggctaaatggtggtgtcaagaattcctcccacaccccaaaaattctttccaatatttgattattaaaatatctatcatttctccaccttgtgtctgtgtcttaagtgtctgtgaatattgtaaaagtgctgtatgtttagtagtgttgtgtgcctggcagtgctgactatgactactgtgccatctgtctgtgaccttgatgtcaggtacctggccatggggctaccagcaaggatgtgcaaaggaagaaccgctgcccctgccctcagcttccttatgcccgagccactacttatccgtgaatgtgagtgccaagagaaacctaatttggtggggaagccaaggaatgggagaacgttttttctgatttgagtcaaggcactaattattagacactctcagacaacaaagcggtattgacctgagatcaaaggaagcagggacaatattgtagaatgctaggacactggaaatgaagaggccttcagcttcgccagtcttgattcttgactttacaaatgagaaaatggagaaacagggaggctaggtgatttgccccagatgacactgtcaattagtggagaaattatgattcctcctctagtacttcttggtcttaccagcatcaaatgaagctgggctcacagggaaagtggtttttggtctgggatctgcagagcacataaaataagttagaaagtctataaaagaggaaaaaaggttctcctctccctcccaaaaatgacttcccaacacagaacaataaaggagatgcttgtgtgggtatgcaactgtccaccaattatcacctaccttctccctgagatgaaacaaaacacgcttggtaaatcatgatttgataaataacaattaagttactggtggttcatgcttgacagctgcaatcttacccaataagctattcatcttagtaaaaccttgttttagtaatatacatgcataatttagaagttgaaggctgaaaattgttgtgttcttctccatatatatacaactttcatcggggtcccttgagttaagaaatgccttctattttataggtaatctcaacagcagactttgaaatattgtgtttggttcaatatgctaagaagatatacaaataataataacttcgtgagtcttcatgtgcaaaatgacaaactgagcaattttctgtataattctagattcttaaaaccttttttcccataattgtttgaatgcactaggcacaagtttctgtttaagcctctgcttctccctgaatgtgtagaactgtcactttgcttacaaaggggctgtgtgtttgtggctggcagcccagatagagcactctgggtgctggggattgagggcaccttggccagctgattgacctgtctggactctgtggcccaattaatcgaggccacagatcagttggtactaagcatcaaaatgattcattatgcctctctcacactccgattgctttgccacatagataacagcatttgaaatgggaaacactttagaatgtcattattgtattatatattgtcatcttatgcagtatttctgaaaatttatttttattgtgatgactgattgaagacatatgtgtatgaatagatgttcctcagtgaagcctattctcttgttgttgatgacagtggcatcagagtgaagagttgttgcagagtaactgacttcagtttaaggttaccctggggttctggggttaggacccggattatgcagctgatctcccagcaaacacagctgtatgaaataagcaactcttcaaaatacaattcttgccactcattctggacctttgattcataatgtcctgggataagtccaacttacaaagattcccaggtgattcgtgtgaccaccatttggaaaccagtaatatatacatccggagtcatatataccattttgaacaaagtagctaaatgcttatctctccttgtgcgattagtttcacatgttcgttgaggttatcatgttaaatggcaatatagacacagtcttagtgattcaacaattcagctgtttcagccgaattgaccagttgctaatttataagcaaattgtaactgatcaatttagtcagaatggatgcaagcccaaagacaaggtggagagcaagctttaatatacactttgtctcaaggccagctcttcatatttccctctttatatttcaaactaagaggcagatctcaggtcactcatctttagaattggtgagaatgagaaacagggaactgaagtgattcattcagattcaatttggaagtcattcccagagcctaaaatatttatctaaggggtctgatttatcaacctcaggtagtctccaaaacacaaaggtattcaggctaaaataaaaccaatcaaaaaaggaaattcaggaggctccagttctaagactaacccagtataacaagggtgatcagttattacttgtggccttgtaccacctctgttggataatgtgccaccgtcctaatgaagctttggccagacttctttctatagctgtgcacatagaaaggctttagacaacagtgataccaaagggttcctttgattttccttctgtgtgattctcagacagttttagctctttggtgtgctgccaaatgtttaacaactggctctggaaaacagtggaacccagatttttagcacctaccaatttctatggtgtaaatactctcatctcagccaatttcaggctactaacttaatgtcaaccagctgaaaacacaacaatatgttttcaagagccagtataagttggctccaatacagcatgagccagctccagcatagcactgcctgaacaatttttaagtcagtgagtaccaaataggagaggctagcagaggctttggagggacttttaaatgtcccctccaccaagggaagcatttccatgttggttagttttactgatttttagtaaaagagcatattattggatcccaaggtgttcaaatattccacgtgactcttaggaacctctcaacagactccccagtatcttgggagattaccaactgtggcttttctaatttctaagggtgaccctccaggaaaacattctttaatttaactaccagttaaaaccatgtttggctgatcttttttaaaaaatctatacctatagttcatcacttgtttccccaactttgtcattttccctatccacttgcccctcatccttctgacacaataaaaaaaatacaggtacccacaaaacagtgcctgcaaaggagcaggggaagaacaaggcacccagtaagctcacttggctctacatatctggaaaggcactgaggttccaaggtctctaccccaccaggggacacccagtaaacatcacgctgagagtttaagttgcactcaactggagttgatttgcccttagaaaagtttccaacggtgaagaaataccacttggtaggaatatctctgggcaacttcattgctgactgggcaaactttgtaggataaggtgtcatgtgatgtaaggctggaccatgaaaaacaaaaatctactaatacacatttggcccctgcagtcccctggcattgagcaatagagcaactgtcctttctcaccactagttgtgagtgtacttccaactgagtgtttagaaatcaggtaatctggtaatccacagaacaagctttgtttgcaaattgcaaatttttctggtagaagtcattcttaggtgggcttcattaaatctttggagaggcaatgctgggaaaaaatatgcctaattcctaggacacagtgagtggccgtaagttgttatctgcatgtactaaatcaaaattagatcatgaaggaccaaatctacttccgttgctataataaaataccctacaggttctgtaaggcatttctaaactgtaaatgcttgaaacgcaagttggacattttctatactatgtgtaaaatgccaggttatacctctattttctttcttcctaatggtcattgaaatgagcttgtttctctacattgagcaagctacattttattttaaatgagtcaggtgcatgttcagatgtctgtattcccaatacattgcatgcagcctgagcacaagtatgccttcaccctctggctcttttcctgacaccaaacagagaagtccacagctacaagcacaaggggcttgacaggtaggccttgttttattatgaacaaattcaccagaaaaccattcttgaggaaccagccactcccatagcatttttagtcttagggaagaaaattggcagggaagaaaaattggcagacaatgggaaagaggtttggtcaacctgcataagtggaataaagtcattgaagtacttgcaaaaagaagagggaggtttccctctgaaggaatctagaccattttttaatatggagaataactgtaccccatgttagaagtgctctttagccatatttcaagatccagatctgaacccatactgtgcagaaaagcacaagagcgcttacagccaagagccctgggaggagttgagtaacaggctgagatccggtcaccaagcatcattagttagcactgaaattctcccaggacacaaaacaaatgtatggaaacatcgcaatacactatcatttactcacatgggacaaccacctaagtccatagcaaaactttacagatctagatgttatctcaagtcaggattccagatcaacatcctccatgtggagatgagacaactgaggttcagaaagttggagtgacttatttgcccagctagctaactggaattagagtctgggtctcccaaccactgattctgctacaccacactgtgctgcttccattagttagatggacattgacaattaattgtgaaagcattaattagaagtcaagacaaaagaatgtttgtgatatcttctctcgcttaacatactttgatttcaccattgcatttcagcattttaaagaatagtgtatcagtatagaaggaggagcaaagctctttaagagtaatgatgaaaccaaaaggtcaaaaagtagaagaatagcgaatgtaagttattaaataaatgagcaagaagtatgtgtcagggaaaataaatgcttcttatattgttaataccgtgattccctgcccgctcaccccgtcactcaacacttgatgcatttgttttggaaagtgccattttatgctgagatactggtattgaaaacttccctctttcccaactctgtcagaagttctcttgctctttggaagaagccgagggccttaacaaatcagactgacctcccttgtgacaggcagcctcgcctgcccttggaaacaagctgccagaatgtgagggccacagagacccaagagaagccagcactgctagactgaggaacttgtaaatatcttctgctttcttggtgaacaaggacagaggcaattgcgtgtatattgtgactgtagtttgtgaagaaaatgcaaccatttgcttcgacagctcctcaaatgtacttgttaagtgtgaatgtgcctgcctcattgccttgtgttccaaacacagtactgaatgcgttgtttttaaataaaccatttcgttttgctttgggaaaca

SEQ ID NO: 186573 - DNA, 554 bp, Homo sapiens
  Payload ID: 16736
  Gene Symbol: ST8SIA3
  Gene Name: ST8 alpha-N-acetyl-neuraminide alpha-2,8-sialyltransferase 3
  ENST ID: ENST00000586360
  CDS Start-End: 1-377
ataaatcagattttgttttccgttgcaatttcgcccctacggaggctttccaaagagatgttggaagaaaaaccaatcttaccaccttcaaccccagcatcctggaaaaatattacaacaatctcttgactattcaggaccgtaacaactttttcctcagtttaaaaaagcttgacggggccattctttggatccctgcatttttcttccacacttcagcaactgtgaccaggacattagttgacttttttgttgaacacagaggtcagttaaaagtccaactggcttggccgggaaatataatgcaacatgtcaacaggttctttgcaactttacattgctgtaaacagtgctctgatgaacatctttggaattaaatgtttgattatttccttagataaatcccttgaagtggattttcaagagaaaacttaccaacaagttaggagaaaaacatgcatcatcattaaggaagacttcctcaacagaaggattatgcattattgtgtactaaataaggaaaataaataagctattgttgtgtgcttcttcaa

SEQ ID NO: 186574 - DNA, 6303 bp, Homo sapiens
  Payload ID: 16737
  Gene Symbol: ST8SIA4
  Gene Name: ST8 alpha-N-acetyl-neuraminide alpha-2,8-sialyltransferase 4
  Uniprot ID: Q92187
  ENST ID: ENST00000231461
  CDS Start-End: 312-1391
gctgcagaagctgccgccacctccaatgcacaaggtgtctcatctgaaaagaaacctgagccccagggaggcggcgcggagcgaccctggcagagctggcgcaaacagggcgagaggtcgctgggcagcgttcgaggaccagagggagctcggccacagaagaccccagtgatctgatcccgggatcccggctccaagctctcctcgcattttacagatttcacccccgcgactatctccccaaaacggagcctttatatcaagagaaggtgcgggagctggggcaaccaggactttctcgggcacccaagatgcgctccattaggaagaggtggacgatctgcacaataagtctgctcctgatcttttataagacaaaagaaatagcaagaactgaggagcaccaggagacgcaactcatcggagatggtgaattgtctttgagtcggtcacttgtcaatagctctgataaaatcattcgaaaggctggctcttcaatcttccagcacaatgtagaaggttggaaaatcaattcctctttggtcctagagataaggaagaacatacttcgtttcttagatgcagaacgagatgtgtcagtggtcaagagcagttttaagcctggtgatgtcatacactatgtgcttgacaggcgccggacactaaacatttctcatgatctacatagcctcctacctgaagtttcaccaatgaagaatcgcaggtttaagacctgtgcagttgttggaaattctggcattctgttagacagtgaatgtggaaaggagattgacagtcacaattttgtaataaggtgtaatctagctcctgtggtggagtttgctgcagatgtgggaactaaatcagattttattaccatgaatccatcagttgtacaaagagcatttggaggctttcgaaatgagagtgacagagaaaaatttgtgcatagactttccatgctgaatgacagtgtcctttggattcctgctttcatggtcaaaggaggagagaagcacgtggagtgggttaatgcattaatccttaagaataaactgaaagtgcgaactgcctatccgtcattgagacttattcatgctgtcagaggttactggctgaccaacaaagttcctatcaaaagacccagcacaggtcttctcatgtatacacttgccacaagattctgtgatgaaattcacctgtatggattctggcccttccctaaggatttaaatggaaaagcggtcaaatatcattattatgatgacttaaaatataggtacttttccaatgcaagccctcacagaatgccattagaattcaaaacattaaatgtgctacataatagaggagctctaaaactgacaacaggaaagtgtgtaaagcaataaagcacattttgaaacaaacaatatgcacttcttttctgaagatgcttccgaagatttgaaaataggatccaaaacacggctgggtttcagcatccaccaatgaactgaaaggtgaataaaggacgttcatgagaaatcgactaccagctgatgaaatacctgcaaagtgctctaaaaattaaatattttgactttaagggtcctagtaagtgccacttccactaagaatacagtttgaatgtataatcagtagtgtttacaagatccaacagtgcactcatcattagttaacaaagcaaatatgttcatcactgtcaggctgcccacagcaacaccaagcatattagaagaggaaccccaggaacgcaactcagaccttgggaaattaaaccatccttgtcagcagaagccaagatggaagcagtttgagcaatgaaatccgtaagattaaacaactcaagtaaatgcttcagtcaggactctgagtctgatcatgaattttatgttttaatttatgttttttttttgtcttctggaatctcttttggtttggatattgggatgcttagaaatcctttctgagatgcatatgagtgaggaaataaactttaagtaattatttttaaagttcttatactttttaaaagctatcacacaaagacttttttttttttttttgtctcgctctgttgcccaggctggagtacagtggcgcgatctcagctcactgcaagctccgcctcccaagttcactccattctcctgcctcagcctccggagtagctgggactgcaggcgcctgccaccacgcctggctaattttttgtatttttagtggagacggattttcaccgtgttagccaggatggtctcaatctcctgacctcgtgatccacccgccttggcctcccaaagtgctgggattacaggcgtgagccaccgtgcctggccgacatttttaaaaaagttttattttgcacggctctaaacctccatgttattttccagtggtgtagaaggtaccagctaaagtgaaccactatgtaatattaggccattctaaaggaaagatgttccatgtcatcagagatggtaaaataggccgggaaaaaaaaatctttggtaccaaagattacacttgtgtttctacacagcaaaccatttttctttcatgaaaataatatattattaacatgaatatattattttgctattaatgtgaaagttgtctctaaatattttttaattttcaaactcatactttattttcatttgaaatgtttttcacaccttttgcattacataataattttgtggaagcattttgccctttagaataaatattagattgatatagctgaaatgtgacttccagttctttgatattccccttgttattcaaatagaaatatggaaatgctttatatattactgttaaatttcttagtgcagaaataacattattaatagagtattgttttcaaaacagagatgattaatttcaagaggtttaacagtgaaattgtgtcaatattttgcatttaaaatgaatttaattgaccgatattttctgtagttaaatttagtcacaatatcacatatgttcttcaagaaacacatgaaattattaataaagtaattaaaaaatttttaatgtataacagaattgaccaataggccagttttctggtaacttatgatagtagattgtttctttagaaactgggcagaagctctgcattctcacttgtactttgatttcttatttcttgggcaggcaatttgaggaaagaagaaatggcatggggaatatatatgttttgtttcttagggaaaacagtctgagaaatgaataaaaagcatgaagtacgtgtgtgtgtgtgtgtgttaccatggaaaaggatattcacagtagtacagttctcaatatttttaattagatgtcatatttttttaatatagtaaaaccttgggatatagaatattacatcttttgagaatgtatgtgtctctaagtaagtaaaatctaatgcgtataggagactgatagctaaaaatgaatggaacattaatgtacttttataattaaacctcttatctatcagaaattgtaagagaatagatacatgttttgaatgtaaagttgaaaagtctggtttacttaataaattgaaagtgatttataaaatctaaatttggactacttgcaaatgataagctattctagtagcctttagtttaaatccaacagaaatctagaagtcacaagcaaatatcttaaaggtaaaatccatctgggcactcatttaaagtatatcttaaaaaagcagcagcaaggtaccttgccatttttagcatattttcttcctttttcttttttcttttttttttttttttgagatggagtctcactctgtcacacaggctggaatgcagtgatgccatctcagctcactgcaacctccacctcctgggttcaagtgattctcgtgcctcagcctcccaagtagctggggttacaggcgcccaccaccacactcggctaattttgtgtttttagtagagacaaagtttcaccatgttggccaggctggtcttgaacttcctgacctcaggttatccacccacctcagcctcccaaagtgctgggattacaggtgtgagccaccgcagccggaccatttttagtatattttcagtaaatacatttaaacaatgttaaggccacagcacacatatctcagccattcattgttctgtgcattgatgtttatctcatagatgcattgagtagtgcctttttagctttttcacattactttgtcaccatatcctttgtgttctctaaatacattgcccacttccaaaaatgttcagcatgaaaaaaagggcttcagtgtcgattgagattgcttttgttcatctcagggatttcaatagtcaagaatgaattcagttaaaggtatttagggttcaaagaagacaaactgtacaagcccatttcattccttgttgtatacctttccatctgccctcccattttaactatctactgtggcctttttatggaaacagagcaagatcaatgaaggctaatggcaagaataagaaaaagagttgagatttaaccaatagcggagcataaaggatcatgacaaaatcaaattataaaagcatacttgaaataggtggagctttttcttttgaaaatatatattcacaattttaatattttaatttattttttactatttaaccctgtacttggcaatgctcaggcagctgattgtgaaatattcttgtcctttacagaacatggttgttattgtgctgttgacatgaatagaccatggaaacattttcatcattattattcagcctgtgctgtagttaatgttaagttgctgaaataaaaagtgagcaagtaatagattttcttggcaaatctaatgattcagcccacaggactgttgaaactactgcggaagtttttctatctgaaagaaggtgctgggcattcaaatgtgttcatgtattgtatatcatatgaattgtatatcaattactaatgggaatttctacatatatgcttacaaaagcaatttatttaagtaatgctaggggtagtgtacataccaattagttattcagctactatacagaaaaaggatgaacaaattaatttatttctaattgagccagttagacataatgcatataacgtgatatttggttcatgaaagagttgttttcatgtggttattgtagggagtatatataattgtggaaggggtatgggaagagttgtgtatagttagttgttatctctacaagtttgaaagttttcccatcaaacattatcaatataccaatgttttaaaaattgagtgagggttattatttgtatttgatgaaagaaaatccaaataaagcccacctagaaatagatattttattatatatgtgctatagatatacctatatagtacaaatagacatgtgtgatgcatatatacaatgttatatatgtgtatatgtctgtatacacactgagtctgtaatatgtatacactaaatttgtgttatgctaacatcttcagggtctgcactgtgaactcccctggagataagtaagtccactttagaataaagaagttcttttgagacttcagttactaacgtgctttaagaggtatctactttataactgaattctatgtcgttcatacgtagagttacagtaagggtctagtatgtccaaatcttaataataaagaagaaaagtaaaggcttcaagctagcaatgtattcgaattacagttttcagattgtggctccaggccttgtgtttctcatttaagtagcaccttttaataaaaaccgtttctttgtgtaggcaaaagcacaagtgtttcaaatgtaaatagcaggaaaaaaaaagagtttacagagatagcattgctgcacagaataattgctactgagtatttcttatagaatttgtggaactgaaagatgaggtttattctgtcaagttcaagttcattctgttcaacactgttttcttattgtttgtgtatagcaaccgggtattattgttttatcatttgtaaaattgtaaaataaattaatccctttttttcactgtttctcttatctcatatatccaagcccttggttatactttgtatgtcaatgttaggtgatcatttttaacaagctttggcttgtgctttgcttttccactccccttagccctagtggttggcaattaggcaaaccatttatttttaagtgtatacatgggaatatgaacaatgtcaaaaaccccatgaatattaggaaatccttaacgatattttgtgtagcacattctgtttgcggttgagggaataaagtatttcacaagtga

SEQ ID NO: 186575 - DNA, 655 bp, Homo sapiens
  Payload ID: 16737
  Gene Symbol: ST8SIA4
  Gene Name: ST8 alpha-N-acetyl-neuraminide alpha-2,8-sialyltransferase 4
  ENST ID: ENST00000523381
  CDS Start-End: 270-410
tctgaaaagaaacctgagccccagggaggcggcgcggagcgaccctggcagagctggcgcaaacagggcgagaggtcgctgggcagcgttcgaggaccagagggagctcggccacagaagaccccagtgatctgatcccgggatcccggctccaagctctcctcgcattttacagatttcacccccgcgactatctccccaaaacggagcctttatatcaagagaaggtgcgggagctggggcaaccaggactttctcgggcacccaagatgcgctccattaggaagaggtggacgatctgcacaataagtctgctcctgatcttttataagacaaaagaaatagcaagaactgaggagcaccaggagacgcaactcatcggcgcttctggtggaggagttgactcataaaaccatcaaatcatctcattgactgtctttctacccaagccacgtggagaggccagttttgagttttgagtaaactggaatggaggttcggctccagatcccggtccagtattcaagtgagagatggtgaattgtctttgagtcggtcacttgtcaatagctctgataaaatcattcgaaaggctggctcttcaatcttccagcacaatgtagaaggttggaaaatcaattcctctttggtccta

SEQ ID NO: 186576 - DNA, 1794 bp, Homo sapiens
  Payload ID: 16737
  Gene Symbol: ST8SIA4
  Gene Name: ST8 alpha-N-acetyl-neuraminide alpha-2,8-sialyltransferase 4
  Uniprot ID: Q92187
  ENST ID: ENST00000451528
  CDS Start-End: 260-766
aacctgagccccagggaggcggcgcggagcgaccctggcagagctggcgcaaacagggcgagaggtcgctgggcagcgttcgaggaccagagggagctcggccacagaagaccccagtgatctgatcccgggatcccggctccaagctctcctcgcattttacagatttcacccccgcgactatctccccaaaacggagcctttatatcaagagaaggtgcgggagctggggcaaccaggactttctcgggcacccaagatgcgctccattaggaagaggtggacgatctgcacaataagtctgctcctgatcttttataagacaaaagaaatagcaagaactgaggagcaccaggagacgcaactcatcggagatggtgaattgtctttgagtcggtcacttgtcaatagctctgataaaatcattcgaaaggctggctcttcaatcttccagcacaatgtagaaggttggaaaatcaattcctctttggtcctagagataaggaagaacatacttcgtttcttagatgcagaacgagatgtgtcagtggtcaagagcagttttaagcctggtgatgtcatacactatgtgcttgacaggcgccggacactaaacatttctcatgatctacatagcctcctacctgaagtttcaccaatgaagaatcgcaggtttaagacctgtgcagttgttggaaattctggcattctgttagacagtgaatgtggaaaggagattgacagtcacaattttgtaataaggtgagctttcttctgctttttgagattgtaagtttttcaaagatattttacttgggggtggaaaactgttagaaaattttaaagtattactaaaacctcaaacaaatatttgtctatgatatccttttctgtgcaacatttaaattacatttaccctggaatagaatattataattattgcgtagttgaaagaaaaagtgatcctgtcatagcaacaagattcacacagctttttttggtgaggtgaggggggaggcaaatggcaattttattaaatttaatattccacacaaacttttttcttagtatctcttcttcatactcattagttttgtgtgattttatttgttgtataaagattatgaatattactatggaatgatgtaatagatttatgttaatgttactttttattaataattatctaggagatagtaagaacatagtttagcaagtttatatttgatatcctgagccatatttctttaatttctctttatatgtggtatttgtgtatgttagtatatttgaattttatgtttttttaacataattaagcgtgcatgtttgtttttcattaacggttaaaagatatttgatgaattgtgtgtttgattaacctattaactgaaaaaaactcaacagtagaaatggaattataatcacatcataaatataagcagtttttaatgatcaatttttatatctgtacagtttttttggattgttttagttccttagaaaaattagctaaatgacagaaacatggatattgaaatatgaaatagtacaatataaagatagatagaaaagtatgctgagttgacatgttgaaaaacacagtctcttgaagatatactggaatacattatttttgaatattttgaatattttttgaatatttttaaataaagtcttaaaagcataaataggtaactacttttaaaaaaaaagtcatgagaaatcacactcaagcattatcaagtgaagaaaattcataatagcaaataaaactgcaaacattttacctta

SEQ ID NO: 186577 - DNA, 2716 bp, Homo sapiens
  Payload ID: 16738
  Gene Symbol: ST8SIA5
  Gene Name: ST8 alpha-N-acetyl-neuraminide alpha-2,8-sialyltransferase 5
  Uniprot ID: O15466
  ENST ID: ENST00000315087
  CDS Start-End: 662-1792
ttttaattccaagattcaaacccggcgttttgcgctccgcccctccccctccccacggcccgcctatcattagccagactgcgcgggtgttttgtacgccccctccccccgtccctatcggcagaaccggaggccaaccttcgcgatcccttgctgcgggcccggagatcaaacgtggcccgcccccggcagggcacagcgcgctgggcaaccgcgatccggcgccggactggaggggtcgatgcgcggcgcgctggggcgcacaggggacggagcccgggtcttgctccccattggccgccacctcggcgggaggggccgcctccggctcgtggcacctggcgtctcccctccgcggggaaatcggcggctacccggcaccggcgcctggaggtaaaggtacccgggggtggggaaggcccctggccgcggcagagctccctgccaccggccctgtcctgcttgccgccccagcgcctgcgacgcttggatgcccccagctccggccgcgccaaccagaaactttgcccctcgaagtcccccgcctgcctgaccgcaccgtgaggcgccaagtcggccgcgcgccccccggggccccggaaccccgcgagtcattgcctggccgccccgtaccccgcgcccgcggcgcccggtagccaggatgcgctacgcggacccctcggccaaccgggatttgttggggagccgaactttgctcttcatcttcatctgcgcctttgccttggtgaccttgctgcaacagatcctgtatggcaggaactacattaagaggtactttgaattttatgaggggccttttgaatataactccacaagatgcctggagctgaggcacgaaatattggaagtgaaggtgctgtccatggtgaagcagtcagagctgttcgacaggtggaagagcctccagatgtgcaaatgggcgatgaacatctctgaggccaaccagttcaagtctactctgtccaggtgctgcaacgcccctgcctttctcttcaccacccagaagaacactcccctggggacaaagctcaagtatgaggtggacaccagtggcatctaccacatcaaccaggagatcttccgcatgtttcccaaggacatgccctactaccggtcccagtttaagaagtgtgctgtagtgggcaacggaggcatcttgaagaacagccgctgcgggagggagatcaacagcgccgacttcgtcttccggtgcaacctgccccccatctcagagaagtacaccatggatgtgggggtgaagacggatgtggtcactgtgaaccccagcatcatcacagagaggttccacaagctggagaagtggcggcggccgttctatcgcgtgctgcaggtgtacgagaacgcgtcggtgctgctgcctgccttctacaacacgcgcaacaccgacgtgtccatccgcgtcaagtacgtgctggacgacttcgaatcgccgcaagctgtctactacttccatccgcagtacctggtcaacgtgtcgcgctactggctcagcctgggggtgcgcgccaagcgcatcagcaccggcctcattctggtcactgcggcgctggagctctgtgaggaggtgcacctctttggcttctgggccttccccatgaacccctcgggcctctacatcactcaccactactatgacaacgtcaagccgcgtcccggcttccacgccatgccctctgagatcttcaacttcctgcacttgcacagccgaggcatcctccgcgtgcacacgggcacctgcagctgctgctgatggctgccagccaggctgcccggcaagcggcgccccctctcctgctgtccctcctggtggaactgggagccccgaaccgggcagcgtggggtcctggcgttcaggctgtctctccctccattgttcagctctgtacttggatcctggggtagggaggcagggttaggaaccggggcagagtcagctctgtgctgagcctcctggcctggcccccaccggtgcatccgcccagtgcgtccacctgccctggctagcatgctgctgggccacaccccaagatcaggggccctggggacggcaagtgaataaagcacatttccacccaattttgtcatccgagagagagcacaaactgcaggcccttgttgcagctgaaggaagaccctacagagaatggaattgagagtggagacaggacacttcacaggacacttgagcacagtcaagattttattcacacttttggttcctgtgttttatatcgaagacttagctatgaattgctatctaaatctcagagcttagaagccaacccagtgactagaccttccagtgaagaaagtgatctcaagaggtccagggacttaacagccaagccacaccacccgacaggttcttctgtgacaccgagagatctaacccaaggcctgggttatgtcttagtcgagacatcatcatctgagaagcaccacatcctttcagacacatcctcggacacacatgcggtcttggtgcccccaggttcaatcctgcgttagctcttttgatgagaaggaaataaaccaaaccagccacttgcactatggcttccaagccaatgttattgactcaataagtgcttagcaattggcttcctcttttgtcttcctattttcagctccatttaaaccaggagttatttataaagacctcttcctctcatgt

SEQ ID NO: 186578 - DNA, 1499 bp, Homo sapiens
  Payload ID: 16738
  Gene Symbol: ST8SIA5
  Gene Name: ST8 alpha-N-acetyl-neuraminide alpha-2,8-sialyltransferase 5
  ENST ID: ENST00000536490
  CDS Start-End: 303-1340
gaaatcggcggctacccggcaccggcgcctggaggtaaaggtacccgggggtggggaaggcccctggccgcggcagagctccctgccaccggccctgtcctgcttgccgccccagcgcctgcgacgcttggatgcccccagctccggccgcgccaaccagaaactttgcccctcgaagtcccccgcctgcctgaccgcaccgtgaggcgccaagtcggccgcgcgccccccggggccccggaaccccgcgagtcattgcctggccgccccgtaccccgcgcccgcggcgcccggtagccaggatgcgctacgcggacccctcggccaaccgggatttgttggggagccgaactttgctcttcatcttcatctgcgcctttgccttggtgaccttgctgcaacagatcctgtatggcaggaactacattaagagggtgaagcagtcagagctgttcgacaggtggaagagcctccagatgtgcaaatgggcgatgaacatctctgaggccaaccagttcaagtctactctgtccaggtgctgcaacgcccctgcctttctcttcaccacccagaagaacactcccctggggacaaagctcaagtatgaggtggacaccagtggcatctaccacatcaaccaggagatcttccgcatgtttcccaaggacatgccctactaccggtcccagtttaagaagtgtgctgtagtgggcaacggaggcatcttgaagaacagccgctgcgggagggagatcaacagcgccgacttcgtcttccggtgcaacctgccccccatctcagagaagtacaccatggatgtgggggtgaagacggatgtggtcactgtgaaccccagcatcatcacagagaggttccacaagctggagaagtggcggcggccgttctatcgcgtgctgcaggtgtacgagaacgcgtcggtgctgctgcctgccttctacaacacgcgcaacaccgacgtgtccatccgcgtcaagtacgtgctggacgacttcgaatcgccgcaagctgtctactacttccatccgcagtacctggtcaacgtgtcgcgctactggctcagcctgggggtgcgcgccaagcgcatcagcaccggcctcattctggtcactgcggcgctggagctctgtgaggaggtgcacctctttggcttctgggccttccccatgaacccctcgggcctctacatcactcaccactactatgacaacgtcaagccgcgtcccggcttccacgccatgccctctgagatcttcaacttcctgcacttgcacagccgaggcatcctccgcgtgcacacgggcacctgcagctgctgctgatggctgccagccaggctgcccggcaagcggcgccccctctcctgctgtccctcctggtggaactgggagccccgaaccgggcagcgtggggtcctggcgttcaggctgtctctccctccattgttcagctctgtacttggatcctggggtagggaggca

SEQ ID NO: 186579 - DNA, 13761 bp, Homo sapiens
  Payload ID: 16738
  Gene Symbol: ST8SIA5
  Gene Name: ST8 alpha-N-acetyl-neuraminide alpha-2,8-sialyltransferase 5
  Uniprot ID: O15466
  ENST ID: ENST00000538168
  CDS Start-End: 302-1540
aaatcggcggctacccggcaccggcgcctggaggtaaaggtacccgggggtggggaaggcccctggccgcggcagagctccctgccaccggccctgtcctgcttgccgccccagcgcctgcgacgcttggatgcccccagctccggccgcgccaaccagaaactttgcccctcgaagtcccccgcctgcctgaccgcaccgtgaggcgccaagtcggccgcgcgccccccggggccccggaaccccgcgagtcattgcctggccgccccgtaccccgcgcccgcggcgcccggtagccaggatgcgctacgcggacccctcggccaaccgggatttgttggggagccgaactttgctcttcatcttcatctgcgcctttgccttggtgaccttgctgcaacagatcctgtatggcaggaactacattaagagaggcctccagtttggttggcagagtggtgaccagctgaccaattggacggggctctttaatgtcacggatgatccagcagtgcagagcggcagtgactccagctccaggtactttgaattttatgaggggccttttgaatataactccacaagatgcctggagctgaggcacgaaatattggaagtgaaggtgctgtccatggtgaagcagtcagagctgttcgacaggtggaagagcctccagatgtgcaaatgggcgatgaacatctctgaggccaaccagttcaagtctactctgtccaggtgctgcaacgcccctgcctttctcttcaccacccagaagaacactcccctggggacaaagctcaagtatgaggtggacaccagtggcatctaccacatcaaccaggagatcttccgcatgtttcccaaggacatgccctactaccggtcccagtttaagaagtgtgctgtagtgggcaacggaggcatcttgaagaacagccgctgcgggagggagatcaacagcgccgacttcgtcttccggtgcaacctgccccccatctcagagaagtacaccatggatgtgggggtgaagacggatgtggtcactgtgaaccccagcatcatcacagagaggttccacaagctggagaagtggcggcggccgttctatcgcgtgctgcaggtgtacgagaacgcgtcggtgctgctgcctgccttctacaacacgcgcaacaccgacgtgtccatccgcgtcaagtacgtgctggacgacttcgaatcgccgcaagctgtctactacttccatccgcagtacctggtcaacgtgtcgcgctactggctcagcctgggggtgcgcgccaagcgcatcagcaccggcctcattctggtcactgcggcgctggagctctgtgaggaggtgcacctctttggcttctgggccttccccatgaacccctcgggcctctacatcactcaccactactatgacaacgtcaagccgcgtcccggcttccacgccatgccctctgagatcttcaacttcctgcacttgcacagccgaggcatcctccgcgtgcacacgggcacctgcagctgctgctgatggctgccagccaggctgcccggcaagcggcgccccctctcctgctgtccctcctggtggaactgggagccccgaaccgggcagcgtggggtcctggcgttcaggctgtctctccctccattgttcagctctgtacttggatcctggggtagggaggcagggttaggaaccggggcagagtcagctctgtgctgagcctcctggcctggcccccaccggtgcatccgcccagtgcgtccacctgccctggctagcatgctgctgggccacaccccaagatcaggggccctggggacggcaagtgaataaagcacatttccacccaattttgtcatccgagagagagcacaaactgcaggcccttgttgcagctgaaggaagaccctacagagaatggaattgagagtggagacaggacacttcacaggacacttgagcacagtcaagattttattcacacttttggttcctgtgttttatatcgaagacttagctatgaattgctatctaaatctcagagcttagaagccaacccagtgactagaccttccagtgaagaaagtgatctcaagaggtccagggacttaacagccaagccacaccacccgacaggttcttctgtgacaccgagagatctaacccaaggcctgggttatgtcttagtcgagacatcatcatctgagaagcaccacatcctttcagacacatcctcggacacacatgcggtcttggtgcccccaggttcaatcctgcgttagctcttttgatgagaaggaaataaaccaaaccagccacttgcactatggcttccaagccaatgttattgactcaataagtgcttagcaattggcttcctcttttgtcttcctattttcagctccatttaaaccaggagttatttataaagacctcttcctctcatgtctctgaatcctgcagaatcctgctgtatcgtgttcctcagtcggaaccataggctctgggctggaaagcactgacatgtcaggtggtgagcttagcagagagaaacgagttgtggcctccgacaccagcatcactgaggcttccgctgtgaaggcgggacttctcacagcagaccccagggcctgggcttggggcagtcagctgggcttaggcagagaggggttcacatatcatttcacatctgaaattaattccctttgcttctccctgtggtgtttccaccataaatgggatggtgtctaagagacactgttggtgaactaactgccttagaacttagctttgtggaatcataggatgttagtgctgggaggaggacttcagcctacctgcctggcaacctgtctccctccctccttcctttctccctgcctcctcccctttctccttccctcccttcctcttttcttcctccccttaaacatttctggaaagcctattctgctttggtctgtggttggacttaggaagacataaggataaacaaaggcattatctgtgtcttctgggggtgcagggcccagagattatagacccagtcccacgtgctgggtgctctgggagggttaggagctgtaagagtctatcagggagtgggatctgctatccaatcacctcatttgacaggccccccggctgagccagtcagggacgtggagagtgcaggctttatcccaggcctccaggctcctgatccagggctccgttcttggccaaacttttgtgtcttggcttgggcttcctgtgggggggttgttgtggaacctgtgccctgtgcacaacactgttctcagtgctgactctcacctgcattctgagctctggtcctggttgggaaaacctcaggtggctctgagtctcagtctgctggtcaggaatgtaggggagtagccaaggggatgaaatgatcccaaacacctgctaaaccaggaagaactgcaaaggacagtggatggttattacttgcttgagctctgcctatttctcccagggagggaatttctgggaaagattccagttacctgagatttctagccactgcatggttaattgaacccagttcttgaaaccatggaatataaaaactagaaggttcttaaagaccattttgttccactttaggaaacaggcccagagcaaagatgtgactgggtcaagtcatgcctggggctctactgagtgcctgctgtggacagagccctctactggaagccctctgggtactagttatgttccagatgggcagtgtttgggggaggctccctggtgacacagacatcaggattcccacagctgagggtgttgcaggttggaatctgccccagccagggccctcgtaggagctgaggattggagcatcgggatccagcccacagaggagttgggacacctggctgctggccatattcctgcctgtgggtcttagggccagtccttcctctccctcaatgtctcagtttcctcatctctacaactagaagctttgtaaaaatcttcagcgtctgtacaatgtccttattttggggggacattcatgatgaatggatctaaaccataattaatatttctcattatactagctagcatttatcaagctacgttaagcactttccctatattatctcctgtaatcatcatgagacccctttgggtaaggaggctcccattgtacagatgaggagacagaggcttaaagcaattccaggacttgcccttggtcaggcacccaatggagggaacggcacccaatggagggaactgcacccagatctgtagagccccaaagtctgtgctccaaacctctgtcttagcttcccagacagtgacaccagaacatgagggatcctgaccaagatgcccctgcaggatagtacggggccctcctccagggacaaatgctctaggaggctgtcatcgtccgggaagcagcctgtgcttataggtgcctctccctaaccctgccgcctacagcagtagcgacttacccacagtggcactggaggggaactgaggccatcgtcacatttttaaggtgaggaaagatgcccagagatagcacatgttaagtgacaacacgaatgacttgcccagggctacatggccagcttgtggctcaactgggactcaccagtctcctgactttcaggatatagtttttctgctgcagccagtgtttataagaaaaacattttttcaaaggctcagagagacctggtgttgactctggaagccttctgccatgttcctccacagccctgtcaccacgccaccatgcagtgcagactacccattgaattattattcaagggaaatcgattcccgtaaacaaaacaaccatcatgtcttcctttgtgctaaacccactgctccaggcttgaaaggcagcaaaaacaagtaaatgactcagtgcttagccaagcacaaagaaaggtggctcaaggtcagaggcagcgtctgagaccatttcagcaatgctgctgcggcagctctgcccactaatcacctggtgcccagagacagcatgtgctcatcgcccttgactttgctgagagcagggaggaagcagagcagtgcttagaaacaactgaggcagagtagagtgctggccaatttagtgagtgaattggtgaataaattatatttattgagtgctcatgttgtgccaggcatggtgccaggtgccggggagctagtgatgaacaaaacgtcgtccctgccctccgggagtttgtggtctggtgtgtgtgtatacagacgttaaatgacgaatcccacaaacgtacgtgggagctggttgtgctgaacactatcaaatccagtctcagggacagttatctgggagaggtggaggaggggatgaccaaagtcaattccgaattctgaaggttggcagcataaaaagtgtaatgagcaaagcagcagatacttctcagatatcatccttgacatccgtgtaacatttgacaaggttggcctctctggtcttttttgtttgtttgtttgagacagagtctccctctgtcacccaggctagagggtggtgatataaatatggctcactgcagcctcgacacctgggttcaagtgatcctcccacctcagcttcccaagtagctaggaccacaggcacgtgccattgctcccagctaatttgaaaatttttttttttttgtagaaacggggttttgctatgttgacgaggctagtctcgaactcctgagctcaagcaatcctcctgccttggcctcccaaagtgctgggattacaggtgtgagccactatgcacagtctctctggtctttctaaagtcctctcctcttctgttttctaactattcttccctgactttcctcctgtctctctgaatgctccttctcaggttcctttgtggattcatcttccgtgaagcttcctcagggttctcttctcttcctaggagcattcctgcagaaatctcatctattcaaagccttaagtatcttctgccctggcatcttaacccctctacctgcaggccagtcctccctaggagcattggaagcatgctcactgtggcctcctgcatgtctgtgtctgcacagcatctcagacctcaacatgtcctcaactggtatagttaaaagaacaatctgaactcagagtctcctcctactacttcgtagctgtgtgaaattgagggagctccagaagcccctggaggctctggactcatcatctgaaatgaggacaggataccaaccacaacagctgttgcaaagctaagtgaaatagtgttgcacaatgcctagcacagtgcccagcacaaactagacactagcaagcacaggttgccttggcccaaaacttggatcacctttgcctcttccttctccttcactctttatgtctatttgttcactgtatcttgtcaattccaactcataaacatccctttaagtcattccctccctgcaacccctctgctactgccctaacccagaccatctgatggatctttttgctttcagagaataaccttccaaaaataccttttgtggggcccattgcctacctgtatcataaacttcaggttctttaccaagtcatgcagggaatgtcccaagctggcttactcaccttcccagagatcctcctgccacctccctgccctatcccatactattccaggcacctttgcacactctgttcaaacacctggaatggccctcacactcctaagttcctctctccttccttttatctggccacttttgcagaagtcaggtaatggccccctgcatcctcccctctagagacctgggctgggcactctctcctctgtgcttctgctgcaaccatcaccgactccattaggacatcctcacagcacacagcataagggcccgtgtgtccttgatagaaggtttgccttctccccaagggaagacacgatatctaagctcattttgtattgccagcactggcggggaagcacatgccatggccactcaacacatgtttactacagtaatgaggtctctggttcctgggggactccagcagttcaggataccccgctaataaactgagtaacaccttggggaaattgtcagctgaggagagtcctctattgatttttttacctagcacatcccaggaaggcagagactcctcctgcctgtccaggggagctcggggctcaggaggctgaaatgtctgtctagtgggggcttatgggcttggctagcctctttttgttttccctcattataatcctgctcatctgctttttgctggctagccaatcctttttcctctagtttaaatgaaagaagggagagacattttctgtgtttcttgttgtctacttcttcccttcctcaaagccacacaaacatgtcaggctcttacatcactgtggctgaggtgcagcctgggaagcaatgtaagagggatttatcaatggtgtttaaaaaactagaggaacatgctgaatgctttggctgggaaacaggtgagctgagctttgcaggatgtctgctccagatgcgaaggggaagaccaggagcatggggttgtttcctgggggaaaaaaggtgctgcttctctgagctcaacacacgccctgacctagtctcctccctgtaaccagagcaccctctgggaagaggctaactgtggctcaggggtcaggtgaggccaggcgaggggtgcaccagtggccagggtgtgccttgtgctattgtttagaggtctagtcaaacgaggccagtctgtggaggctgattccatcctacggggcatcctaataaaccagtgtgatcttcaaagggtagactggatagatctacagtgtgatcttcaaagggtagactggatagacctacagtatagatctacagtatagatctacagtctaccctttgaagatcacatgggtttattaggatgccctgtaggatggccttctgatggcctgcatcagaatcacctgggtgcttgttaaaactatggactgagaacctgggggagaggtggcgcctgggaatcagcatgtgtgaggccctatctgttccctgagcatacaactgcttgtggttcagaagttgccaccagttgagtggccatgtatggcttgaaattcagactggagccttgagtaggaaaagaatgaaaagaagaatttggcacacaacccaacttctgccttttctgtacatacaaatataatatataacccactatgtacctagcaacaaaagtcaagtgctcgggaatctaacatttacaaaattggttttgctttaacacaaacaaagatttctttttcatttgtaattatggtaaaatacacataacatagaatttatcatcttaaccatttttaagtgtacagttcagtaatggtaagtacattcacactgttgtatattctgtctctggaactcttctcatcttgcaaaatgaaaactttaaacccattaaatgacaagtcttcacttcccccttccccagcccctggcaatcgcaattctactttctttctctatgaattttactgctctaggtccctcatataagtagaatcatataatatttgtctttctgatgactggcttatttcacttagtatagtataccagagactttttagaatcacttaggtgcaagcagctctcaaatgacattaactgttttgggtgtccctaaagcagaaatctgatttttgtttttgtttttgccttgggcagttgtcctgggctggtcgttggcccctggcttcctgagaccttggccccttgctgagggagagtgcagacctggccttgctctgccacctgggctccactgtcctggccagcatgtcctgagagacaatagccttgctgatcttttagaagtctttaggtattttcccctgcacagtctcttctgagaacctttctttttttttttttttatttcaaaggaaaaaaaccaaaagcaaaaacatacacttccatgacttagctgttggccacaaaagccagaaatcagtgactctctcttcagttgaagatggttcccatggcaacaaatctctcatttccttcaactaaatgatctgctcagctttggggtaaaagttctgttttctctagaattgccatttgcaaccttgtgtgtacataggaatcacctggaagtctttataaaataatccccaagccaggtcctttacttcccggaggatctgattcagcaggcctggggatagggcctggtatccctattttgaaagatctcattaagtggttctgtctcacatggttgggagtcattaccctaaggcaggcagtctatgccttggtgcacgctagagtcgtctgaagagctttaagaaatactcgtgcgaccccaccccttgacattctgagtcaggtggtctgagatgtgacctgaatattaggatttcacaaattctccagatgtttctaatgtgcagccagccttgagaaccactattctaggtcagcagttctcaaactggaggctgcctcagaatctcttggagagctccttgattatgggccccgccccagagttatttggtgaggccagggtggagcatctctaacaagttcccaggtgatgccaatgctggtccagggactgcacttggaggctcatggctctagatgatcctttaatgagattggccctgttctgctgccctgttctttttcctggttgggggttggtggacccttccttccctcagtctgactcaggcgtgagacttcttaaaggtaccagcttttctttttctgaacattttagcattcagataaatattatgacatatttttaaagcaaagtaacatagatttcttctcccggggctaggagcctcagagtctgcctgaattaagaatttatctgtgcctaagattaggatgcatttagtgatctgagctaaggggttggtggatctgcagcaataggttcagcctgtgcctgggtgagggtcaccttgtgaccggcgctgggtaggatctgagtaccacacacttggccctctagcatggggaggacctgtctggtccacctgggggaaagcctggttttctgatgcagacccagccctctgcccacctccacatctgtgcacaaacatggaaggtagcaatgaggaaacacagcaccaggactgccgtgagcccaggagctagggttagagcctcacttctttatgcatttccttttctatcatactttggaacaggcttgagctgaaaccagagagttagtacctggtttctgcctcaatctagtctccctcctccaaagatgcccccacaacgtgggcaacttcaacccccatgagagctcagaattccacattcagcgacaaagttgacaagagcctctggagatctcaaagacttattaaaagtggaaatggctactgttttactgaggcagggtgaaaacacaactcacttcctaggatcgaacccagcaaattcactcagcccccaggtaactgaggactcagttgaaggaaaataattttgagcccctgaaaatagatgctataaagctgtgtatcaagggccaaccattttgctaatatcacatatctcacggcatttgctttgattttaaattcagttctagtgaacttggttctgatttctaatgacaaagcaaactaagagaatgatgacatgtgctagataaagcaagaagtggcagctaatagcctaaattgtgatggcattaagaagaccaaaactagtttacttgttcaacgacagcttgtctttggaaaaaaaaaaacactacattaaggataagaaaatatgtccaggcatggtggctcacatctgtaatcccagcattttgggaggctgaggcgggagatcgcttgagctcaagagttgacgaccaacctgggcaacatggcaaaaccctgtctcaataaagaatacaaaagcacacctgtagtcagtcccagctactcaagaggttgaggtgggagactggcttgagcccaggaggcagaggttgcagtgagctgagatcataccactacactccagcctgggtgacagagccagaccctgtctcaaaataataattaaaaaagaccaaaactaaatacatatctcaggaaccatcaagtagcctgaggtcgttggtcgtttagtggggaagagagggagaatatgttataataaccccgggagcaacacagcatttcagctcagttcaccctgtgacatccaggacatgcagaggtaaaaaagcgttccaacaatgttcaatacactgtctaagaaggcagggctgcgttttatccactttagaattatttccatccccaaacagttaaaatactttcacaaaagtcttggtgcttaaaagataaatgctcagtgacctggaagttcacataaatgaaacggttgatgatctgatgatgaaggataggcgagatgggtaaactcactctttttttttttttgagatggagtctcactctgtcacccaggctggagtgcagtggcatgatctcggctcacggcaacctccgcctcccaggttcaagtgattctcctgcctcagcctcccaagtagctgggattacaggcgcccaccactttgcccagctaatttttggtatttttagtagagacggggccaccattttggccaggctggttgtgaactcctgacctcgtgattcgcccacctcctcctcccaaagtgctgggattataggtgtgggccaccgtgcccggccaaactcactcttttgaacttaacattttccccctgacattggagactctcctgctacctctctcctaagaaaaaagggcaggtggtggggggacaagccccttccaccttcccatctccaagggactttgcagtgtgggtgatggtgtggctgatcatcctctttctgcacctctgattctgcttgtgttgtccttattgtgtggggcaggagggtcaggacttcagctaggggtgtgctggctctgcagtgactcaggcctgggtgttttttggtgaatttaaaaagatgaccatttctgggggaaagtgacacttttactttctccacaccttcaccatccattttcttactggacttcgctgcgttcctgcaaggaggacagggcagagagtagcaaccctccttgccgaggcccagaaagatagcgtggtgtgcccagggcacccatggtgggtgatggacatctccttttgggtgccaaggcttcctcaaggtgggaggaactggagggcaggggacggtggccagtgtcccgctctagccctctagggcacctttttctcccctctgaagttgttaggctgatctggagtctgctccaggcctgggcttcaccctggcctcatgccctgcccagcacctgtgtggagggacctgttcgtattcattcctctttgggggccaagctcagggcacccgaaccagcagccttgggtggctgaacctagtgggacagaagggaggcagttgtatctggcagagtcacccaaggccacaggcctgagcaaagcaggagagcggggcaagctggggtcagggaccatggtgctggccccctgctgctctggccatgtgggaggcagctggaggggtcccaagtggcagctcctgccagactaccccggactcccgagcccatcgtcctgtactcttctccagtgggacgtctggccctcactgtggctagcttctgggcaagtccctctgctcaagatcactttatggggcagctggtgccccctggggctcccacactctgcacatacaatttagggacctggcagggtcttggtggcctgcagcttccctttctggaaccgactcgcctcccatcagagagccataactcttcttcaatacagtattgtttgaactttgaaatatatgcatttgtctatgtattttcttaaaaattaacactgtatctcaataagcatacaatggattgttcaatggtacagtttggaaccaatcccccgccacttccctccccaagtaaagccaggacagatgctggagtcagcatgggagctgtggaaaccttttgccctggagccaggtgcctgtggctgtgcctgggagtggcttcagcccaggcgtggtgtcagtttcctggcacccctgcccaggagcctgcatgaaggcagccgggtctctctctgagtggctggtgcaccggctcatttctgagtggcctcctgcgtatgaagaaaaagcggccacgtggcatgcctcccttccctcccttgctttcctctcaaagagccaagtcacgctgcactgcgctccgtggagcctttcccgatggagaagagaagggaggcctgagatgtcctttgctgggatgtggagaaacaccatctatatgaaaagccccttgcttgctctgctgattttctccctcccctggccctggagagaaaggctgtgccattcaaagacagtttggggacatgggggctgcaggcctgatcttatttttatgcaaattttgttctgggagcagtggtttatacaaactcctgtagcataattccagcttgtgtgtggctgtccttgagtagtgattctgaagtgatgactgtgatgctatgcctaaaaacatcatcagggtactttgtatctgtcactgtgtttgaacggccctcaatttctatctaataaaaccagtcaaatggttcaccta

SEQ ID NO: 186580 - DNA, 582 bp, Homo sapiens
  Payload ID: 16738
  Gene Symbol: ST8SIA5
  Gene Name: ST8 alpha-N-acetyl-neuraminide alpha-2,8-sialyltransferase 5
  ENST ID: ENST00000590488
  CDS Start-End: 158-280
agcaccaagtagagaaaaattagtgaaaaattagtactgtcatcttggagcctgtgtgtaggacctacctcataatttggcccagtgcaaagagaaatgcaaacccccttgttcaaaagtttgaagacagcaagagtggagcaatcagtcaaaatcaatggtggtggtggggacaaatgaacaagtcccactcccaagaagccagcctgcctgtgtgtgtgggagaaagaacctcatctcagaatcccaagacttgttgctagggtgcgtgatgctctaaaaggtccaagaagagcatagaggagctctctaaggagagcttcttgagcgaaagtgtgcatgttatggtgccatccctaactttagagatgatggtcataggatgagcagggccctcccctggccaggatgggatccgtcaggaagactgtttatatccttaggttgaggattattcatcccctttgacggatgagaaaactgagacttcaagaggttcaatgctgagagtcacactgctagtgaatggtggaatgcgagcccccctatccaagaatctctagaggcaagcattgcctggag

SEQ ID NO: 186581 - DNA, 364 bp, Homo sapiens
  Payload ID: 16738
  Gene Symbol: ST8SIA5
  Gene Name: ST8 alpha-N-acetyl-neuraminide alpha-2,8-sialyltransferase 5
  ENST ID: ENST00000591375
  CDS Start-End: 43-207
aaagtttgaagacagcaagagtggagcaatcagtcaaaatcaatggtggtggtggggacaaatgaacaagtcccactcccaagaagccagcctgcctgtgtgtgtgggagaaagaacctcatctcagaatcccaagacttgttgctaggtactttgaattttatgaggggccttttgaatataactccacaagatgcctggagctgaggcacgaaatattggaagtgaaggtgctgtccatggtgaagcagtcagagctgttcgacaggtggaagagcctccagatgtgcaaatgggcgatgaacatctctgaggccaaccagttcaagtctactctgtccaggtgctgcaacgcccctgcctt

SEQ ID NO: 186582 - DNA, 2276 bp, Homo sapiens
  Payload ID: 16739
  Gene Symbol: ST8SIA6
  Gene Name: ST8 alpha-N-acetyl-neuraminide alpha-2,8-sialyltransferase 6
  Uniprot ID: P61647
  ENST ID: ENST00000377602
  CDS Start-End: 76-1272
ggagccgcgagtcggggccgcccgggctgtgcttcgccccggcagcagcggtggcggcggcgcctgtggctcaggatgcggccggggggcgcactgctcgccctgctcgccagcctgctgctgctgctgctgctgcgcctgctctggtgcccggcagacgcgcccggccgcgccaggattctggtggaggaaagcagggaggccacccacggcacccccgcagcgctgaggacgctccggagcccggcgaccgcggtaccgcgcgccactaacagcacatatctgaatgagaagtcgctccaactgacggagaaatgcaaaaatctgcaatatggcattgagtctttctctaacaaaacgaaagggtattcagagaacgactaccttcagattatcacagatatacagagttgtccatggaaacggcaagcagaagaatatgcaaattttagagccaaacttgcttcctgctgtgatgctgttcaaaactttgttgtttctcagaataacactccagttgggactaatatgagttacgaggtggaaagcaaaaaagaaatcccaattaagaagaacatttttcatatgtttccagtgtcccagccttttgtggactacccttataatcagtgtgcagtggtcggaaatgggggaattctgaataagtctctctgtggaactgaaatagataaatccgacttcgtttttaggtgtaacctacccccaaccacaggagatgttagtaaagatgttggcagtaaaacaaatcttgtgactataaatccaagcatcataactctgaaatatgggaacttaaaggaaaaaaaagccctatttctggaggacattgcaacctatggagatgcattttttcttctgccagcattttccttcagggccaacacgggtacctctttcaaagtatactacacgctcgaagagtctaaagcaagacaaaaggttctatttttccatcccaagtacctgaaagatctggcccttttctggagaactaaaggtgtgactgcataccgcttgtccaccggcttgatgatcacaagtgttgcagtggaactgtgtaaaaatgtgaagctgtatggattctggcccttctctaaaactgtagaagacatacctgtcagccatcactattatgacaacaagctacctaaacatggtttccatcagatgcccaaagaatacagccagatcctccaacttcacatgaaaggaatcctcaaactgcaatttagcaaatgtgaagtcgcctaaacaaagtatcttaaaatgggaataattttaatataatgcagtaggtgattaacaatgtctccaaacaccaaaggaggtggctaaagagtattttgagatgagccccaaaatttggtttgaccaaagcttccccactcattttgcaatgatggcaagtcattcaatccttctcatcttcattttttctccttataacatggacaccatatctgactcatacaaatttttataatttatgaaaattattggcatggcctttggtgtgaggtagggactcaaagaatatttctttcttactatttataccagccatctccaccttcaccagaccgataataaaagcatgctttcttggagatctcttctaaagagaatagctgcattaccagtatccattggatttctttctgtggcaggtctctatcaataatatccttcccatttttctgtctcaaagactgcatgcaagaaaattatatacttaagcaaaaagttcttgatcattcgggaatgaaattcttctctgagtatggcagtatgcctgcttctgattaaattcacttttaatagtagctgtgatgatattttggttgaatttaagccatttattttcctcttatgtctacatttcttcatcacttaataattttattttaacttcctgcctcattcttacacttttttctctctcacttatacgatatacttcaaggacgtgaacagttacaatacccagtctttcttacctgttgtcttgcctgtggggtcactcactcaattttattttaaaattactgaataactacttcatgccaggccctgcaccaggctctgtgagaggacaagaaggattattgcctcttgtaggagaaaacagatgtgcatatcattaattatgatggggtatgataagtattacaatgacaaaagctatgaataaagtgctacaaggaacagaagcagggataattaaatccatttcagtggaatctatttcaatgtac

SEQ ID NO: 186583 - DNA, 697 bp, Homo sapiens
  Payload ID: 16739
  Gene Symbol: ST8SIA6
  Gene Name: ST8 alpha-N-acetyl-neuraminide alpha-2,8-sialyltransferase 6
  ENST ID: ENST00000440449
  CDS Start-End: 1-385
ctacccttataatcagtgtgcagtggtcggaaatgggggaattctgaataagtctctctgtggaactgaaatagataaatccgacttcgtttttaggtgtaacctacccccaaccacaggagatgttagtaaagatgttggcagtaaaacaaatcttgtgactataaatccaagcatcataactctgaaatatgggaacttaaaggaaaaaaaagccctatttctggaggacattgcaacctatggagatgcattttttcttctgccagcattttccttcagggccaacacgggtacctctttcaaagtatactacacgctcgaagagtctaaagcaagacaaaagtgcaaaacaaaaagaaaaactataaactccatcttgtagatttgtagattcgccacaaccaagtctgactgtgacactcccaagaaatctgtatgtaatcagcattgcttaaatattgttagatctaatgtgatcttctgctcttaaaactcaagtacatctaagggcattgagaatggaaagtctgagttctggtactagacaagagcagccctttaggccaggcgcaatggctcacacctgtaatcccagcactttgggaggccaaggtgggtgggtcacttgaggccaggagtttgagactagcctgggcaacatagtgagtacccttctctacaaaaaacaaaaaaa

SEQ ID NO: 186584 - DNA, 7928 bp, Homo sapiens
  Payload ID: 16740
  Gene Symbol: STAB1
  Gene Name: stabilin 1
  Uniprot ID: Q9NY15
  ENST ID: ENST00000321725
  CDS Start-End: 77-7789
ctgcctgtgctgtgcctgcctcctagagctcattccctacgccccgactctgtcctggacagcgtgcccaccagccatggcggggccccggggcctcctcccactctgcctcctggccttctgcctggcaggcttcagcttcgtcagggggcaggtgctgttcaaaggctgtgatgtgaaaaccacgtttgtcactcatgtaccctgcacctcgtgcgcggccatcaagaagcagacgtgtccctcaggctggctgcgggagctcccggatcagataacccaggactgccgctacgaagtacagctggggggctctatggtgtccatgagcggctgcagacggaagtgccggaagcaagtggtgcagaaggcctgctgccctggctactggggttcccggtgccatgaatgccctgggggcgctgagaccccatgcaatggccacgggacctgcttggatggcatggacaggaatgggacctgtgtgtgccaggaaaacttccgcggctcagcctgccaggagtgccaagaccccaaccggttcgggcctgactgccaatcggtgtgcagctgtgtgcacggagtgtgcaaccatgggccacgtggggatggaagctgcctgtgctttgctggatacactggcccccactgtgatcaagagctgcccgtctgccaggagctgcgctgtccccagaacacccagtgctccgcagaggctcccagctgcaggtgcctgcccggctacacacagcagggcagtgaatgccgagcccccaacccctgctggccatcaccctgctcactgctggcccagtgctcggtgagccccaaggggcaggctcagtgtcactgccctgagaactaccatggcgatgggatggtgtgtctgcccaaggacccatgcactgacaaccttggtggctgccccagcaactctactttgtgtgtgtaccagaagccgggccaggccttctgcacctgccggccaggcctggtcagcatcaacagcaacgcttctgcgggctgcttcgccttctgctcccccttctcctgcgaccggtctgccacttgccaggtgaccgctgatgggaagaccagctgtgtgtgcagggaaagcgaggtgggggatgggcgtgcctgctacggacacctgctccacgaggtgcagaaggccacgcagacaggccgggtgttcctgcagctgagggtcgccgtggccatgatggaccagggctgccgggaaatccttaccacagcgggccctttcaccgtgctggtgccatccgtctcctccttctcctccaggaccatgaatgcatcccttgcccagcagctctgtagacagcacatcatcgcagggcagcacatcctggaggacacaaggacccaacaaacacgaaggtggtggacgctggccgggcaggagatcaccgtcacctttaaccaattcacgaaatactcctacaagtacaaagaccagccccagcagacgttcaacatctacaaggccaacaacatagcagctaatggcgtcttccacgtggtcactggcctgcggtggcaggccccctctgggacccctggggatcccaagagaactatcggacagatcctcgcctctaccgaggccttcagccgctttgaaaccatcctggagaactgtgggctgccctccatcctggacggacctgggcccttcacagtctttgccccaagcaatgaggctgtggacagcttgcgtgacggccgcctgatctacctcttcacagcgggtctctctaaactgcaggagttggtgcggtaccacatctacaaccacggccagctgaccgttgagaagctcatctccaagggtcggatcctcaccatggcgaaccaggtcctggctgtgaacatttctgaggaggggcgcatcctgctgggacccgagggggtcccgctgcagagggtagacgtgatggccgccaatggtgtgatccacatgctggacggcatcctgctgcccccgaccatcctgcccatcctgcccaagcactgcagcgaggagcagcacaagattgtggcgggctcctgtgtggactgccaagccctgaacaccagcacgtgtccccccaacagtgtgaagctggacatcttccccaaggagtgtgtctacatccatgacccaacggggctcaatgtgctaaagaagggctgtgccagctactgcaaccaaaccatcatggaacaaggctgctgcaaaggttttttcgggcctgactgcacgcagtgtcctgggggcttctccaacccctgctatggcaaaggcaattgcagtgatgggatccagggcaatggggcctgcctctgcttcccagactacaagggcatcgcctgccacatctgctcgaacccaaacaagcatggagagcaatgccaggaagactgcggctgtgtccatggtctctgcgacaaccgcccaggcagtgggggggtgtgccagcagggcacgtgtgcccctggcttcagtggccggttctgcaacgagtccatgggggactgtgggcccacagggctggcccagcactgccacctgcatgcccgctgtgttagccaggagggtgttgccagatgtcgctgtcttgatggctttgagggtgatggcttctcctgcacacctagcaacccctgctcccacccggaccgtggaggctgctcagagaatgctgagtgtgtccctgggtccctgggcacccaccactgcacatgccacaaaggctggagtggggatggccgcgtctgtgtggctattgacgagtgtgagctggacatgagaggtggctgccacaccgatgccctctgcagctatgtgggccccgggcagagccgatgcacctgcaagctgggctttgccggggatggctaccagtgcagccccatcgacccctgccgggcaggcaatggcggctgccacggcctggccacctgccgggcagtggggggaggtcagcgggtctgcacgtgcccccctggctttgggggtgatggcttcagctgttatggagacatcttccgggagctggaggcaaatgcccacttctccatcttctaccaatggcttaagagtgccggcatcacgcttcctgccgaccgccgagtcacagccctggtgccctccgaggctgcagtccgtcagctgagccccgaggaccgagctttctggctgcagccaaggacgctgccgaacctggtcagggcccattttctccagggtgccctcttcgaggaggagctggcccggctgggtgggcaggaagtggccaccctgaaccccaccacacgctgggagattcgcaacattagtgggagggtctgggtgcagaatgccagcgtggatgtggctgacctccttgccaccaacggtgtcctacacatcctcagccaggtcttactgcccccccgaggggatgtgcccggtgggcaggggttgctgcagcagctggacttggtgcctgccttcagcctcttccgggaattgctgcagcaccatgggttggtgccccagattgaggctgccactgcctacaccatctttgtgcccaccaaccgctccctggaggcccagggcaacagcagtcacctggacgcagacacagtgcggcaccatgtggtcctgggggaggccctctccatggaaaccctgcggaagggtggacaccgcaactccctcctgggccctgcccactggatcgtcttctacaaccacagtggccagcctgaggtgaaccatgtgccactggaaggccccatgctggaggcccctggccgctcgctgattggtctgtcgggggtcctgacggtgggctcaagtcgctgcctgcatagccacgctgaggccctgcgggagaaatgtgtaaactgcaccaggagattccgctgcactcagggcttccagctgcaggacacacccaggaagagctgtgtctaccgatctggcttctccttctcccggggctgctcttacacatgtgccaagaagatccaggtgccggactgctgccctggtttctttggcacgctgtgtgagccatgcccagggggtctagggggggtgtgctcaggccatgggcagtgccaggacaggttcctgggcagcggggagtgccactgccacgagggcttccatggaacggcctgtgaggtgtgtgagctgggccgctacgggcccaactgcaccggagtgtgtgactgtgcccatgggctgtgccaggaggggctgcaaggggacggaagctgtgtctgtaacgtgggctggcagggcctccgctgtgaccagaaaatcaccagccctcagtgccctaggaagtgcgaccccaatgccaactgcgtgcaggactcggccggagcctccacctgcgcctgtgctgcgggatactccggcaatggcatcttctgttcagaggtggacccctgcgcccacggccatgggggctgctcccctcatgccaactgtaccaaggtggcacctgggcagcggacatgcacctgccaggatggctacatgggcgacggggagctgtgccaggaaattaacagctgtctcatccaccacgggggctgccacattcacgccgagtgcatccccactggcccccagcaggtctcctgcagctgccgtgagggttacagcggggatggcatccggacctgcgagctcctggacccctgctctaagaacaatggaggatgcagcccatatgccacctgcaaaagcacaggggatggccagaggacatgtacctgcgacacagcccacaccgtgggggacggcctcacctgccgtgcccgagtcggcctggagctcctgagggataagcatgcctcattcttcagcctccgcctcctggaatataaggagctcaagggcgatgggcctttcaccatcttcgtgccgcacgcagatctaatgagcaacctgtcgcaggatgagctggcccggattcgtgcgcatcgccagctggtgtttcgctaccacgtggttggctgtcggcggctgcggagcgaggacctgctggagcaggggtacgccacggccctctcagggcacccactgcgcttcagcgagagggagggcagcatatacctcaatgacttcgcgcgcgtggtgagcagcgaccatgaggccgtgaacggcatcctgcacttcattgaccgtgtcctgctgccccccgaggcgctgcactgggagcctgatgatgctcccatcccgaggagaaatgtcaccgccgccgcccagggcttcggttacaagatcttcagcggcctcctgaaggtggccggcctcctgcccctgcttcgagaggcatcccataggcccttcacaatgctgtggcccacagacgccgcctttcgagctctgcctccggatcgccaggcctggctgtaccatgaggaccaccgtgacaagctagcagccattctgcggggccacatgattcgcaatgtcgaggccttggcatctgacctgcccaacctgggcccacttcgaaccatgcatgggacccccatctctttctcctgcagccgaacgcgggccggtgagctcatggtgggtgaggatgatgctcgcattgtgcagcggcacttgccctttgagggtggcctggcctatggcatcgaccagctgctggagccacctggccttggtgctcgctgtgaccactttgagacccggcccctgcgactgaacacctgcagcatctgtgggctggagccaccctgtcctgaggggtcacaggagcagggcagccctgaggcctgctggcgcttctacccgaagttctggacgtcccctccgctgcactctttgggattacgcagcgtctgggtccaccccagcctttggggtaggccccaaggcctgggcaggggctgccaccgcaattgtgtcaccaccacctggaagcccagctgctgccctggtcactatggcagtgagtgccaagcttgccctggcggccccagcagcccttgtagtgaccgtggcgtgtgcatggacggcatgagtggcagtgggcagtgtctgtgccgttcaggttttgctgggacagcctgtgaactctgtgctcctggtgcctttgggccccattgtcaagcctgccgctgcactgtgcatggccgctgtgatgagggccttgggggctctggctcctgcttctgtgatgaaggctggactgggccacgctgtgaggtgcaactggagctgcagcctgtgtgtaccccaccctgtgcacccgaggctgtgtgccgtgcaggcaacagctgtgagtgcagcctgggctatgaaggggatggccgtgtgtgtacagtggcagacctgtgccaggacgggcatggtggctgcagtgagcacgccaactgtagccaggtaggaacaatggtcacttgtacctgcctgcccgactacgagggtgatggctggagctgccgggcccgcaacccctgcacagatggccaccgcgggggctgcagcgagcacgccaactgcttgagcaccggcctgaacacacggcgctgtgagtgccacgcaggctacgtaggcgatggactgcagtgtctggaggagtcggaaccacctgtggaccgctgcttgggccagccaccgccctgccactcagatgccatgtgcactgacctgcacttccaggagaaacgggctggcgttttccacctccaggccaccagcggcccttatggtctgaacttttcggaggctgaggcggcatgcgaagcacagggagccgtccttgcttcattccctcagctctctgctgcccagcagctgggcttccacctgtgcctcatgggctggctggccaatggctccactgcccaccctgtggttttccctgtggcggactgtggcaatggtcgggtgggcatagtcagcctgggtgcccgcaagaacctctcagaacgctgggatgcctactgcttccgtgtgcaagatgtggcctgccgatgccgaaatggcttcgtgggtgacgggatcagcacgtgcaatgggaagctgctggatgtgctggctgccactgccaacttctccaccttctatgggatgctattgggctatgccaatgccacccagcggggtctcgacttcctggacttcctggatgatgagctcacgtataagacactcttcgtccctgtcaatgaaggctttgtggacaacatgacgctgagtggcccagacttggagctgcatgcctccaacgccaccctcctaagtgccaacgccagccaggggaagttgcttccggcccactcaggcctcagcctcatcatcagtgacgcaggccctgacaacagttcctgggcccctgtggccccagggacagttgtggttagccgtatcattgtgtgggacatcatggccttcaatggcatcatccatgctctggccagccccctcctggcacccccacagccccaggcagtgctggcgcctgaagccccacctgtggcggcaggcgtgggggctgtgcttgccgctggagcactgcttggcttggtggccggagctctctacctccgtgcccgaggcaagcccatgggctttggcttctctgccttccaggcggaagatgatgctgatgacgacttctcaccgtggcaagaagggaccaaccccaccctggtctctgtccccaaccctgtctttggcagcgacaccttttgtgaacccttcgatgactcactgctggaggaggacttccctgacacccagaggatcctcacagtcaagtgacgaggctggggctgaaagcagaagcatgcacagggaggagaccacttttattgcttgtctgggtggatggggcaggaggggctgagggcctgtcccagacaataaaggtgccctcagcggatgtgggccatgtcaccaa

SEQ ID NO: 186585 - DNA, 671 bp, Homo sapiens
  Payload ID: 16740
  Gene Symbol: STAB1
  Gene Name: stabilin 1
  ENST ID: ENST00000469989
  CDS Start-End: 1-532
ggatgatgagctcacgtataagacactcttcgtccctgtcaatgaaggctttgtggacaacatgacgctgagtggcccagacttggagctgcatgcctccaacgccaccctcctaagtgccaacgccagccaggggaagttgcttccggcccactcaggcctcagcctcatcatcagtgacgcaggccctgacaacagttcctgggcccctgtgcaggcagtgctggcgcctgaagccccacctgtggcggcaggcgtgggggctgtgcttgccgctggagcactgcttggcttggtggccggagctctctacctccgtgcccgaggcaagcccatgggctttggcttctctgccttccaggcggaagatgatgctgatgacgacttctcaccgtggcaagaagggaccaaccccaccctggtctctgtccccaaccctgtctttggcagcgacaccttttgtgaacccttcgatgactcactgctggaggaggacttccctgacacccagaggatcctcacagtcaagtgacgaggctggggctgaaagcagaagcatgcacagggaggagaccacttttattgcttgtctgggtggatggggcaggaggggctgagggcctgtcccagacaataaaggtgccctcagcggatgtgggccatgtcaccaa

SEQ ID NO: 186586 - DNA, 8251 bp, Homo sapiens
  Payload ID: 16741
  Gene Symbol: STAB2
  Gene Name: stabilin 2
  Uniprot ID: Q8WWQ8
  ENST ID: ENST00000388887
  CDS Start-End: 205-7860
accaagactcctggatttgccatttttcctttctgaaggcaggtctcacctatctcctggttcgatctaggaaaaaggaaaggaagggatttaaaagtaaacagtgaaatgagaaagaattcactgggagtttatcaaactaagttaaaatagctaagtcagcctgacaggtgcttggcacagagaaggagcaaatatttcctcatgatgctacaacatttagtaattttttgtcttggattggttgtacaaaatttctgctccccagctgaaaccacagggcaggcaagaagatgtgataggaagtctcttcttacaattaggaccgagtgccgatcctgcgctctcaaccttggagtcaagtgcccggatggttacaccatgattaccagtggctctgtaggggttcgagattgcaggtacacctttgaggtcagaacatactctctgtctctccccggatgccgccatatttgtaggaaggactatctccaacctcggtgttgtcctggccgctggggcccagactgtatagagtgcccaggtggagcggggtcaccctgcaatggcagaggcagttgtgctgaaggcatggaaggaaatggaacctgctcctgccaagaagggtttggtggaacagcctgtgaaacctgtgctgacgacaacttatttggacccagctgttcatcagtgtgcaactgtgtgcatggggtgtgcaacagtggactagatggcgatggaacctgtgagtgctactctgcgtacactggccccaagtgtgacaagcccatccctgaatgtgcagccttgctctgcccagaaaattccagatgttcgccttccactgaagatgaaaacaaactggaatgcaaatgccttcccaattaccgaggcgatggcaaatactgcgaccccatcaatccatgtttacgaaaaatctgccaccctcatgctcattgtacgtacctgggaccaaatcggcacagttgtacatgccaagaaggctaccgtggggatggccaagtgtgcttgcctgtggacccctgccaaattaactttggaaactgccctacaaagtctacagtgtgcaaatatgatgggcctggacagtctcactgcgagtgtaaggagcattaccagaatttcgtacctggagtggggtgcagtatgactgatatatgtaaatcagataacccgtgtcataggaatgcaaattgcaccaccgtcgcaccaggccgaactgaatgcatttgccagaaaggttacgtgggtgatggcttaacgtgttatggaaacattatggagcgactcagagaattaaatactgaacccagaggaaaatggcaaggaaggctgacctctttcatctcactcctagacaaagcttatgcctggccactgagtaagctgggacccttcacggtgctgttacctacagacaagggactgaaaggattcaatgtaaatgagcttttggtggataataaagctgctcaatactttgtgaaactccacataattgctggtcagatgaacatcgaatatatgaataacacagacatgttctacaccttgactggaaagtcgggggaaatcttcaacagcgataaggacaatcaaataaagcttaaactccatggaggcaaaaagaaggtaaaaattatacaaggggacatcattgcttccaatgggcttctgcacatccttgacagagccatggacaagttagaacccacatttgagagcaacaatgagcaaaccataatgacaatgctacaaccaaggtacagcaagttcagatctttgttagaggaaaccaatttgggacatgccttagatgaggatggagttggtggaccatacaccatttttgttccaaataatgaagcattgaataacatgaaggacggcactctcgattacctcctttctccagagggatctcggaagcttctggaactcgtcagataccacattgtcccatttacccagcttgaagtggccactctcatctccacccctcacatcaggagcatggccaaccagctcatacagttcaacaccaccgacaatggacagattctggcaaatgatgtggcaatggaagaaattgagatcactgccaaaaatggccgaatttacacactgacaggagttctcattcctccctccattgtcccgattctgccccatcgatgtgatgaaacaaagagagagatgaaactgggcacttgtgtgagctgttctctggtgtactggagcagatgtcctgctaactctgagcccacagcactcttcacacacagatgtgtctacagtggcaggtttgggagcctgaagagcggctgtgcccggtactgcaatgccactgtgaagattccaaagtgctgcaaaggcttctatggacctgactgcaaccagtgtccaggaggcttctcaaatccatgctcaggaaatggacagtgtgcagatagcctcggcggcaacgggacatgcatttgtgaggagggcttccaaggctcccagtgtcagttctgctctgatcccaataaatacggacctcggtgtaacaaaaaatgcctgtgcgttcacggaacatgcaataacaggatagacagcgatggggcctgcctcactggcacatgcagagacggctctgccgggagactctgtgataagcagacctcagcctgtgggccctacgtgcagttctgtcacatccacgccacctgtgaatacagcaatgggacagccagttgtatttgcaaagcaggatatgaaggagatggaactctgtgttctgagatggacccttgcacaggactaactccaggaggctgtagccgcaatgcagaatgcatcaaaactggcacgggcacccacacctgcgtgtgtcagcagggttggacagggaatgggagagactgctcggagatcaacaactgcctgctgcccagtgcaggcggctgccacgacaacgcatcctgtttgtatgtgggtcccgggcagaatgagtgtgagtgcaagaaaggatttcgaggaaatgggattgactgtgaaccaataacttcatgcttggaacaaaccgggaaatgtcatccattggcaagctgtcaatctacttcgtctggtgtctggagctgtgtttgtcaagagggctatgaaggagatggctttctgtgctatggaaacgcagcagtggaattgtcatttctctccgaagcagctatatttaaccgatggataaataatgcttctctacaacccacactgtcagccacctcaaacctcactgtcctcgtgccttcccaacaagctactgaggacatggaccaggatgagaaaagcttctggttgtcacagagcaatattccagccctaataaagtaccatatgctactaggcacatacagagtggcagatctgcagaccctgtcttcttctgacatgttggcaacatctttgcagggcaacttccttcacttggcaaaggtggatgggaatatcacaattgaaggggcctccattgtcgatggggacaacgcagccacaaatggagtgatacacatcatcaacaaggtgctggtcccacaaagacgtctaactggctccttaccaaacctgctcatgcggctggaacagatgcctgactattccatcttccggggctacatcattcaatataatctggcgaatgcaattgaggctgccgatgcctacacagtgtttgctccaaacaacaatgccatcgagaattacatcagggagaagaaagtcttgtctctagaggaggacgtcctccggtatcatgtggtcctggaggagaaactcctgaagaatgacctgcacaatggcatgcatcgtgagaccatgctgggtttctcctatttccttagcttctttctccataatgaccagctctatgtaaatgaggctccaataaactacaccaatgtagccactgataagggagtgatccatggcttgggaaaagttctggaaattcagaagaacagatgtgataataatgacactactattatacgaggaagatgtaggacatgctcctcagagctgacctgcccattcggaactaaatctctaggtaatgagaagaggagatgcatctatacctcctatttcatgggaagacgaaccctgtttattgggtgccagccaaaatgtgtgagaaccgtcattacgagagaatgctgtgccggcttctttggcccccaatgccagccctgcccagggaatgcccagaatgtctgctttggtaatggcatctgtttggatggagtgaatggcacaggtgtgtgtgagtgtggggagggcttcagcggcacagcctgcgagacctgcaccgagggcaagtacggcatccactgtgaccaagcatgttcttgtgtccatgggagatgcaaccaaggacccttgggagatggctcctgtgactgtgatgttggctggcgaggagtgcattgtgacaatgcaaccacagaagacaactgcaatgggacatgccataccagcgccaactgcctcaccaactcagatggtacagcttcatgcaagtgtgcagcaggattccaaggaaacgggaccatctgcacagcaatcaatgcctgtgagatcagcaatggaggttgctctgccaaggctgactgtaagagaaccaccccaggaaggcgagtgtgcacgtgcaaagcaggctacacgggtgatggcattgtgtgcctggaaatcaacccgtgtttggagaaccatggtggctgtgacaagaatgcggagtgcacacagacaggacccaaccaggctgcctgtaactgtttgccagcatacactggagatggaaaggtctgcacactcatcaatgtctgcttaactaaaaatggcggctgtagtgaatttgccatctgcaaccacactgggcaagtagaaaggacttgtacttgcaagccaaactacattggagatggatttacctgccgcggcagcatttatcaggagcttcccaagaacccgaaaacttcccagtatttcttccagttgcaggagcatttcgtgaaagatctggtcggcccaggccccttcactgtttttgcacctttatctgcagcctttgatgaggaagctcgggttaaagactgggacaaatacggtttaatgccccaggttcttcggtaccatgtggtcgcctgccaccagctgcttctggaaaacctgaaattgatctcaaatgctacttccctccaaggagagccaatagtcatctccgtctctcagagcacggtgtatataaacaataaggctaagatcatatccagtgatatcatcagtactaatgggattgttcatatcatagacaaattgctatctcccaaaaatttgcttatcactcccaaagacaactctggaagaattctgcaaaatcttacgactttggcaacaaacaatggctacatcaaatttagcaacttaatacaggactcaggtttgctgagtgtcatcaccgatcccatccacaccccagtcactctcttctggcccaccgaccaagccctccatgccctacctgctgaacaacaggacttcctgttcaaccaagacaacaaggacaagctgaaggagtatttgaagtttcatgtgatacgagatgccaaggttttagctgtggatcttcccacatccactgcctggaagaccctgcaaggttcagagctgagtgtgaaatgtggagctggcagggacatcggtgacctctttctgaatggccaaacctgcagaattgtgcagcgggagctcttgtttgacctgggtgtggcctacggcattgactgtctgctgattgatcccaccctggggggccgctgtgacacctttactactttcgatgcctcgggggagtgtgggagctgtgtcaatactcccagctgcccaaggtggagtaaaccaaagggtgtgaagcagaagtgtctctacaacctgcccttcaagaggaacctggaaggctgccgggagcggtgcagcctggtgatacagatccccaggtgctgcaagggctacttcgggcgagactgtcaggcctgccctggaggaccagatgccccgtgtaataaccggggtgtctgccttgatcagtactcggccaccggagagtgtaaatgcaacaccggcttcaatgggacggcgtgtgagatgtgctggccggggagattcgggcctgattgtctgccctgtggctgctcagaccacggacagtgcgatgatggcatcacgggctccgggcagtgcctctgtgaaacggggtggacaggcccctcgtgtgacactcaggcagttttgcctgcagtgtgtacgcctccttgttctgctcatgccacctgtaaggagaacaacacgtgtgagtgtaacctggattatgaaggtgacggaatcacatgcacagttgtggatttctgcaaacaggacaacgggggctgtgcaaaggtggccagatgctcccagaagggcacgaaggtctcctgcagctgccagaagggatacaaaggggacgggcacagctgcacagagatagacccctgtgcagacggccttaacggagggtgtcacgagcacgccacctgtaagatgacaggcccgggcaagcacaagtgtgagtgtaaaagtcactatgtcggagatgggctgaactgtgagccggagcagctgcccattgaccgctgcttacaggacaatgggcagtgccatgcagacgccaaatgtgtcgacctccacttccaggataccactgttggggtgttccatctacgctccccactgggccagtataagctgacctttgacaaagccagagaggcctgtgccaacgaagctgcgaccatggcaacctacaaccagctctcctatgcccagaaggccaagtaccacctgtgctcagcaggctggctggagaccgggcgggttgcctaccccacagccttcgcctcccagaactgtggctctggtgtggttgggatagtggactatggacctagacccaacaagagtgaaatgtgggatgtcttctgctatcggatgaaagatgtgaactgcacctgcaaggtgggctatgtgggagatggcttctcatgcagtgggaacctgctgcaggtcctgatgtccttcccctcactcacaaacttcctgacggaagtgctggcctattccaacagctcagctcgaggccgtgcatttctagaacacctgactgacctgtccatccgcggcaccctctttgtgccacagaacagtgggctgggggagaatgagaccttgtctgggcgggacatcgagcaccacctcgccaatgtcagcatgtttttctacaatgaccttgtcaatggcaccaccctgcaaacgaggctgggaagcaagctgctcatcactgccagccaggacccactccaaccgacggagaccaggtttgttgatggaagagccattctgcagtgggacatctttgcctccaatgggatcattcatgtcatttccaggcctttaaaagcaccccctgcccccgtgaccttgacccacactggcttgggagcagggatcttctttgccatcatcctggtgactggggctgttgccttggctgcttactcctactttcggataaaccggagaacaatcggcttccagcattttgagtcggaagaggacattaatgttgcagctcttggcaagcagcagcctgagaatatctcgaaccccttgtatgagagcacaacctcagctcccccagaaccttcctacgaccccttcacggactctgaagaacggcagcttgagggcaatgaccccttgaggacactgtgagggcctggacgggagatgccagccatcactcactgccacctgggccatcaactgtgaattctcagcaccagttgccttttaggaacgtaaagtcctttaagcactcagaagccatacctcatctctctggctgatctgggggttgtttctgtgggtgagagatgtgttgctgtgcccacccagtacagcttcctcctctgaccctttggctcttcttcctttgtactcttcagctggcacctgctccattctgccctacatgatgggtaactgtgatctttcttccctgttagattgtaagcctccgtctttgtatcccagcccctagcccagtgcctgacacaggaactgtgcacaataaaggtttatggaacagaaacaaagtcaacag

SEQ ID NO: 186587 - DNA, 499 bp, Homo sapiens
  Payload ID: 16741
  Gene Symbol: STAB2
  Gene Name: stabilin 2
  ENST ID: ENST00000552777
  CDS Start-End: 1-408
gaggacattaatgttgcagctcttggcaagcagcagcctgagaatatctcgaaccccttgtatgagagcacaacctcagctcccccagaaccttcctacgaccccttcacgatgaagaaactgcagccgagttgggatgatttgtcttgggccacccagcttcaagcaggagagactaaaacaggtggccctacccccagcccatcctgcctcccaacacaaggcagcagcacaaacaaacacgcccagcacatacgtgttcacagtgctcagggagagtcatgcctcagaccagtggccaccagaaagattcaactaggactcaacacacagaatgccctgcccccttacaaccctctcttttccaggactctgaagaacggcagcttgagggcaatgaccccttgaggacactgtgagggcctggacgggagatgccagccatcactcactgccacctgggccatcaactgtgaattctcagcaccagttgcctttt

SEQ ID NO: 186588 - DNA, 310 bp, Homo sapiens
  Payload ID: 16741
  Gene Symbol: STAB2
  Gene Name: stabilin 2
  ENST ID: ENST00000549474
  CDS Start-End: 1-102
cagaagaacagatgtgataataatgacactactattatacgaggaagatgtaggacatgctcctcagagctgacctgcccattcggaactaaatctctatagccagttgaggaccgcagcaagaaatcttgtcagagaagagagattccatatccaaaaccatatccagcctggatatattccacctgcctgatttccttttatagttgaagttgcaactaactttctcaaagaaacagatggcagggtaatgagaagaggagatgcatctatacctcctatttcatgggaagacgaaccctgtttattg

SEQ ID NO: 186589 - DNA, 1727 bp, Homo sapiens
  Payload ID: 16742
  Gene Symbol: SAXO1
  Gene Name: stabilizer of axonemal microtubules 1
  ENST ID: ENST00000380530
  CDS Start-End: 346-567
cacagaggctacctgggcacggaccccgcagcttcctggggcccagtcagccgctccaggtgcttaagtctggactgcggaggccggggcggtggcgtgcagggtgaggtctcccgggctggcgcgcgtgcaagccccctgctgctacctcgcgctaggccagctccaggagggcaacagacgacaggacattgcaaaagggccacttaaattttccttcgagtaaacagaacacctgccaagaccctcgagcctgggcgtgccccaagacaggtggttggggtctaggagtcggctgcagctggcgatgctctgaggggacgtcagggcctcaggatcgcccctatgaagacgaagtgcatctgtgaactgtgctcctgcgggcggcatcactgtccacatctccctaccaagatttatgataaaacagagaaaccatgtcttctctccgaatataccgagaactaccctttctatcactcctacctgcccagagagtccttcaagccaaggcgggagtaccagaaagggcctataccaatggaaggcctgactacatcaagctgattatttgccttggaaccaaccaaggcgagagccacttcgtctggaacacaaataccagccggcatcagtcaggtttgataacagaaccacacaccaggacgattaccccataaaaggccttgtgaagaccataagctgtaaacctctggccatgccaaagctctgtaacatccccttggaggatgtgactaactacaagatgagctatgtggcccaccccgtggagaagcgctttgtgcatgaagcagagaagttcaggccctgtgaaatcccctttgaaagccttaccactcaaaaacaatcctaccggggcctgatgggggagcctgccaagagcttgaaacctctagccaggcctcctgggctagacatgcctttctgtaacaccactgagtttcgagataagtaccaagcttggccaatgccccggatgttctccaaagctcccatcacctacgtccctcccgaagacaggatggatcttctgacaacagtgcaggcccattacacatgccctaagggtgccccagctcagtcctgccgacctgcacttcagattaagaagtgcggtcgctttgaaggctcttccaccaccaaggatgactacaagcagtggtccagcatgcgcacagagccagtcaagcccgttccccagctggacttgcccaccgagcccctggactgcctgaccaccactcgggcccactatgtgccccacctgcctatcaataccaaaagctgtaagcctcattggtctggccctcgaggaaatgtccctgtggaaagccagaccacctacaccatcagctttactcccaaggaaatgggcaggtgcctagcttcatatcctgagcctcctggctacacctttgaggaagtggatgctttgggtcacaggatatacaaaccagtttcccaggcaggctctcagcagagcagccatctttctgtagatgattcagaaaaccccaaccagagggagttggaagtgttagcctgattttgaaaaatagtaatttagaaattacacagtacttttaaaagcagacaactgagaattatttgttggacaaaaaagaattccctaaaatgacaaaaaacaaaaaacaaaaaaccttcaccacttccagagcacttgaataaaatgagaatcacttgac

SEQ ID NO: 186590 - DNA, 2099 bp, Homo sapiens
  Payload ID: 16742
  Gene Symbol: SAXO1
  Gene Name: stabilizer of axonemal microtubules 1
  Uniprot ID: Q8IYX7
  ENST ID: ENST00000380534
  CDS Start-End: 281-1705
aagtctggactgcggaggccggggcggtggcgtgcagggtgaggtctcccgggctggcgcgcgtgcaagccccctgctgctacctcgcgctaggccagctccaggagggcaacagacgacaggacattgcaaaagggccacttaaattttccttcgagtaaacagaacacctgccaagaccctcgagcctgggcgtgccccaagacaggtggttggggtctaggagtcggctgcagctggcgatgctctgaggggacgtcagggcctcaggatcgcccctatgaagacgaagtgcatctgtgaactgtgctcctgcgggcggcatcactgtccacatctccctaccaagatttatgataaaacagagaaaccatgtcttctctccgaatataccgagaactaccctttctatcactcctacctgcccagagagtccttcaagccaaggcgggagtaccagaaagggcctataccaatggaaggcctgactacatcaaggagagattttgggcctcacaaagtggcaccagtgaaggtccaccagtatgaccagttcgtcccgagtgaagagaatatggatttgctcacgacgtataagaaagattacaatccctaccctgtctgtcgagtggaccccatcaaacctcgggacagtaaatatccatgtagcgacaagatggagtgtttgcctacttataaagctgattatttgccttggaaccaaccaaggcgagagccacttcgtctggaacacaaataccagccggcatcagtcaggtttgataacagaaccacacaccaggacgattaccccataaaaggccttgtgaagaccataagctgtaaacctctggccatgccaaagctctgtaacatccccttggaggatgtgactaactacaagatgagctatgtggcccaccccgtggagaagcgctttgtgcatgaagcagagaagttcaggccctgtgaaatcccctttgaaagccttaccactcaaaaacaatcctaccggggcctgatgggggagcctgccaagagcttgaaacctctagccaggcctcctgggctagacatgcctttctgtaacaccactgagtttcgagataagtaccaagcttggccaatgccccggatgttctccaaagctcccatcacctacgtccctcccgaagacaggatggatcttctgacaacagtgcaggcccattacacatgccctaagggtgccccagctcagtcctgccgacctgcacttcagattaagaagtgcggtcgctttgaaggctcttccaccaccaaggatgactacaagcagtggtccagcatgcgcacagagccagtcaagcccgttccccagctggacttgcccaccgagcccctggactgcctgaccaccactcgggcccactatgtgccccacctgcctatcaataccaaaagctgtaagcctcattggtctggccctcgaggaaatgtccctgtggaaagccagaccacctacaccatcagctttactcccaaggaaatgggcaggtgcctagcttcatatcctgagcctcctggctacacctttgaggaagtggatgctttgggtcacaggatatacaaaccagtttcccaggcaggctctcagcagagcagccatctttctgtagatgattcagaaaaccccaaccagagggagttggaagtgttagcctgattttgaaaaatagtaatttagaaattacacagtacttttaaaagcagacaactgagaattatttgttggacaaaaaagaattccctaaaatgacaaaaaacaaaaaacaaaaaaccttcaccacttccagagcacttgaataaaatgagaatcacttgactcagggaaaatgacatttaatcaccggctaattaactccccttaccttctcctttactgcatccccaccccgtttcaggtcctttactttgtgcttatggaatcaaagttggtctgtgagggtttctctgatccagatgtattttattaatttaatcattgtatgaactgacataatgattaacccttgccaagtatgaagcgccaaagaataaattttattttggggggaatg

SEQ ID NO: 186591 - DNA, 1923 bp, Homo sapiens
  Payload ID: 16742
  Gene Symbol: SAXO1
  Gene Name: stabilizer of axonemal microtubules 1
  ENST ID: ENST00000542071
  CDS Start-End: 304-1533
ctcgctccgccctccgtgcccgacgagccttgaaaagccgctgctctaatgaaacctaaccggggcggcgtgagccctaagatggaagggaagctcgaggacttcggtcttttgttctgttgcagctgggtttgctgttgctaggggcggcatcactgtccacatctccctaccaagatttatgataaaacagagaaaccatgtcttctctccgaatataccgagaactaccctttctatcactcctacctgcccagagagtccttcaagccaaggcgggagtaccagaaagggcctataccaatggaaggcctgactacatcaaggagagattttgggcctcacaaagtggcaccagtgaaggtccaccagtatgaccagttcgtcccgagtgaagagaatatggatttgctcacgacgtataagaaagattacaatccctaccctgtctgtcgagtggaccccatcaaacctcgggacagtaaatatccatgtagcgacaagatggagtgtttgcctacttataaagctgattatttgccttggaaccaaccaaggcgagagccacttcgtctggaacacaaataccagccggcatcagtcaggtttgataacagaaccacacaccaggacgattaccccataaaaggccttgtgaagaccataagctgtaaacctctggccatgccaaagctctgtaacatccccttggaggatgtgactaactacaagatgagctatgtggcccaccccgtggagaagcgctttgtgcatgaagcagagaagttcaggccctgtgaaatcccctttgaaagccttaccactcaaaaacaatcctaccggggcctgatgggggagcctgccaagagcttgaaacctctagccaggcctcctgggctagacatgcctttctgtaacaccactgagtttcgagataagtaccaagcttggccaatgccccggatgttctccaaagctcccatcacctacgtccctcccgaagacaggatggatcttctgacaacagtgcaggcccattacacatgccctaagggtgccccagctcagtcctgccgacctgcacttcagattaagaagtgcggtcgctttgaaggctcttccaccaccaaggatgactacaagcagtggtccagcatgcgcacagagccagtcaagcccgttccccagctggacttgcccaccgagcccctggactgcctgaccaccactcgggcccactatgtgccccacctgcctatcaataccaaaagctgtaagcctcattggtctggccctcgaggaaatgtccctgtggaaagccagaccacctacaccatcagctttactcccaaggaaatgggcaggtgcctagcttcatatcctgagcctcctggctacacctttgaggaagtggatgctttgggtcacaggatatacaaaccagtttcccaggcaggctctcagcagagcagccatctttctgtagatgattcagaaaaccccaaccagagggagttggaagtgttagcctgattttgaaaaatagtaatttagaaattacacagtacttttaaaagcagacaactgagaattatttgttggacaaaaaagaattccctaaaatgacaaaaaacaaaaaacaaaaaaccttcaccacttccagagcacttgaataaaatgagaatcacttgactcagggaaaatgacatttaatcaccggctaattaactccccttaccttctcctttactgcatccccaccccgtttcaggtcctttactttgtgcttatggaatcaaagttggtctgtgagggtttctctgatccagatgtattttattaatttaatcattgtatgaactgacataatgattaacccttgccaagtatgaagcgccaaagaataaattttattttgggggg

SEQ ID NO: 186592 - DNA, 3134 bp, Homo sapiens
  Payload ID: 16743
  Gene Symbol: SAXO2
  Gene Name: stabilizer of axonemal microtubules 2
  Uniprot ID: Q658L1
  ENST ID: ENST00000339465
  CDS Start-End: 70-1266
ttgccttgactacggcgggcgctgtgggagtggagaagctgcaagtgctgaggcgcggtggaggaaagcatgggagccaagagtatgaggagctggtgtctgtgtcagatttgtagctgcgggtcggattattgtccttatgaaatagttaaacagcctcgccatgtgccagaagaatataaaccaaaacaagggaagattgatcttggtactacctacaaacgggatttgaattcgtataaagtgcagcctgtggcaatagtccggcctttggagagacaagttaaaaaaggaaaattggacactgtcccaacctataaagacgattatagagcttgggaccttcataaaagtgaactttataagccagaacaaacttaccacccgcctactgtgaaatttggaaattcaactacatttcaggatgattttgttcctcaggagataaagcctaggcaaagctttaaaccctcctctgtggtcaaacgttctacagccccttttaatggtattacaagtcatcgccttgattatatacctcatcagcttgaactcaagtttgaaaggccaaaagaagtttacaaaccaactgaccaacgctttgaggatctcacaactcaccggtgtgactttcagggtctcattggtgaaactgcaaaactctgcagacctgtacacaccagagtgacccagaatgctctgtttgaaggaagcactgaattccgtgaaagttttcaaccatgggaaatcccaccacctgaggtcaagaaagtaccagagtatgtgcctcctacaggtagcatgctgttaaacagcacaagccatcttgactatgttccatatcaggccaaccatgttgttcccatcaggccagtttctcaaaaaagaagtaacaattttcctttccaaggaaaaagcatcatgaaagaagattttccagcatgggaaagttgtcgtcaaggacttattaagaagcagcagcagattcccaacccatctggaaaatttgatggtttgagcactttcagatctcactatgtgccacatgaattgatcccaacagagagttgcaaacctttaaatattgcttttaagagttctgttccatttgatgatgtaaccatgtactctgtagagtacacaccgaaaagacaggaaatttgcccagccagctatccctctcctccaggttatattttcgacaatacaaattcccaaggtcataaattcttccgcaagattattcctgcagtgaaggccttctaataaccaaaatgtgcttaaaaggaaggtactagcaagttgttgtttttccaagagaaaactcaatttttatagttaaaaaatttatgatataataaatcattttttatatttttaaacaagaaaattggaaaatatattataagaaatcagaatcttaaaaccattttttattgatattttaatcaagattgttctttaatgtgcatttcagaaggttgaataatatgcattcccatgagaactattttagtattcaacatactgcttagtagcttgtccccagtctattatcatttgtaattctgtttataattatggcaattgtatggttattcacataccatttgtcatttatcaagcacatcaggattatctagaacaacattgaaaatgatacatggattcctcttccaaggcaacaggattcattatactcagacttcacggcatctacatagcatccactgaatcaagttttggttggtggtatacagactgctgcactgctcctcaccatgttcaagttagcaagaggcactgtggtgtggcaaggaaaggctctgtgtgctgggaatcgaaggacttgagttcaagttctgactaataattattattatttttagagacagggtctcactgtcacccgtgctggagtccagtggcataatcacagcttactgcagcctcagcctcctgagctcaagtgatcctcctgcctcagcctcccaaatagctgggactacaagggtgtgccaccacacctggctattttttttaaacatactttgtagagacaggttcttgctgtattagtcaggctgttcaatctattggccaggctgctattgaatcccaccttggcttcccaaagcactgggattacaggcatgagccactatacccaacctgagtttaagttctaataatatagatttctatttgtactaccttaggcagtgactcatatctctgagcctcagtgtctttatttgtaaaatgatgtctgttctcaaaaagagtttgttttgagcatcagactgtatggtacattttaatccttaaagtacaaatgtggaggatttttttttaaaattgctcaatctctttttgtacttgttttctccttttcaaattaggataattacttactcaatgctcattttctggcctgtagcaaggattgtaaaataacctaatttgctttgagcttatgagtagtatatacttctgagaggagtcttgtcctttaaaacttcatgagcacctgagaaattcttaacagagaatggaaagcttggaatggggtaaatacagtggtttgaataacagtatttgcagaaaggaaaaagtattatttgctagggtagttttaggaagactgacagctctgaagaaatctttagggtaaatgtaggtaattttgcacctaattgccaggccaagtcactgtttagaggaagaaccagccccagcagggggcataatcacctggttcacctcttccggtgtgaagataagtgataaggtaaagaatgatgccagtaagtatagtagaaacactctattgcatttataaatgctaaaaatttccgaatgaattaaactcttattgggtggtttctttttttaaaaaaattaaataattgcattatgggagaatatgatttattttagcataaagtgaattttagtcttttatggcttcagaattatttcaaaatatactttattgaaaatcaatatttggttattttaattgttcaaaagtaatttgttctttacatttattagtaaaagtatggtgtgtgaaactatatttccatgcaacataataaaatcaataaaaggaatggattttcaagaaatca

SEQ ID NO: 186593 - DNA, 340 bp, Homo sapiens
  Payload ID: 16743
  Gene Symbol: SAXO2
  Gene Name: stabilizer of axonemal microtubules 2
  ENST ID: ENST00000566205
  CDS Start-End: 71-160
gttgccttgactacggcgggcgctgtgggagtggagaagctgcaagtgctgaggcgcggtggaggaaagcatgggagccaagagtatgaggagctggtgtctgtgtcagatttgtagctgcggaccaggactgacaagggagccactgcctctgccataatcagaaaattgcaacagagctgtagactccagaatcactcgtctcttccaaggtcaagaagctgccaagttaggaaaccagcttgcaaatcaagatgccgcctaacaacttctagctccaatctcttgttgcctctattatgttccatgcaagcaaaataaatgttgtgccttgactctc

SEQ ID NO: 186594 - DNA, 551 bp, Homo sapiens
  Payload ID: 16743
  Gene Symbol: SAXO2
  Gene Name: stabilizer of axonemal microtubules 2
  ENST ID: ENST00000569120
  CDS Start-End: 460-551
gactacggcgggcgctgtgggagtggagaagctgcaagtgctgaggcgcggtggaggaaagcatgggagccaagagtatgaggagctggtgtctgtgtcagatttgtagctgcgggtaagaaacggctggtgtagcggcgggcccgggcttgggagccgacctagggcctaggtgcacggagccggctcctcgggaaccctgagagtggccgtcccccggagatgaagggacgagggcgcagcgacatccccacttatcccgctccgcgaatactcgctcctcacccgcctgctacccgggggtaaaacgtttgttcgtagcccctgagactcccaatcaaggatgcaaagtaaaatgccacccgggccaggcgacatcattgtccacgtggaaccacaaggatttatgaaaattctggggtgttttgccctacaactgaatatttggaaaaatatcctatgtatgacaatgttcttccacctcagagtcttaaagccaagcaagaaattcgagcatgccatggtaaaatggaaggaataactacatttaa

SEQ ID NO: 186595 - DNA, 404 bp, Homo sapiens
  Payload ID: 16743
  Gene Symbol: SAXO2
  Gene Name: stabilizer of axonemal microtubules 2
  ENST ID: ENST00000566861
  CDS Start-End: 55-180
cgggcgctgtgggagtggagaagctgcaagtgctgaggcgcggtggaggaaagcatgggagccaagagtatgaggagctggtgtctgtgtcagatttgtagctgcggctttctgtcctcccagccagaccatattcccattcccgtccaggcagcagttctttgggatccgcctgactgaaaagtcaaccaggactgacaagggagccactgcctctgccataatcagaaaattgcaacagagctgtagactccagaatcactcgtctcttccaaggtcaagaagctgccaagttaggaaaccagcttgcaaatcaagatgccgcctaacaacttctagctccaatctcttgttgcctctattatgttccatgcaagcaaaataaatgttgtgccttgactctc

SEQ ID NO: 186596 - DNA, 811 bp, Homo sapiens
  Payload ID: 16743
  Gene Symbol: SAXO2
  Gene Name: stabilizer of axonemal microtubules 2
  ENST ID: ENST00000565432
  CDS Start-End: 228-542
agaagctgcaagtgctgaggcgcggtggaggaaagcatgggagccaagagtatgaggagctggtgtctgtgtcagatttgtagctgcggcccctgagactcccaatcaaggatgcaaagtaaaatgccacccgggccaggcgacatcattgtccacgtggaaccacaaggatttatgaaaattctggggtgttttgccctacaactgaatatttggaaaaatatcctatgtatgacaatgttcttccacctcagagtcttaaagccaagcaagaaattcgagcatgccatggtaaaatggaaggaataactacatttaagtcggattattgtccttatgaaatagttaaacagcctcgccatgtgccagaagaatataaaccaaaacaagggaagattgatcttggtactacctacaaacgggatttgaattcgtataaagtgcagcctgtggcaatagtccggcctttggagagacaagttaaaaaaggaaaattggacactgtcccaacctataaaggtaacttgctgtttcatacatgaaggagccaaaaaactaaaactcacttccagctttaacatctaatatcaaattataactttggtgtgctgccaaacttagcctccatggcttaggaaagaacatttctctctttggcaaaatagtattgtatagtaacaaaagaaaataggccatttgtctgattgagtggtaaaagacccacaatcccatccaaattcatctactttgttagttttctgtctcaaaacatgaaaaacaaaggatgccattaaagaagcattatgtcaca

SEQ ID NO: 186597 - DNA, 6277 bp, Homo sapiens
  Payload ID: 16744
  Gene Symbol: STAMBP
  Gene Name: STAM binding protein
  Uniprot ID: O95630
  ENST ID: ENST00000339566
  CDS Start-End: 94-1368
atagacagacgaacgggagtgggcggagcgggcgccggatgtgacgtttccggaacctccgggtgtcatccgcggggaaagaacttggtcctgatgtctgaccatggagatgtgagcctcccgcccgaagaccgggtgagggctctctcccagctgggtagtgcggtagaggtgaatgaagacattccaccccgtcggtacttccgctctggagttgagattatccgaatggcatccatttactctgaggaaggcaacattgaacatgccttcatcctctataacaagtatatcacgctctttattgagaaactaccaaaacatcgagattacaaatctgctgtcattcctgaaaagaaagacacagtaaagaaattaaaggagattgcatttcccaaagcagaagagctgaaggcagagctgttaaaacgatataccaaagaatatacagaatataatgaagaaaagaagaaggaagcagaggaattggcccggaacatggccatccagcaagagctggaaaaggaaaaacagagggtagcacaacagaagcagcagcaattggaacaggaacagttccatgccttcgaggagatgatccggaaccaggagctagaaaaagagcgactgaaaattgtacaggagtttgggaaggtagaccctggcctaggtggcccgctagtgcctgacttggagaagccctccttagatgtgttccccaccttaacagtctcatccatacagccttcagactgtcacacaactgtaaggccagctaagccacctgtggtggacaggtccttgaaacctggagcactgagcaactcagaaagtattcccacaatcgatggattgcgccatgtggtggtgcctgggcggctgtgcccacagtttctccagttagccagtgccaacactgcccggggagtggagacatgtggaattctctgtggaaaactgatgaggaatgaatttaccattacccatgttctcatccccaagcaaagtgctgggtctgattactgcaacacagagaacgaagaagaacttttcctcatacaggatcagcagggcctcatcacactgggctggattcatactcaccccacacagaccgcgtttctctccagtgtcgacctacacactcactgctcttaccagatgatgttgccagagtcagtagccattgtttgctcccccaagttccaggaaactggattctttaaactaactgaccatggactagaggagatttcttcctgtcgccagaaaggatttcatccacacagcaaggatccacctctgttctgtagctgcagccacgtgactgttgtggacagagcagtgaccatcacagaccttcgatgagcgtttgagtccaacaccttccaagaacaacaaaaccatatcagtgtactgtagccccttaatttaagctttctagaaagctttggaagtttttgtagatagtagaaaggggggcatcacctgagaaagagctgattttgtatttcaggtttgaaaagaaataactgaacatattttttaggcaagtcagaaagagaacatggtcacccaaaagcaactgtaactcagaaattaagttactcagaaattaagtagctcagaaattaagaaagaatggtataatgaacccccatatacccttccttctggattcaccaattgttaacatttttttcctctcagctatccttctaatttctctctaatttcaatttgtttatatttacctctgggctcaataagggcatctgtgcagaaatttggaagccatttagaaaatcttttggattttcctgtggtttatggcaatatgaatggagcttattactggggtgagggacagcttactccatttgaccagattgtttggctaacacatcccgaagaatgattttgtcaggaattattgttatttaataaatatttcaggatatttttcctctacaataaagtaacaattaacttatgtttttgtgcttcagagtgatccatttgatcaagcattgtataaacaggttaaaaaaaaggtatggttgttttggaaaggtgaaggaaaaatggaatttgagatatactgacactgatggtgtgtcccagttcacttttaattactccttgttttttatctgcctgttgccatcttccagaggtgttgtgaagtcatctctgttcttttggtgctgtctcaaatgggtcaaccattcacttcctccttatgccctccatgcttttggctgaggataatgaagcctttgtttggagtaccaggttacactccaataaatgattacatttcccagccaccccaccctaccaatttcattgtgttggctgttcttttctgactaaggcaatacctaggaaaacgcttgaagcagcaattgttactgcaattttctgtgagctgagcctggtgttctaggtggcctagaaataatggtgtcatttgtgacacctcgagtgagggcaggagagtaaatactttggctaggagaagagtgatttattctttatcagaattctaggtgggggagggagaatctgtgaatgcataaagttttcttcatttttaaattttgtctcagtctttattgcttaggttagtggtccttgaacttgtcccctgaaagagcccagttctctatattctttttcttctcttgggttcttaattccccatatagtggaaattccttctttgctgttttggtatgggtgggtctgggggccagctgggcttggacaagccatttcctgctgcagcccagagcagcctggctgttccaccttgctctaaacagtcctgaaattgcccagtcctctgcttttgggaaatccatccccttcttcccattctttgtctaccacttagcttagggctttcttaccttttatttcgactgtagccgttggcttttaccaagtctctttgtttttagcatttcttcattccagtctgttctgcacactttgatcaggagaagcttctcacattccagccatgttcatgttttctctcttgctcaaaaacctgcaatagcttcccattgctgaaaatctaaatttagcttttagtcagaactttccacttaaagttcttacccctggctatatattcaaatatctagggagcaatttaaaaaatactgatgcctgtgttctaccccccaccaattaaagctgaatctctagggtggagcctcagatgttgtttctgcatttgtctttcaagctgctagaattctcaagtacaaccagggttgacaaccactgcattggtctttgatacctaagaattgtgagctctcttatccgtctctgcccaccaaagacattcagccaggtcaacaacatatcatacgttgcaaccacattgatcacagactgatcaccaaactgctatattttcttttctcttcctctaggcacaagatatcttagtggctagatgggtgcaggaaatcagtctgtagatccctcttcatatctgctgcagcctagccactgcagaggcactctgcataggatggtctaagtgtctctgtcttcatcttacctctgtggaggagacgtggaatcaagccagcccacaagccctgagactggataggccggagagaaagaggagtagccagagcggtcgggaaaagaggaaaggaatactgtgggtaaaagggacaaagaccacgcaacctgaggaaagacattgtattgaaagggtaatgactatttggctaaagggactgactcctgggttcccgaggctcaaagaccaggagacttttccactcttgcaagctgcacaagtaccatacttagtgttctgggctgagaggggagacaaaagcatcgtcaggttgccaaacaatgtcccagttgccctgggaggcacaaacctaccaaagtgccataggccaggtgcagagagaatcagaggagctgatttgcttggggtcagagcagagctgggttttttcagatgatcactttcacatactccttgttaaatgggaccaaaggggaagaagaagaaacccttaagcttttgtaatattgtcttgggtaccagataccataaaaggcagcatgagagaaacattcccttgggccagtgtcatggtggattttcttgcttgagaggcaaggatttcagctttcatttggtaccacagaatttaaaattgtaagtgcctatcccttttgactgttgatggcttctttggggttttagttaccccagttgaaagagaaatttttcatattggggttgagaagaatggaggctattaggagcaaagctttaatgagtgaaagtctggtgaatcctgcaattttgatatgtttccagtggattttgagaacacagttttaggaccagagtagatgttgttccctagaaaatagagtcagctattgatattgtgcctcccatccctcatatctcagtgttttaaccccacctgagtttggagaccagtttgtccaaggatctttcaaacatgtgagcccagagtagaacttctgagtcaaggatcatgtctttttctgaggagctttgcttggggcactggaaatcctgtttagatcaggactattggaatattatcctctccaggggaagtgccaggttgaacatttaaggctttgcttctaggcccagctatacattcaccagcaaatcacttaacttcctaaatttctttaaaatctgtaaaatgggatcagtctaatatgcctacctcaaatgatgacagaatgacatctatatgcatatgaggcctacgttagttgaaagatgctataaagatataagggatttgttacttgtctttcttgaaatgttacagttggggtgcggttgcttctatcttctggacctctgcccattcagcatacagctagaggaatctttgggcagatccacattctttagcactagctaggctttgactccaaagctatctggtctaccttgatgttctgagcaggaaaactgaggacctcaagaaccattccaaatttctactcattctccctaagacccagagcagacccaggacctaaagaaattacatcatctctattttcccttggctccagcccactcttgtttgaacctcccacttttgttgttccaactacttcttgagatgaaggaagggcagaacattggccctcttcactgaagtcttcaccccttaatccagggttcaatttttagttcaccttagcctgtttgagattagaagctgggccttaacttacaggtgtgtccggcatcattcaatcagcctgttagatccagaatccagcactgtgacgctacataaccatgggctctgtccttccagttcctttagtgccttccctcactggtaggttcactctgagggcttccttccttgaactccagtggcaactatagtctgtttcccacaatttgttgtgtgtgttttttgttgttttgcagcgttttcatattgtcttttatgtaagtcatgtttctgaactatcgtataaatttcattagggtaagaatcatgtttgctttatgcactgtgtaacatgccttgcagtcagtataggcacttaaccttattgatcagttgttccttggtgttgaataatgtgttaggtagccaggtggacctgtgtcctagcctggagaagctctatgtcaccttgtaggaagccatctgaatttgactcagcatcatatgctgggcctgtgctgcacttgagctttctttccagccgccaggagggatggttgtcctggccaacagcgaatttaatgggtggtcaaaagaagatgtgcctgcatagaaggctgaaagagggagctggaagtaggaggagacaaggagatagtgacaccagtatcttgtcacagaaatcaaggaaggcaacagtttaaaggaggggagggagatcagtggtgccaactggctcagaagaggtttgctgggttaaatctcaagatgagcccatgagatctggtggttagcagaggcctttcctgacaaccccattttaagcacctcttccccatcactctatctcatcactgttactgtctgtgtagccctgtcatgagctaaaatcatcctgtttgtttattgctagcttatgtgtctaaagtatactccttgagaacagcaactttgtctttttcacctttgtactgagtcccctgacatggaataagatatgaataaatgcacagacttgtccaaaatcatccaattaa

SEQ ID NO: 186598 - DNA, 6691 bp, Homo sapiens
  Payload ID: 16744
  Gene Symbol: STAMBP
  Gene Name: STAM binding protein
  Uniprot ID: O95630
  ENST ID: ENST00000394070
  CDS Start-End: 504-1778
ggtggggcagggcctccgagcgtggttggactttgaaggggatcggccgccgtgagtgtggggcctgcagcctactctccccgagtcccctgcccggcctgcctcgctcgaggcacccgacggcttctgtctccgcgggctggcgcctgaccagccaggcccagcggttccccgcctactgcatttgaaagatcccgaaaaccctggatgattgtgcctggggttggcaagttcgtcttgagtgccttcaagaagggttcctcaagcagttgtcgatagagccctccctactgtatacgccccctccgctcattcctgctacttcctttctcctcctcgtatttccccctcggtcctttacgccgcctttccccctcatttgcagatgctgcatcccctttttggaattgctcaaccaggtggtaaccggcgccgcttcctggccttgggaggtggttcctttcttaacccacaagaacctctcccaagagaacttggtcctgatgtctgaccatggagatgtgagcctcccgcccgaagaccgggtgagggctctctcccagctgggtagtgcggtagaggtgaatgaagacattccaccccgtcggtacttccgctctggagttgagattatccgaatggcatccatttactctgaggaaggcaacattgaacatgccttcatcctctataacaagtatatcacgctctttattgagaaactaccaaaacatcgagattacaaatctgctgtcattcctgaaaagaaagacacagtaaagaaattaaaggagattgcatttcccaaagcagaagagctgaaggcagagctgttaaaacgatataccaaagaatatacagaatataatgaagaaaagaagaaggaagcagaggaattggcccggaacatggccatccagcaagagctggaaaaggaaaaacagagggtagcacaacagaagcagcagcaattggaacaggaacagttccatgccttcgaggagatgatccggaaccaggagctagaaaaagagcgactgaaaattgtacaggagtttgggaaggtagaccctggcctaggtggcccgctagtgcctgacttggagaagccctccttagatgtgttccccaccttaacagtctcatccatacagccttcagactgtcacacaactgtaaggccagctaagccacctgtggtggacaggtccttgaaacctggagcactgagcaactcagaaagtattcccacaatcgatggattgcgccatgtggtggtgcctgggcggctgtgcccacagtttctccagttagccagtgccaacactgcccggggagtggagacatgtggaattctctgtggaaaactgatgaggaatgaatttaccattacccatgttctcatccccaagcaaagtgctgggtctgattactgcaacacagagaacgaagaagaacttttcctcatacaggatcagcagggcctcatcacactgggctggattcatactcaccccacacagaccgcgtttctctccagtgtcgacctacacactcactgctcttaccagatgatgttgccagagtcagtagccattgtttgctcccccaagttccaggaaactggattctttaaactaactgaccatggactagaggagatttcttcctgtcgccagaaaggatttcatccacacagcaaggatccacctctgttctgtagctgcagccacgtgactgttgtggacagagcagtgaccatcacagaccttcgatgagcgtttgagtccaacaccttccaagaacaacaaaaccatatcagtgtactgtagccccttaatttaagctttctagaaagctttggaagtttttgtagatagtagaaaggggggcatcacctgagaaagagctgattttgtatttcaggtttgaaaagaaataactgaacatattttttaggcaagtcagaaagagaacatggtcacccaaaagcaactgtaactcagaaattaagttactcagaaattaagtagctcagaaattaagaaagaatggtataatgaacccccatatacccttccttctggattcaccaattgttaacatttttttcctctcagctatccttctaatttctctctaatttcaatttgtttatatttacctctgggctcaataagggcatctgtgcagaaatttggaagccatttagaaaatcttttggattttcctgtggtttatggcaatatgaatggagcttattactggggtgagggacagcttactccatttgaccagattgtttggctaacacatcccgaagaatgattttgtcaggaattattgttatttaataaatatttcaggatatttttcctctacaataaagtaacaattaacttatgtttttgtgcttcagagtgatccatttgatcaagcattgtataaacaggttaaaaaaaaggtatggttgttttggaaaggtgaaggaaaaatggaatttgagatatactgacactgatggtgtgtcccagttcacttttaattactccttgttttttatctgcctgttgccatcttccagaggtgttgtgaagtcatctctgttcttttggtgctgtctcaaatgggtcaaccattcacttcctccttatgccctccatgcttttggctgaggataatgaagcctttgtttggagtaccaggttacactccaataaatgattacatttcccagccaccccaccctaccaatttcattgtgttggctgttcttttctgactaaggcaatacctaggaaaacgcttgaagcagcaattgttactgcaattttctgtgagctgagcctggtgttctaggtggcctagaaataatggtgtcatttgtgacacctcgagtgagggcaggagagtaaatactttggctaggagaagagtgatttattctttatcagaattctaggtgggggagggagaatctgtgaatgcataaagttttcttcatttttaaattttgtctcagtctttattgcttaggttagtggtccttgaacttgtcccctgaaagagcccagttctctatattctttttcttctcttgggttcttaattccccatatagtggaaattccttctttgctgttttggtatgggtgggtctgggggccagctgggcttggacaagccatttcctgctgcagcccagagcagcctggctgttccaccttgctctaaacagtcctgaaattgcccagtcctctgcttttgggaaatccatccccttcttcccattctttgtctaccacttagcttagggctttcttaccttttatttcgactgtagccgttggcttttaccaagtctctttgtttttagcatttcttcattccagtctgttctgcacactttgatcaggagaagcttctcacattccagccatgttcatgttttctctcttgctcaaaaacctgcaatagcttcccattgctgaaaatctaaatttagcttttagtcagaactttccacttaaagttcttacccctggctatatattcaaatatctagggagcaatttaaaaaatactgatgcctgtgttctaccccccaccaattaaagctgaatctctagggtggagcctcagatgttgtttctgcatttgtctttcaagctgctagaattctcaagtacaaccagggttgacaaccactgcattggtctttgatacctaagaattgtgagctctcttatccgtctctgcccaccaaagacattcagccaggtcaacaacatatcatacgttgcaaccacattgatcacagactgatcaccaaactgctatattttcttttctcttcctctaggcacaagatatcttagtggctagatgggtgcaggaaatcagtctgtagatccctcttcatatctgctgcagcctagccactgcagaggcactctgcataggatggtctaagtgtctctgtcttcatcttacctctgtggaggagacgtggaatcaagccagcccacaagccctgagactggataggccggagagaaagaggagtagccagagcggtcgggaaaagaggaaaggaatactgtgggtaaaagggacaaagaccacgcaacctgaggaaagacattgtattgaaagggtaatgactatttggctaaagggactgactcctgggttcccgaggctcaaagaccaggagacttttccactcttgcaagctgcacaagtaccatacttagtgttctgggctgagaggggagacaaaagcatcgtcaggttgccaaacaatgtcccagttgccctgggaggcacaaacctaccaaagtgccataggccaggtgcagagagaatcagaggagctgatttgcttggggtcagagcagagctgggttttttcagatgatcactttcacatactccttgttaaatgggaccaaaggggaagaagaagaaacccttaagcttttgtaatattgtcttgggtaccagataccataaaaggcagcatgagagaaacattcccttgggccagtgtcatggtggattttcttgcttgagaggcaaggatttcagctttcatttggtaccacagaatttaaaattgtaagtgcctatcccttttgactgttgatggcttctttggggttttagttaccccagttgaaagagaaatttttcatattggggttgagaagaatggaggctattaggagcaaagctttaatgagtgaaagtctggtgaatcctgcaattttgatatgtttccagtggattttgagaacacagttttaggaccagagtagatgttgttccctagaaaatagagtcagctattgatattgtgcctcccatccctcatatctcagtgttttaaccccacctgagtttggagaccagtttgtccaaggatctttcaaacatgtgagcccagagtagaacttctgagtcaaggatcatgtctttttctgaggagctttgcttggggcactggaaatcctgtttagatcaggactattggaatattatcctctccaggggaagtgccaggttgaacatttaaggctttgcttctaggcccagctatacattcaccagcaaatcacttaacttcctaaatttctttaaaatctgtaaaatgggatcagtctaatatgcctacctcaaatgatgacagaatgacatctatatgcatatgaggcctacgttagttgaaagatgctataaagatataagggatttgttacttgtctttcttgaaatgttacagttggggtgcggttgcttctatcttctggacctctgcccattcagcatacagctagaggaatctttgggcagatccacattctttagcactagctaggctttgactccaaagctatctggtctaccttgatgttctgagcaggaaaactgaggacctcaagaaccattccaaatttctactcattctccctaagacccagagcagacccaggacctaaagaaattacatcatctctattttcccttggctccagcccactcttgtttgaacctcccacttttgttgttccaactacttcttgagatgaaggaagggcagaacattggccctcttcactgaagtcttcaccccttaatccagggttcaatttttagttcaccttagcctgtttgagattagaagctgggccttaacttacaggtgtgtccggcatcattcaatcagcctgttagatccagaatccagcactgtgacgctacataaccatgggctctgtccttccagttcctttagtgccttccctcactggtaggttcactctgagggcttccttccttgaactccagtggcaactatagtctgtttcccacaatttgttgtgtgtgttttttgttgttttgcagcgttttcatattgtcttttatgtaagtcatgtttctgaactatcgtataaatttcattagggtaagaatcatgtttgctttatgcactgtgtaacatgccttgcagtcagtataggcacttaaccttattgatcagttgttccttggtgttgaataatgtgttaggtagccaggtggacctgtgtcctagcctggagaagctctatgtcaccttgtaggaagccatctgaatttgactcagcatcatatgctgggcctgtgctgcacttgagctttctttccagccgccaggagggatggttgtcctggccaacagcgaatttaatgggtggtcaaaagaagatgtgcctgcatagaaggctgaaagagggagctggaagtaggaggagacaaggagatagtgacaccagtatcttgtcacagaaatcaaggaaggcaacagtttaaaggaggggagggagatcagtggtgccaactggctcagaagaggtttgctgggttaaatctcaagatgagcccatgagatctggtggttagcagaggcctttcctgacaaccccattttaagcacctcttccccatcactctatctcatcactgttactgtctgtgtagccctgtcatgagctaaaatcatcctgtttgtttattgctagcttatgtgtctaaagtatactccttgagaacagcaactttgtctttttcacctttgtactgagtcccctgacatggaataagatatgaataaatgcacagacttgtccaaaatcatccaattaataaa

SEQ ID NO: 186599 - DNA, 6386 bp, Homo sapiens
  Payload ID: 16744
  Gene Symbol: STAMBP
  Gene Name: STAM binding protein
  Uniprot ID: O95630
  ENST ID: ENST00000394073
  CDS Start-End: 203-1477
gcggggaaaggtggggaagggtcccgggaacgtggtggggcagggcctccgagcgtggttggactttgaaggggatcggccgccatgctgcatcccctttttggaattgctcaaccaggtggtaaccggcgccgcttcctggccttgggaggtggttcctttcttaacccacaagaacctctcccaagagaacttggtcctgatgtctgaccatggagatgtgagcctcccgcccgaagaccgggtgagggctctctcccagctgggtagtgcggtagaggtgaatgaagacattccaccccgtcggtacttccgctctggagttgagattatccgaatggcatccatttactctgaggaaggcaacattgaacatgccttcatcctctataacaagtatatcacgctctttattgagaaactaccaaaacatcgagattacaaatctgctgtcattcctgaaaagaaagacacagtaaagaaattaaaggagattgcatttcccaaagcagaagagctgaaggcagagctgttaaaacgatataccaaagaatatacagaatataatgaagaaaagaagaaggaagcagaggaattggcccggaacatggccatccagcaagagctggaaaaggaaaaacagagggtagcacaacagaagcagcagcaattggaacaggaacagttccatgccttcgaggagatgatccggaaccaggagctagaaaaagagcgactgaaaattgtacaggagtttgggaaggtagaccctggcctaggtggcccgctagtgcctgacttggagaagccctccttagatgtgttccccaccttaacagtctcatccatacagccttcagactgtcacacaactgtaaggccagctaagccacctgtggtggacaggtccttgaaacctggagcactgagcaactcagaaagtattcccacaatcgatggattgcgccatgtggtggtgcctgggcggctgtgcccacagtttctccagttagccagtgccaacactgcccggggagtggagacatgtggaattctctgtggaaaactgatgaggaatgaatttaccattacccatgttctcatccccaagcaaagtgctgggtctgattactgcaacacagagaacgaagaagaacttttcctcatacaggatcagcagggcctcatcacactgggctggattcatactcaccccacacagaccgcgtttctctccagtgtcgacctacacactcactgctcttaccagatgatgttgccagagtcagtagccattgtttgctcccccaagttccaggaaactggattctttaaactaactgaccatggactagaggagatttcttcctgtcgccagaaaggatttcatccacacagcaaggatccacctctgttctgtagctgcagccacgtgactgttgtggacagagcagtgaccatcacagaccttcgatgagcgtttgagtccaacaccttccaagaacaacaaaaccatatcagtgtactgtagccccttaatttaagctttctagaaagctttggaagtttttgtagatagtagaaaggggggcatcacctgagaaagagctgattttgtatttcaggtttgaaaagaaataactgaacatattttttaggcaagtcagaaagagaacatggtcacccaaaagcaactgtaactcagaaattaagttactcagaaattaagtagctcagaaattaagaaagaatggtataatgaacccccatatacccttccttctggattcaccaattgttaacatttttttcctctcagctatccttctaatttctctctaatttcaatttgtttatatttacctctgggctcaataagggcatctgtgcagaaatttggaagccatttagaaaatcttttggattttcctgtggtttatggcaatatgaatggagcttattactggggtgagggacagcttactccatttgaccagattgtttggctaacacatcccgaagaatgattttgtcaggaattattgttatttaataaatatttcaggatatttttcctctacaataaagtaacaattaacttatgtttttgtgcttcagagtgatccatttgatcaagcattgtataaacaggttaaaaaaaaggtatggttgttttggaaaggtgaaggaaaaatggaatttgagatatactgacactgatggtgtgtcccagttcacttttaattactccttgttttttatctgcctgttgccatcttccagaggtgttgtgaagtcatctctgttcttttggtgctgtctcaaatgggtcaaccattcacttcctccttatgccctccatgcttttggctgaggataatgaagcctttgtttggagtaccaggttacactccaataaatgattacatttcccagccaccccaccctaccaatttcattgtgttggctgttcttttctgactaaggcaatacctaggaaaacgcttgaagcagcaattgttactgcaattttctgtgagctgagcctggtgttctaggtggcctagaaataatggtgtcatttgtgacacctcgagtgagggcaggagagtaaatactttggctaggagaagagtgatttattctttatcagaattctaggtgggggagggagaatctgtgaatgcataaagttttcttcatttttaaattttgtctcagtctttattgcttaggttagtggtccttgaacttgtcccctgaaagagcccagttctctatattctttttcttctcttgggttcttaattccccatatagtggaaattccttctttgctgttttggtatgggtgggtctgggggccagctgggcttggacaagccatttcctgctgcagcccagagcagcctggctgttccaccttgctctaaacagtcctgaaattgcccagtcctctgcttttgggaaatccatccccttcttcccattctttgtctaccacttagcttagggctttcttaccttttatttcgactgtagccgttggcttttaccaagtctctttgtttttagcatttcttcattccagtctgttctgcacactttgatcaggagaagcttctcacattccagccatgttcatgttttctctcttgctcaaaaacctgcaatagcttcccattgctgaaaatctaaatttagcttttagtcagaactttccacttaaagttcttacccctggctatatattcaaatatctagggagcaatttaaaaaatactgatgcctgtgttctaccccccaccaattaaagctgaatctctagggtggagcctcagatgttgtttctgcatttgtctttcaagctgctagaattctcaagtacaaccagggttgacaaccactgcattggtctttgatacctaagaattgtgagctctcttatccgtctctgcccaccaaagacattcagccaggtcaacaacatatcatacgttgcaaccacattgatcacagactgatcaccaaactgctatattttcttttctcttcctctaggcacaagatatcttagtggctagatgggtgcaggaaatcagtctgtagatccctcttcatatctgctgcagcctagccactgcagaggcactctgcataggatggtctaagtgtctctgtcttcatcttacctctgtggaggagacgtggaatcaagccagcccacaagccctgagactggataggccggagagaaagaggagtagccagagcggtcgggaaaagaggaaaggaatactgtgggtaaaagggacaaagaccacgcaacctgaggaaagacattgtattgaaagggtaatgactatttggctaaagggactgactcctgggttcccgaggctcaaagaccaggagacttttccactcttgcaagctgcacaagtaccatacttagtgttctgggctgagaggggagacaaaagcatcgtcaggttgccaaacaatgtcccagttgccctgggaggcacaaacctaccaaagtgccataggccaggtgcagagagaatcagaggagctgatttgcttggggtcagagcagagctgggttttttcagatgatcactttcacatactccttgttaaatgggaccaaaggggaagaagaagaaacccttaagcttttgtaatattgtcttgggtaccagataccataaaaggcagcatgagagaaacattcccttgggccagtgtcatggtggattttcttgcttgagaggcaaggatttcagctttcatttggtaccacagaatttaaaattgtaagtgcctatcccttttgactgttgatggcttctttggggttttagttaccccagttgaaagagaaatttttcatattggggttgagaagaatggaggctattaggagcaaagctttaatgagtgaaagtctggtgaatcctgcaattttgatatgtttccagtggattttgagaacacagttttaggaccagagtagatgttgttccctagaaaatagagtcagctattgatattgtgcctcccatccctcatatctcagtgttttaaccccacctgagtttggagaccagtttgtccaaggatctttcaaacatgtgagcccagagtagaacttctgagtcaaggatcatgtctttttctgaggagctttgcttggggcactggaaatcctgtttagatcaggactattggaatattatcctctccaggggaagtgccaggttgaacatttaaggctttgcttctaggcccagctatacattcaccagcaaatcacttaacttcctaaatttctttaaaatctgtaaaatgggatcagtctaatatgcctacctcaaatgatgacagaatgacatctatatgcatatgaggcctacgttagttgaaagatgctataaagatataagggatttgttacttgtctttcttgaaatgttacagttggggtgcggttgcttctatcttctggacctctgcccattcagcatacagctagaggaatctttgggcagatccacattctttagcactagctaggctttgactccaaagctatctggtctaccttgatgttctgagcaggaaaactgaggacctcaagaaccattccaaatttctactcattctccctaagacccagagcagacccaggacctaaagaaattacatcatctctattttcccttggctccagcccactcttgtttgaacctcccacttttgttgttccaactacttcttgagatgaaggaagggcagaacattggccctcttcactgaagtcttcaccccttaatccagggttcaatttttagttcaccttagcctgtttgagattagaagctgggccttaacttacaggtgtgtccggcatcattcaatcagcctgttagatccagaatccagcactgtgacgctacataaccatgggctctgtccttccagttcctttagtgccttccctcactggtaggttcactctgagggcttccttccttgaactccagtggcaactatagtctgtttcccacaatttgttgtgtgtgttttttgttgttttgcagcgttttcatattgtcttttatgtaagtcatgtttctgaactatcgtataaatttcattagggtaagaatcatgtttgctttatgcactgtgtaacatgccttgcagtcagtataggcacttaaccttattgatcagttgttccttggtgttgaataatgtgttaggtagccaggtggacctgtgtcctagcctggagaagctctatgtcaccttgtaggaagccatctgaatttgactcagcatcatatgctgggcctgtgctgcacttgagctttctttccagccgccaggagggatggttgtcctggccaacagcgaatttaatgggtggtcaaaagaagatgtgcctgcatagaaggctgaaagagggagctggaagtaggaggagacaaggagatagtgacaccagtatcttgtcacagaaatcaaggaaggcaacagtttaaaggaggggagggagatcagtggtgccaactggctcagaagaggtttgctgggttaaatctcaagatgagcccatgagatctggtggttagcagaggcctttcctgacaaccccattttaagcacctcttccccatcactctatctcatcactgttactgtctgtgtagccctgtcatgagctaaaatcatcctgtttgtttattgctagcttatgtgtctaaagtatactccttgagaacagcaactttgtctttttcacctttgtactgagtcccctgacatggaataagatatgaataaatgcacagacttgtccaaaatcatccaattaa

SEQ ID NO: 186600 - DNA, 1649 bp, Homo sapiens
  Payload ID: 16744
  Gene Symbol: STAMBP
  Gene Name: STAM binding protein
  Uniprot ID: O95630
  ENST ID: ENST00000409707
  CDS Start-End: 48-1322
tttccggaacctccgggtgtcatccgcggggaaagaacttggtcctgatgtctgaccatggagatgtgagcctcccgcccgaagaccgggtgagggctctctcccagctgggtagtgcggtagaggtgaatgaagacattccaccccgtcggtacttccgctctggagttgagattatccgaatggcatccatttactctgaggaaggcaacattgaacatgccttcatcctctataacaagtatatcacgctctttattgagaaactaccaaaacatcgagattacaaatctgctgtcattcctgaaaagaaagacacagtaaagaaattaaaggagattgcatttcccaaagcagaagagctgaaggcagagctgttaaaacgatataccaaagaatatacagaatataatgaagaaaagaagaaggaagcagaggaattggcccggaacatggccatccagcaagagctggaaaaggaaaaacagagggtagcacaacagaagcagcagcaattggaacaggaacagttccatgccttcgaggagatgatccggaaccaggagctagaaaaagagcgactgaaaattgtacaggagtttgggaaggtagaccctggcctaggtggcccgctagtgcctgacttggagaagccctccttagatgtgttccccaccttaacagtctcatccatacagccttcagactgtcacacaactgtaaggccagctaagccacctgtggtggacaggtccttgaaacctggagcactgagcaactcagaaagtattcccacaatcgatggattgcgccatgtggtggtgcctgggcggctgtgcccacagtttctccagttagccagtgccaacactgcccggggagtggagacatgtggaattctctgtggaaaactgatgaggaatgaatttaccattacccatgttctcatccccaagcaaagtgctgggtctgattactgcaacacagagaacgaagaagaacttttcctcatacaggatcagcagggcctcatcacactgggctggattcatactcaccccacacagaccgcgtttctctccagtgtcgacctacacactcactgctcttaccagatgatgttgccagagtcagtagccattgtttgctcccccaagttccaggaaactggattctttaaactaactgaccatggactagaggagatttcttcctgtcgccagaaaggatttcatccacacagcaaggatccacctctgttctgtagctgcagccacgtgactgttgtggacagagcagtgaccatcacagaccttcgatgagcgtttgagtccaacaccttccaagaacaacaaaaccatatcagtctcaccaagatggaggaacagagcccatggcccacttactacatggattcccactttacagtggagaaggagcttgcagtaaccacaaaagtttctgtataagcaaatttagggaattgaacttcagacagtgtggttgtctccttacttatgaacttgggaatacttacttaggtaacaactaacatcagaggtttttgatctgtagcctttctttctgtccataattagctaatagcttctgctgtacaaacacaaaccattccctgtccaagaaaatta

SEQ ID NO: 186601 - DNA, 583 bp, Homo sapiens
  Payload ID: 16744
  Gene Symbol: STAMBP
  Gene Name: STAM binding protein
  ENST ID: ENST00000424659
  CDS Start-End: 94-583
gggaaaggtggggaagggtcccgggaacgtggtggggcagggcctccgagcgtggttggactttgaaggggatcggccgccaacttggtcctgatgtctgaccatggagatgtgagcctcccgcccgaagaccgggtgagggctctctcccagctgggtagtgcggtagaggtgaatgaagacattccaccccgtcggtacttccgctctggagttgagattatccgaatggcatccatttactctgaggaaggcaacattgaacatgccttcatcctctataacaagtatatcacgctctttattgagaaactaccaaaacatcgagattacaaatctgctgtcattcctgaaaagaaagacacagtaaagaaattaaaggagattgcatttcccaaagcagaagagctgaaggcagagctgttaaaacgatataccaaagaatatacagaatataatgaagaaaagaagaaggaagcagaggaattggcccggaacatggccatccagcaagagctggaaaaggaaaaacagagggtagcacaacagaagcagcagcaattggaacaggaacagttccatg

SEQ ID NO: 186602 - DNA, 560 bp, Homo sapiens
  Payload ID: 16744
  Gene Symbol: STAMBP
  Gene Name: STAM binding protein
  ENST ID: ENST00000452725
  CDS Start-End: 149-560
ggaacctccgggtgtcatccgcggggaaagatgctgcatcccctttttggaattgctcaaccaggtggtaaccggcgccgcttcctggccttgggaggtggttcctttcttaacccacaagaacctctcccaagagaacttggtcctgatgtctgaccatggagatgtgagcctcccgcccgaagaccgggtgagggctctctcccagctgggtagtgcggtagaggtgaatgaagacattccaccccgtcggtacttccgctctggagttgagattatccgaatggcatccatttactctgaggaaggcaacattgaacatgccttcatcctctataacaagtatatcacgctctttattgagaaactaccaaaacatcgagattacaaatctgctgtcattcctgaaaagaaagacacagtaaagaaattaaaggagattgcatttcccaaagcagaagagctgaaggcagagctgttaaaacgatataccaaagaatatacagaatataatgaagaaaagaagaaggaagcagaggaattggcccggaacatggcca

SEQ ID NO: 186603 - DNA, 1156 bp, Homo sapiens
  Payload ID: 16744
  Gene Symbol: STAMBP
  Gene Name: STAM binding protein
  ENST ID: ENST00000432295
  CDS Start-End: 203-1156
gcggggaaaggtggggaagggtcccgggaacgtggtggggcagggcctccgagcgtggttggactttgaaggggatcggccgccatgctgcatcccctttttggaattgctcaaccaggtggtaaccggcgccgcttcctggccttgggaggtggttcctttcttaacccacaagaacctctcccaagagaacttggtcctgatgtctgaccatggagatgtgagcctcccgcccgaagaccgggtgagggctctctcccagctgggtagtgcggtagaggtgaatgaagacattccaccccgtcggtacttccgctctggagttgagattatccgaatggcatccatttactctgaggaaggcaacattgaacatgccttcatcctctataacaagtatatcacgctctttattgagaaactaccaaaacatcgagattacaaatctgctgtcattcctgaaaagaaagacacagtaaagaaattaaaggagattgcatttcccaaagcagaagagctgaaggcagagctgttaaaacgatataccaaagaatatacagaatataatgaagaaaagaagaaggaagcagaggaattggcccggaacatggccatccagcaagagctggaaaaggaaaaacagagggtagcacaacagaagcagcagcaattggaacaggaacagttccatgccttcgaggagatgatccggaaccaggagctagaaaaagagcgactgaaaattgtacaggagtttgggaaggtagaccctggcctaggtggcccgctagtgcctgacttggagaagccctccttagatgtgttccccaccttaacagtctcatccatacagccttcagactgtcacacaactgtaaggccagctaagccacctgtggtggacaggtccttgaaacctggagcactgagcaactcagaaagtattcccacaatcgatggattgcgccatgtggtggtgcctgggcggctgtgcccacagtttctccagttagccagtgccaacactgcccggggagtggagacatgtggaattctctgtggaaaactgatgaggaatgaatttaccattacccatgttctcatccccaagcaaagtgctgggtctgattactgcaacacagagaacgaagaagaa

SEQ ID NO: 186604 - DNA, 845 bp, Homo sapiens
  Payload ID: 16744
  Gene Symbol: STAMBP
  Gene Name: STAM binding protein
  ENST ID: ENST00000536064
  CDS Start-End: 159-788
gcctccgagcgtggttggactttgaaggggatcggccgccatgctgcatcccctttttggaattgctcaaccaggtggtaaccggcgccgcttcctggccttgggaggtggttcctttcttaacccacaagaacctctcccaagagaacttggtcctgatgtctgaccatggagatgtgagcctcccgcccgaagaccgggtgagggctctctcccagctgggtagtgcggtagaggtgaatgaagacattccaccccgtcggtacttccgctctggagttgagattatccgaatggcatccatttactctgaggaaggcaacattgaacatgccttcatcctctataacaagtatatcacgctctttattgagaaactaccaaaacatcgagattacaaatctgctgtcattcctgaaaagaaagacacagtaaagaaattaaaggagattgcatttcccaaagcagaagagctgaaggcagagctgttaaaacgatataccaaagaatatacagaatataatgaagaaaagaagaaggaagcagaggaattggcccggaacatggccatccagcaagagctggaaaaggaaaaacagagggtagcacaacagaagcagcagcaattggaacaggaacagttccatgccttcgaggagatgatccggaaccaggagctagaaaaagagcgactgaaaattgtacaggagtttgggaagttcccacaatcgatggattgcgccatgtggtggtgcctgggcggctgtgcccacagtttctccagttagccagtgccaacactgcccggggagtggagacatgtggaattctctgtggaaaactgg

SEQ ID NO: 186605 - DNA, 1899 bp, Homo sapiens
  Payload ID: 16745
  Gene Symbol: STAMBPL1
  Gene Name: STAM binding protein-like 1
  ENST ID: ENST00000371922
  CDS Start-End: 824-1636
atattatctgacctaataagcctggatattttgttagaactggagagcttgggactcctcctttttagcaaaactctgggttagtggtgacagagaaggttggaacacattttaataaccattttttagtgattccttcttatccataaatttccagcagagtatgagttctagagtcaaatgcgaaaggttctagggcagcactgttcaatagaactcctgtgatgatggaagtgttctgtttggcactttccaatatggtatccactagccacatgtggcttctgggtacttaaatgtgactgactagtgtccctgaggtactgaatttctaattttgtttaattttaatcaagttcaaataaccacatgtggctagtggccactatattagaagtgcagtaggggtgagatattttgtttcatatggtcttgttggtctgactgagcaaacaaccttgacgttgattttccagtatttaaaagcattagggaatgaagggatcctgattgtcatggcctgtctctggtaaaatatcagtggatttagaactgctatgttaatcagatcaaggggcttttgccctgatgttatgtatttctctcactgttccatgagtgtccctgtgggcatatcacagtatctagcattttctctgtctgcttgaagactgaaaatgtctaattccagttcaatgtttctccttggaaactaaccttctcttctggctgccacactttttagaacaaatataaagctgaaattctcaaaaaattggagcatcagagattgatagaggcagaaaggaagcggattgctcagatgcgccagcagcagctagaatcggagcagtttctgtttttcgaagatcaactcaagaagcaagagttagcccgaggtcaaatgcgaagtcagcaaacctcagggctgtcagagcagattgatgggagcgctttgtcctgcttttccacacaccagaacaattccttgctgaatgtatttgcagatcaacctaataaaagtgatgcaaccaattatgctagccactctcctcctgtaaacagggccttaacgccagctgctactctaagtgctgttcagaatttagtggttgaaggactgcgatgtgtagttttgccagaagatctttgccacaaatttctgcaactggcagaatctaatacagtgagaggaatagaaacctgtggaatactctgtggaaaactgacacataatgaatttactattacccatgtaattgtgccaaagcagtctgcgggaccagactattgtgacatggagaatgtagaggaattattcaatgttcaggatcaacatgatctcctcactctaggatggatccatacacatcccactcaaactgcatttttatccagcgttgatcttcacactcactgttcctatcaactcatgttgccagaggccattgccattgtttgctcaccaaagcataaagacactggcatcttcaggctcaccaatgctggcatgcttgaggtttctgcttgtaaaaaaaagggctttcatccacacaccaaggagcccaggctgttcagtatatgcaaacatgtgttggtaaaagacataaaaataattgtgttggatctgaggtgatatgttctgaatgtaagcaccgtcaacatcagacacctactcatggacatgtggttgccggattttcttaagatgtttccagaaatgactgatattttatatttatacattttagatgacaaagcttgatatttattgctgttgcacattttaaagttttctttttgggttgctctgtgtcaagagaggttacatggtgttaaatcggtacctgataatgtacccaaatactatggccagataataaattgtgctgcaaacaa

SEQ ID NO: 186606 - DNA, 2208 bp, Homo sapiens
  Payload ID: 16745
  Gene Symbol: STAMBPL1
  Gene Name: STAM binding protein-like 1
  Uniprot ID: Q96FJ0
  ENST ID: ENST00000371924
  CDS Start-End: 635-1945
ctcttcatctttgtcatgtgattcaacatattcatgggaataatattccatgacctttgctgtcttctattggttagaagccaactacaggtcttaaacacactcaagtggagaggattacacaaacctacagatatcaaggggcaggaatcacagagctatcttagaattctgcctgttatagttctaaggttgagtttaaatccagactggctctaagtttaacagtccatgcttctaatcagtattatcttctttattcctttgaagaaagcaaacctactttataaccttgcatagagttctaagtaaggtatcccgcagcagattcatactgggtgtcagtcaaatgtgaattattttcacaccttcacttttaaagatcagcttcaggaaactataaccacttgcagttttgtattttcaggaagagatttccaacagtctctctaaacactcaggttatataggttatttcaatttgttcctgtttgtctgaggcagagataaccctggggtttgggatttcaaacttgggtctcaaaaaataactttagttctgcttcttgtttttgaaacagatgaagtgattgagaagaaacagtgaacatcctcatttcacagataagacaacatggatcagccttttactgtgaattctctgaaaaagttagctgctatgcctgaccatacagatgtttccctaagcccagaagagcgagtccgtgccctaagcaagcttggttgtaatatcaccatcagtgaagacatcactccacgacgttactttaggtctggagtagagatggagaggatggcgtctgtgtatttggaagaaggaaatttggaaaatgcctttgttctttataataaatttataaccttatttgtagaaaagcttcctaaccatcgagattaccagcaatgtgcagtacctgaaaagcaggatattatgaagaaactgaaggagattgcattcccaaggacagatgaattgaaaaacgaccttttaaagaaatataacgtagaataccaagaatatttgcaaagcaaaaacaaatataaagctgaaattctcaaaaaattggagcatcagagattgatagaggcagaaaggaagcggattgctcagatgcgccagcagcagctagaatcggagcagtttctgtttttcgaagatcaactcaagaagcaagagttagcccgaggtcaaatgcgaagtcagcaaacctcagggctgtcagagcagattgatgggagcgctttgtcctgcttttccacacaccagaacaattccttgctgaatgtatttgcagatcaacctaataaaagtgatgcaaccaattatgctagccactctcctcctgtaaacagggccttaacgccagctgctactctaagtgctgttcagaatttagtggttgaaggactgcgatgtgtagttttgccagaagatctttgccacaaatttctgcaactggcagaatctaatacagtgagaggaatagaaacctgtggaatactctgtggaaaactgacacataatgaatttactattacccatgtaattgtgccaaagcagtctgcgggaccagactattgtgacatggagaatgtagaggaattattcaatgttcaggatcaacatgatctcctcactctaggatggatccatacacatcccactcaaactgcatttttatccagcgttgatcttcacactcactgttcctatcaactcatgttgccagaggccattgccattgtttgctcaccaaagcataaagacactggcatcttcaggctcaccaatgctggcatgcttgaggtttctgcttgtaaaaaaaagggctttcatccacacaccaaggagcccaggctgttcagtatatgcaaacatgtgttggtaaaagacataaaaataattgtgttggatctgaggtgatatgttctgaatgtaagcaccgtcaacatcagacacctactcatggacatgtggttgccggattttcttaagatgtttccagaaatgactgatattttatatttatacattttagatgacaaagcttgatatttattgctgttgcacattttaaagttttctttttgggttgctctgtgtcaagagaggttacatggtgttaaatcggtacctgataatgtacccaaatactatggccagataataaattgtgctgcaaacaa

SEQ ID NO: 186607 - DNA, 2532 bp, Homo sapiens
  Payload ID: 16745
  Gene Symbol: STAMBPL1
  Gene Name: STAM binding protein-like 1
  Uniprot ID: Q96FJ0
  ENST ID: ENST00000371926
  CDS Start-End: 959-2269
taacatccaggagatattctaatacttcttattttccaagtacacacaaattgggggtagggggaagggctaagatgcttaatagtgggcgtagccagttgtggataaatatcaaaaagggaatcctaacatgaagtataagtgggattttcaccaaaaccctatccttccccagactccagtgacagtttaacggtcagctgcatcaaggcttgtgtactgtgcagtcttaaaaggcaccactcctgtccatctcggtgaaattgatggtggagcaaaagggagtttaggtggttccggtctggggagaagacgtgcagggtttcagatgcgaaagtcgcacccaaccgcttcactcgggctctaggccatccgcaggggccctgcttccttccacctgcgagctttttctgcagaatgcgggaagccgccgccgccgccacagaggagggggcggaggcagaggcggaggcggcacccaggggccggggcaggggaggccgggaccatcgcagtgacaatttattttcctgcagcagcggcagcagggacggttgctgcaggttcggggtcggccggcctgcgcgtgggcttgcgaggacgctgttcgtcccctgcgctggggtgtccgacagcgaggaggagaacgacgcacggagcccgcgcgactggaaccagcaaagctccatctgtcggcagaggagaagggggaggaggcacggccgaggcaaacgagcggacgcctcgtcgccgggtgccggtatcaccccgctgcaacgccttccagcaaaagccaccgcggcccgggttgcagcagccggacggatgccaaggccacacggcagccacgggggcagccgtcgcagtcgccgtcccacacgggctgcggacaccaagggttgctaatgaagtgattgagaagaaacagtgaacatcctcatttcacagataagacaacatggatcagccttttactgtgaattctctgaaaaagttagctgctatgcctgaccatacagatgtttccctaagcccagaagagcgagtccgtgccctaagcaagcttggttgtaatatcaccatcagtgaagacatcactccacgacgttactttaggtctggagtagagatggagaggatggcgtctgtgtatttggaagaaggaaatttggaaaatgcctttgttctttataataaatttataaccttatttgtagaaaagcttcctaaccatcgagattaccagcaatgtgcagtacctgaaaagcaggatattatgaagaaactgaaggagattgcattcccaaggacagatgaattgaaaaacgaccttttaaagaaatataacgtagaataccaagaatatttgcaaagcaaaaacaaatataaagctgaaattctcaaaaaattggagcatcagagattgatagaggcagaaaggaagcggattgctcagatgcgccagcagcagctagaatcggagcagtttctgtttttcgaagatcaactcaagaagcaagagttagcccgaggtcaaatgcgaagtcagcaaacctcagggctgtcagagcagattgatgggagcgctttgtcctgcttttccacacaccagaacaattccttgctgaatgtatttgcagatcaacctaataaaagtgatgcaaccaattatgctagccactctcctcctgtaaacagggccttaacgccagctgctactctaagtgctgttcagaatttagtggttgaaggactgcgatgtgtagttttgccagaagatctttgccacaaatttctgcaactggcagaatctaatacagtgagaggaatagaaacctgtggaatactctgtggaaaactgacacataatgaatttactattacccatgtaattgtgccaaagcagtctgcgggaccagactattgtgacatggagaatgtagaggaattattcaatgttcaggatcaacatgatctcctcactctaggatggatccatacacatcccactcaaactgcatttttatccagcgttgatcttcacactcactgttcctatcaactcatgttgccagaggccattgccattgtttgctcaccaaagcataaagacactggcatcttcaggctcaccaatgctggcatgcttgaggtttctgcttgtaaaaaaaagggctttcatccacacaccaaggagcccaggctgttcagtatatgcaaacatgtgttggtaaaagacataaaaataattgtgttggatctgaggtgatatgttctgaatgtaagcaccgtcaacatcagacacctactcatggacatgtggttgccggattttcttaagatgtttccagaaatgactgatattttatatttatacattttagatgacaaagcttgatatttattgctgttgcacattttaaagttttctttttgggttgctctgtgtcaagagaggttacatggtgttaaatcggtacctgataatgtacccaaatactatggccagataataaattgtgctgcaaacaa

SEQ ID NO: 186608 - DNA, 4184 bp, Homo sapiens
  Payload ID: 16745
  Gene Symbol: STAMBPL1
  Gene Name: STAM binding protein-like 1
  Uniprot ID: Q96FJ0
  ENST ID: ENST00000371927
  CDS Start-End: 959-2344
taacatccaggagatattctaatacttcttattttccaagtacacacaaattgggggtagggggaagggctaagatgcttaatagtgggcgtagccagttgtggataaatatcaaaaagggaatcctaacatgaagtataagtgggattttcaccaaaaccctatccttccccagactccagtgacagtttaacggtcagctgcatcaaggcttgtgtactgtgcagtcttaaaaggcaccactcctgtccatctcggtgaaattgatggtggagcaaaagggagtttaggtggttccggtctggggagaagacgtgcagggtttcagatgcgaaagtcgcacccaaccgcttcactcgggctctaggccatccgcaggggccctgcttccttccacctgcgagctttttctgcagaatgcgggaagccgccgccgccgccacagaggagggggcggaggcagaggcggaggcggcacccaggggccggggcaggggaggccgggaccatcgcagtgacaatttattttcctgcagcagcggcagcagggacggttgctgcaggttcggggtcggccggcctgcgcgtgggcttgcgaggacgctgttcgtcccctgcgctggggtgtccgacagcgaggaggagaacgacgcacggagcccgcgcgactggaaccagcaaagctccatctgtcggcagaggagaagggggaggaggcacggccgaggcaaacgagcggacgcctcgtcgccgggtgccggtatcaccccgctgcaacgccttccagcaaaagccaccgcggcccgggttgcagcagccggacggatgccaaggccacacggcagccacgggggcagccgtcgcagtcgccgtcccacacgggctgcggacaccaagggttgctaatgaagtgattgagaagaaacagtgaacatcctcatttcacagataagacaacatggatcagccttttactgtgaattctctgaaaaagttagctgctatgcctgaccatacagatgtttccctaagcccagaagagcgagtccgtgccctaagcaagcttggttgtaatatcaccatcagtgaagacatcactccacgacgttactttaggtctggagtagagatggagaggatggcgtctgtgtatttggaagaaggaaatttggaaaatgcctttgttctttataataaatttataaccttatttgtagaaaagcttcctaaccatcgagattaccagcaatgtgcagtacctgaaaagcaggatattatgaagaaactgaaggagattgcattcccaaggacagatgaattgaaaaacgaccttttaaagaaatataacgtagaataccaagaatatttgcaaagcaaaaacaaatataaagctgaaattctcaaaaaattggagcatcagagattgatagaggcagaaaggaagcggattgctcagatgcgccagcagcagctagaatcggagcagtttctgtttttcgaagatcaactcaagaagcaagagttagcccgaggtcaaatgcgaagtcagcaaacctcagggctgtcagagcagattgatgggagcgctttgtcctgcttttccacacaccagaacaattccttgctgaatgtatttgcagatcaacctaataaaagtgatgcaaccaattatgctagccactctcctcctgtaaacagggccttaacgccagctgctactctaagtgctgttcagaatttagtggttgaaggactgcgatgtgtagttttgccagaagatctttgccacaaatttctgcaactggcagaatctaatacagtgagaggaatagaaacctgtggaatactctgtggaaaactgacacataatgaatttactattacccatgtaattgtgccaaagcagtctgcgggaccagactattgtgacatggagaatgtagaggaattattcaatgttcaggatcaacatgatctcctcactctaggatggatccatacacatcccactcaaactgcatttttatccagcgttgatcttcacactcactgttcctatcaactcatgttgccagaggccattgccattgtttgctcaccaaagcataaagacactggcatcttcaggctcaccaatgctggcatgcttgaggtttctgcttgtaaaaaaaagggctttcatccacacaccaaggagcccaggctgttcagtattcagaaattcctttctgggataatttctggcactgctttggagatggagcccctgaaaattggctatggaccaaatggattcccactcttggggatctctaggtcatcatcaccatctgaacagctctgagagagacaagaagtggaatggagaaggtgattaggtaatccaagaattgccaggcgaacaattgtgaaaatctttcatagagttcccgatgaaaacaactctttcttgttagccattatctctgcctttcctttctaaagaaaaacacgtcatttcatcttgattatcagtttctcaagtactcatggatgtgaggccaggtaccctgtcaccttggctctgtttgggatgcaatgttgtgtttgtcaccacttcccattccccaaaagcatctttaacatagaccattcattcttcagattcaaaatgcttaagctgaactaacctcaaagggccctcattaatttacagacatttgaataacacccatattcatttctgctactgaaccaaagccttttccaaaaaaatcatctagcaaactgtttttgccaggccaaatattaacaggtatatatatttgcatacataaatatttacctctatgtcttgtgtgtttttgttatgagacagagtctcactctgtcgcccaggctggagtgcagtggcacagtctcagctcactgcaacctccacctcccaggttcaagcgattctcatgcctcagcctcccgagtagcgaggactacaggcgtgcaccaccacgcccagctaatttttgtatttttagtagagatggggttttaccctgttggccagggtggtctcgaattcctgacctctgatgatctacccgcctggacctctcaaagtgctgggattacagacatgagccactgtgccctgcctctgttttgtgtatttacataaatacatgtctccagagctttaaattcttcttaaattttaaaactagaactaaaccagacattgagaggacccagaaatataccctgactaacgtgggtggaatttcatttggcttgactctttggtgaaaaaaaaaaaaatcaggctctcaaggactcaatttggtgaaccaatgccaaatagaaaaatgttcttgacattttccccaaaatagatgtctaaagattttgcacttcaaattggtactttatgtattaaaagtgatattgaaactaaattcctacccaattagttgaaaaatatgaaaaaagcaattgctagagaatgcaatttattaaatgttggtggtcttttaaaaaatgaattcctcttgtagccagtgagatcagttatttatttatttattttaatagtaacaaggtctcactatattgtccaggctgatcttgaactcctggcctcaagctgtcctcccatctcagcttcccaaagtgctgagattataggcatgagccaccatgcctggctagttaatggttattaagtaatacaaacatttctgtgaattccaccagatcattgactttggcatagttcacttaagactttgtttgataaaataaatctctttcactctaattaggaagcatttttgggatcctgattaatgctctaatattgtggggccaaaaaatatgtggaacgtggccctgcagttagatgagctgagatcactatagtactatatagcgctctaaatcctaaatgctagatcactgtaatactgtacagatcagccacttgctggcttgtgactctgggccatttacttcacctctcaaaaggcatatttaaagtgaggaaaataataagtttattttggaaattcagttagatgatgcaaattgtttactgtaatttctagcatgtagttcgtgctccatgcatttaactgttattacaggttgtattagtatcacattaaattacccactgaagtgaaagtgaaaccagaatgctgtcaacgatt

SEQ ID NO: 186609 - DNA, 3312 bp, Homo sapiens
  Payload ID: 16746
  Gene Symbol: SNN
  Gene Name: stannin
  Uniprot ID: O75324
  ENST ID: ENST00000329565
  CDS Start-End: 213-479
agccgggccccgcccgccgcagcgcggggctcctgcgtcccgagtgcgcggcggccggaccgggcgggcggagccgggcccgcggggctgctgcggggcgatcgggccgggccgctgccgcgccatggactcccgtgtccagcctgagttccagcctcactgagtggccacccccaaagtgctgccagccgaggaagcccccagcactgaccatgtctattatggaccacagccccaccacgggcgtggtcacagtcatcgtcatcctcattgccatcgcggccctgggggccttgatcctgggctgctggtgctacctgcggctgcagcgcatcagccagtcagaggacgaggagagcatcgtgggggatggggagaccaaggaacccttcctgctggtgcagtattcggccaagggaccgtgcgtggagagaaaggccaagctgatgactcccaacggcccggaagtccacggctgagccaggatgcaaggctcctggtcctgtttgcagccggccaagaggcgctgggaggggcaaaaccatacggatgcgctgctgtctgagaggaagggctgacacttgctggcatggcctctgcgggcttcgtcatcgcatgcactgatgcccggggacctggctgtcctgggcttcccctcggcctccaggtgaggctgcccattgcaggcactgggcaggcctgaccttgctggggctcatggccctgtagcgcttttgttacttgaatgtctagctgagcctgtttttgatggagctactactgtaatgcgtgaactaacaaacctgtgaactgtaaataggcccctggaagcacgtgcttaagcccttttgctgatttttaaaaatatcatctagcgcacacgggactggtattctggctgtactaatgacaagctgagtcaagaccctggagggtcataggcttgtaaaggcccacgccacactcggcaggggtctctcatgtgtgtccatctgcgtgtatgtcaaggaagtgagatgccaatttggggtcttgaggctgaccagttggggtgcttgggtgatctctgcttcattagtcatgggtggaagaaaaaccacaccccccgcacccctccgttctttctgcatagactcacttgttaaatagcagttctgttgagagtggagttactgcagggaagctaccggacctgcctgggagccagtgaagggcgagtcagggcacgcgtcctggaggctgccagcgtccttgtagcagagcagtttcttgccgcttgggtcttcagcacgccaagccccccaccaaccctccaccccgagtgaaggcttcgctgaaattgctttggtcctcatagagcctgtggtggctacttttggtctgaaacccacttggcccaggaaagagaaaaggttgtatgttttgtgttggtgtttcctattttctgcactggaggggaggggactgttgaggttctgtcttttttcttcttttcctcttccctcttcacatcacttggcttcctttcctctctgatgaccgtccgcctatggggttctgacttcactttcctcagcgggtctccagtcccctgacccagctctaaaggcacttaggacccagggaacatttctcacgtgcacattcccctaagagccaccagactgcttcctgccagcctgtgcttgcggcagggagccggggcagggcagaggtgaacttgaagttcaggacttgactctcccacaggtggtgagctggtggctctctggtgagctagtgtctccacagcctgtctccaaggcctcccctatgtacatttcagtgagctcactttgatttttaatcccaccacaagcacatactaattttatttatgattcaaatgtgactcgtgcctgcccatccctgtaatagatggaaggtcagccccggcttaaccacagagcactggcccttcatggctgagctcagagctctggcctcctgctcagactaaaggcacctcctctggcctcacccaagcctcttctaaaaaccatgttgaatgaatccacgttctggaaccccgaggcgggagaagtagggagctgttcgtttaagcagcatacacctaaattgggggtttaaacattaagtaggagcttggggtggaagagggacagccggctgggccacctgagcagaaggtggtaatgaaacacctcagctgggctcttgggagaccttaggaagcaggagaggcaacacctctggctactgatggtgtggcaagttcagaagaggtggtggtggggtaggcgtgatgtcagcagaagccctgcaggctgggtgggcaggacacgtggtgggggccactgaaaccaggcctaggagggagaacaagttccaaaggtgccgactggaagaagggggtaaaagtttgctttggtgagtgagaaaaggctggggcgtgtgatccatcccctcacgtttcagaacttccaggctttctacctcgactctcaccacagccagcacatacacctaggctgtttttccttcctccacacctgagggacgcagcaacagctaggatctgcattttcaggttccgagcctgacccctggaactgaccagcgctcgattgtcagccttggcctggggttttgaccttgccagtgaagtttcggttttgaagtgattaaatgtcacttcctcatcagtttcacttctggaggttttcttatcctactccctggtgccagggacgtacctgggagtttgaatcaggcccatttgagcgtggcagccgtgttgggtgaaggtccggggctcggtgaggcactgggggggttttcgggaggaaaatgaaaatgcttctagaatgagtgaaccacatcatagctctcactgttttttcaatagctactttttttagcagacaccagagccacactcaaatggctaagtaggttatgacctctctggattatttttgaatgcccaactgttgcattcaagttttctgactaataagaaattaagcattcatccttcgtatcactgcagaagcaacagtgggggcacagggagggaactcttgacactgagccactaaaatatggactaattttttggacaaatcttcaaacggactgtgctactgtatttgtctcaaagctaccaagtttgtgcaataagtggaagggatgtcatccttcttcaataaatgctgaatgacattcaagctgattttctagaccactgagaaaatctttatttacaataaatttcaataaaatttgcataaatatattcccaatgtacaa

SEQ ID NO: 186610 - DNA, 3883 bp, Homo sapiens
  Payload ID: 16747
  Gene Symbol: STC1
  Gene Name: stanniocalcin 1
  Uniprot ID: P52823
  ENST ID: ENST00000290271
  CDS Start-End: 285-1028
cagtttgcaaaagccagaggtgcaagaagcagcgactgcagcagcagcagcagcagcggcggtggcagcagcagcagcagcggcggcagcagcagcagcagcggaggcaccggtggcagcagcagcatcaccagcaacaacaacaaaaaaaaatcctcatcaaatcctcacctaagctttcagtgtatccagatccacatcttcactcaagccaggagagggaaagaggaaaggggggcaggaaaaaaaaaaaacccaacaacttagcggaaacttctcagagaatgctccaaaactcagcagtgcttctggtgctggtgatcagtgcttctgcaacccatgaggcggagcagaatgactctgtgagccccaggaaatcccgagtggcggctcaaaactcagctgaagtggttcgttgcctcaacagtgctctacaggtcggctgcggggcttttgcatgcctggaaaactccacctgtgacacagatgggatgtatgacatctgtaaatccttcttgtacagcgctgctaaatttgacactcagggaaaagcattcgtcaaagagagcttaaaatgcatcgccaacggggtcacctccaaggtcttcctcgccattcggaggtgctccactttccaaaggatgattgctgaggtgcaggaagagtgctacagcaagctgaatgtgtgcagcatcgccaagcggaaccctgaagccatcactgaggtcgtccagctgcccaatcacttctccaacagatactataacagacttgtccgaagcctgctggaatgtgatgaagacacagtcagcacaatcagagacagcctgatggagaaaattgggcctaacatggccagcctcttccacatcctgcagacagaccactgtgcccaaacacacccacgagctgacttcaacaggagacgcaccaatgagccgcagaagctgaaagtcctcctcaggaacctccgaggtgaggaggactctccctcccacatcaaacgcacatcccatgagagtgcataaccagggagaggttattcacaacctcaccaaactagtatcattttaggggtgttgacacaccagttttgagtgtactgtgcctggtttgatttttttaaagtagttcctattttctatcccccttaaagaaaattgcatgaaactaggcttctgtaatcaatatcccaacattctgcaatggcagcattcccaccaacaaaatccatgtgaccattctgcctctcctcaggagaaagtaccctcttttaccaacttcctctgccatgtttttcccctgctcccctgagaccacccccaaacacaaaacattcatgtaactctccagccattgtaatttgaagatgtggatccctttagaacggttgccccagtagagttagctgataaggaaactttatttaaatgcatgtcttaaatgctcataaagatgttaaatggaattcgtgttatgaatctgtgctggccatggacgaatatgaatgtcacatttgaattcttgatctctaatgagctagtgtcttatggtcttgatcctccaatgtctaattttctttccgacacatttaccaaattgcttgagcctggctgtccaaccagactttgagcctgcatcttcttgcatctaatgaaaaacaaaaagctaacatctttacgtactgtaactgctcagagctttaaaagtatctttaacaattgtcttaaaaccagagaatcttaaggtctaactgtggaatataaatagctgaaaactaatgtactgtacataaattccagaggactctgcttaaacaaagcagtatataataactttattgcatatagatttagttttgtaacttagctttatttttcttttcctgggaatggaataactatctcacttccagatatccacataaatgctccttgtggccttttttataactaagggggtagaagtagttttaattcaacatcaaaacttaagatgggcctgtatgagacaggaaaaaccaacaggtttatctgaaggaccccaggtaagatgttaatctcccagcccacctcaacccagaggctactcttgacttagacctatactgaaagatctctgtcacatccaactggaaattccaggaaccaaaaagagcatccctatgggcttggaccacttacagtgtgataaggcctactatacattaggaagtggcagttctttactcgtcccctttcatcggtgcctggtactctggcaaatgatgatggggtgggagactttccattaaatcaatcaggaatgagtcaatcagcctttaggtctttagtccgggggacttggggctgagagagtataaataaccctgggctgtccagccttaatagacttctcttacattttcgtcctgtagcacgctgcctgccaaagtagtcctggcagctggaccatctctgtaggatcgtaaaaaaatagaaaaaaagaaaaaaaaaagaaagaaagagggaaaaagagctggtggtttgatcatttctgccatgatgtttacaagatggcgaccaccaaagtcaaacgactaacctatctatgaacaacagtagtttctcagggtcactgtccttgaacccaacagtcccttatgagcgtcactgcccaccaaaggtcaatgtcaagagaggaagagagggaggaggggtaggactgcaggggccactccaaactcgcttaggtagaaactattggtgcttgactctcactaggctaaactcaagatttgaccaaatcgagtgatagggatcctggtgggaggagagagggcacatctccagaaaaatgaaaagcaatacaactttaccataaagcctttaaaaccagtaacgtgctgctcaaggaccaagagcaattgcagcagacccagcagcagcagcagcagcacaaacattgctgcctttgtccccacacagcctctaagcgtgctgacatcagattgttaagggcatttttatactcagaactgtcccatccccaggtccccaaacttatggacactgccttagcctcttggaaatcaggtagaccatattctaagttagactcttcccctccctcccacacttcccacccccaggcaaggctgacttctctgaatcagaaaagctattaaagtttgtgtgttgtgtccattttgcaaacccaactaagccaggaccccaatgcgacaagtagttcatgagtattcctagcaaatttctctctttcttcagttcagtagatttccttttttcttttctttttttttttttttttttttggctgtgacctcttcaaaccgtggtacccccccttttctccccacgatgatatctatatatgtatctacaatacatatatctacacatacagaaagaagcagttctcacaatgttgctagttttttgcttctctttcccccaccctactccctccaattcccccttaaacttccaaagcttcgtcttgtgtttgctgcagagtgattcgggggctgacctagaccagtttgcatgattcttctcttgtgatttggttgcactttagacatttttgtgccattatatttgcattatgtatttataatttaaatgatatttaggtttttggctgagtactggaataaacagtgagcatatctggtatatgtcattatttattgttaaattacatttttaagctccatgtgcatataaaggttatgaaacatatcatggtaatgacagatgcaagttattttatttgcttatttttataattaaagatgccatagcataatatgaagcctttggtgaattccttctaagataaaaataataataaagtgttacgttttattggtttcccccca

SEQ ID NO: 186611 - DNA, 1748 bp, Homo sapiens
  Payload ID: 16747
  Gene Symbol: STC1
  Gene Name: stanniocalcin 1
  Uniprot ID: P52823
  ENST ID: ENST00000524323
  CDS Start-End: 356-892
aataaatgtgcttcatgcctgatggcaataaactgccagtgtaatccaatagccttaggcagtggagctcctttgtttaataaattgcatgcaactaaacgaagaagctggacgctctgctgagggtatttcattgcataagcctagcctgattgcctgaaatctggcacgtaccctcttggagggggaggggtgagaggggaggaaaggcttgaatgttggcatgcttcaaagcgctctctatactttccagaagctgatctaagctgaagtggttcgttgcctcaacagtgctctacaggtcggctgcggggcttttgcatgcctggaaaactccacctgtgacacagatgggatgtatgacatctgtaaatccttcttgtacagcgctgctaaatttgacactcagggaaaagcattcgtcaaagagagcttaaaatgcatcgccaacggggtcacctccaaggtcttcctcgccattcggaggtgctccactttccaaaggatgattgctgaggtgcaggaagagtgctacagcaagctgaatgtgtgcagcatcgccaagcggaaccctgaagccatcactgaggtcgtccagctgcccaatcacttctccaacagatactataacagacttgtccgaagcctgctggaatgtgatgaagacacagtcagcacaatcagagacagcctgatggagaaaattgggcctaacatggccagcctcttccacatcctgcagacagaccactgtgcccaaacacacccacgagctgacttcaacaggagacgcaccaatgagccgcagaagctgaaagtcctcctcaggaacctccgaggtgaggaggactctccctcccacatcaaacgcacatcccatgagagtgcataaccagggagaggttattcacaacctcaccaaactagtatcattttaggggtgttgacacaccagttttgagtgtactgtgcctggtttgatttttttaaagtagttcctattttctatcccccttaaagaaaattgcatgaaactaggcttctgtaatcaatatcccaacattctgcaatggcagcattcccaccaacaaaatccatgtgaccattctgcctctcctcaggagaaagtaccctcttttaccaacttcctctgccatgtttttcccctgctcccctgagaccacccccaaacacaaaacattcatgtaactctccagccattgtaatttgaagatgtggatccctttagaacggttgccccagtagagttagctgataaggaaactttatttaaatgcatgtcttaaatgctcataaagatgttaaatggaattcgtgttatgaatctgtgctggccatggacgaatatgaatgtcacatttgaattcttgatctctaatgagctagtgtcttatggtcttgatcctccaatgtctaattttctttccgacacatttaccaaattgcttgagcctggctgtccaaccagactttgagcctgcatcttcttgcatctaatgaaaaacaaaaagctaacatctttacgtactgtaactgctcagagctttaaaagtatctttaacaattgtcttaaaaccagagaatcttaaggtctaactgtggaatataaatagctgaaaactaatgtactgtacataaattccagaggactctgcttaaacaaagcagtatataataactttattgcatatagatttagttttgtaacttagctttatttttctttt

SEQ ID NO: 186612 - DNA, 5353 bp, Homo sapiens
  Payload ID: 16748
  Gene Symbol: STC2
  Gene Name: stanniocalcin 2
  Uniprot ID: O76061
  ENST ID: ENST00000265087
  CDS Start-End: 1311-2219
tttctccttccctccacgggccgggtgagaaagtagccgggggctatcccgacccggcggttcttggggagggggccgaacaagaaaagggaggagatggagataacttccccggatttagcttttttgtctttgtttttgttctcaccacttccatcggatgactggagagtaaaagggaacccggagcggggtggcgagcagcgctttgagaaaatgcaggagtgtgtttggagacgcgtaaagttgcctttcaagctctggcctccgggcacgcgatgctccgcggcgggctgactcagggctgccttgggcctccctgccaccctcctggaaatgatgcaagtcctgactgtcacctggatccctgcagcccagcctggaatgcgtctggattaggggaaagacgagaaacgacactccaggtgttgcacggcccaccaaagcgggaagatagggcagttgctcagaccaaatactgtatctagtgcttctgctcctatcttcaatcgtggggttctttttaatgcaaagtgtcacaaggccaggaattcccatgtgtgctcagttggcccacagcatcattgtgcctaggaaactgcttcaatttatcaagtcctctgggctgggaatctcactgaattccaaacggcggaaagaggaaactttcccaacccgatgtgggtgtgacgcgagccaggggccccagggacactgtcccagagcacaccgtccccctttaacagcaactggagcttggattcgctcttatattgtacagtcctttcgaccattgccctggagcacccgcacacgcgcacgcatctccggccgcgctcacacacactcatacacacgcacgcaaacgcgtggccgccgccaggtcggcaactttgtccggcgctcccagcggcgctcggcttcctcctgtagtagttgagcgcaggccccgcctcccggccgtgttgtcaaaagggccggggtctcggattggtccagccgccgggacaacacctgctcgactccttcattcaagtgacaccagagcttccagggatatttgaggcaccatccctgccattgccgggcactcgcggcgctgctaacggcctggtcacatgctctccggagagctacgggagggcgctgggtaacctctatccgagccgcggccgcgaggaggagggaaaaggcgagcaaaaaggaagagtgggaggaggaggggaagcggcgaaggaggaagaggaggaggaggaagaggggagcacaaaggatccaggtctcccgacgggaggttaataccaagaaccatgtgtgccgagcggctgggccagttcatgaccctggctttggtgttggccacctttgacccggcgcgggggaccgacgccaccaacccacccgagggtccccaagacaggagctcccagcagaaaggccgcctgtccctgcagaatacagcggagatccagcactgtttggtcaacgctggcgatgtggggtgtggcgtgtttgaatgtttcgagaacaactcttgtgagattcggggcttacatgggatttgcatgacttttctgcacaacgctggaaaatttgatgcccagggcaagtcattcatcaaagacgccttgaaatgtaaggcccacgctctgcggcacaggttcggctgcataagccggaagtgcccggccatcagggaaatggtgtcccagttgcagcgggaatgctacctcaagcacgacctgtgcgcggctgcccaggagaacacccgggtgatagtggagatgatccatttcaaggacttgctgctgcacgaaccctacgtggacctcgtgaacttgctgctgacctgtggggaggaggtgaaggaggccatcacccacagcgtgcaggttcagtgtgagcagaactggggaagcctgtgctccatcttgagcttctgcacctcggccatccagaagcctcccacggcgccccccgagcgccagccccaggtggacagaaccaagctctccagggcccaccacggggaagcaggacatcacctcccagagcccagcagtagggagactggccgaggtgccaagggtgagcgaggtagcaagagccacccaaacgcccatgcccgaggcagagtcgggggccttggggctcagggaccttccggaagcagcgagtgggaagacgaacagtctgagtattctgatatccggaggtgaaatgaaaggcctggccacgaaatctttcctccacgccgtccattttcttatctatggacattccaaaacatttaccattagagaggggggatgtcacacgcaggattctgtggggactgtggacttcatcgaggtgtgtgttcgcggaacggacaggtgagatggagacccctggggccgtggggtctcaggggtgcctggtgaattctgcacttacacgtactcaagggagcgcgcccgcgttatcctcgtacctttgtcttctttccatctgtggagtcagtgggtgtcggccgctctgttgtgggggaggtgaaccagggaggggcagggcaaggcagggcccccagagctgggccacacagtgggtgctgggcctcgccccgaagcttctggtgcagcagcctctggtgctgtctccgcggaagtcagggcggctggattccaggacaggagtgaatgtaaaaataaatatcgcttagaatgcaggagaagggtggagaggaggcaggggccgagggggtgcttggtgccaaactgaaattcagtttcttgtgtggggccttgcggttcagagctcttggcgagggtggagggaggagtgtcatttctatgtgtaatttctgagccattgtactgtctgggctgggggggacactgtccaagggagtggcccctatgagtttatattttaaccactgcttcaaatctcgatttcactttttttatttatccagttatatctacatatctgtcatctaaataaatggctttcaaacaaagcaactgggtcattaaaaccagctcaaagggggtttaaaaaaaaaaaaccagcccatcctttgaggctgatttttcttttttttaagttctattttaaaagctatcaaacagcgacatagccatacatctgactgcctgacatggactcctgcccacttgggggaaaccttatacccagaggaaaatacacacctggggagtacatttgacaaatttcccttaggatttcgttatctcaccttgaccctcagccaagattggtaaagctgcgtcctggcgattccaggagacccagctggaaacctggcttctccatgtgaggggatgggaaaggaaagaagagaatgaagactacttagtaattcccatcaggaaatgctgaccttttacataaaatcaaggagactgctgaaaatctctaagggacaggattttccagatcctaattggaaatttagcaataaggagaggagtccaaggggacaaataaaggcagagagaagagacagaactaaaaatacgaggaaaggagagtgaggattttcattaaaagtctcagcagtgggtttcttgggttatttaaaacatcacctaaataggccttttcttcctaattggccatcaaattaaagcctatcctttctcaagcaggagctggtattgtagggagtggccgggtattctgggctgggctcttctggagtagggggtcagcaaacattgtctgcaaagggccagatactgaatccagtactttcagtttggcgagccgtgaggtctctgtcgaaactactcaactctgccgtcctagcacaaaagcagccatagacaacacacaaacgagagggcttggctcccttccaggaagatttatttaacaggctcccagctgaatttcactcacaggacacagtttactgatctctgttctagtgagtgggtcaaaaagcatatgcatccttatccgtcaactcatcagctcttcctcaaggcaacctgaggccagacaccaagaaaccaagcgtatctgctctaaaatgacttgttcctggggaatgccttcaaccaaaacacagctagtatttctatgccccaaatccaatcccagtctttcatgatccatgccggcggttgggtggggaggggaatcattggttgggggaagggaggaaaccccacctccagcccccgccaccgggctccctgggcacccagcaagatctggggctgcagagaacagaagagctggtgcacttaatccagctctgcccttggggggaggaggacctgtgtgtcaggctctgccatgggaacgagtgtaaaccgtggctgtctcctgcagtgagccaccgcggcaggcacgttgactgttttactgacatcactcaaaagctaaagcaataacattctcctgcgttgctgagtcagctgttcatttgtccgccagctcctggactggatgtgtgaaaggcatcacatttccattttcctccgtgtaaatgttttatgtgttcgcctactgatcccattcgttgcttctattgtaaatatttgtcatttgtatttattatctctgtgttttccccctaaggcataaaatggtttactgtgttcatttgaacccatttactgatctctgttgtatatttttcatgccactgctttgttttctcctcagaagtcgggtagatagcatttctatcccatccctcacgttattggaagcatgcaacagtatttattgctcagggtcttctgcttaaaactgaggaaggtccacattcctgcaagcattgattgagacatttgcacaatctaaaatgtaagcaaagtagtcattaaaaatacaccctctacttgggctttatactgcatacaaatttactcatgagccttcctttgaggaaggatgtggatctccaaataaagatttagtgtttattttgagctctgcatcttaacaagatgatctgaacacctctcctttgtatcaataaatagccctgttattctgaagtgagaggaccaagtatagtaaaatgctgacatctaaaactaaataaatagaaaacaccaggccagaactatagtcatactcacacaaagggagaaatttaaactcgaaccaagcaaaaggcttcacggaaatagcatggaaaaacaatgcttccagtggccacttcctaaggaggaacaaccccgtctgatctcagaattggcaccacgtgagcttgctaagtgataatatctgtttctactacggatttaggcaacaggacctgtacattgtcacattgcattatttttcttcaagcgttaataaaagttttaaataaatggcttccacttga

SEQ ID NO: 186613 - DNA, 473 bp, Homo sapiens
  Payload ID: 16748
  Gene Symbol: STC2
  Gene Name: stanniocalcin 2
  ENST ID: ENST00000518455
  CDS Start-End: 314-473
tgccccttccgagagaggactgggggccacattcggtgaagggctgcaagcttcctcccgggctgcgggaattctaggggattgggtgatacctcacccggatccctaattaaaaggagcctgcaacctctgatagtggcgtttctgaaggctcgcccccagctgactccactcctaagcctgctcgccaaccgcagcttccctagctgcggagatccagcactgtttggtcaacgctggcgatgtggggtgtggcgtgtttgaatgtttcgagaacaactcttgtgagattcggggcttacatgggatttgcatgacttttctgcacaacgctggaaaatttgatgcccagggcaagtcattcatcaaagacgccttgaaatgtaaggcccacgctctgcggcacaggttcggctgcataagccggaagtgcccggccatcagggaaatggtgtcccagttgcagcgggaat

SEQ ID NO: 186614 - DNA, 616 bp, Homo sapiens
  Payload ID: 16748
  Gene Symbol: STC2
  Gene Name: stanniocalcin 2
  ENST ID: ENST00000520648
  CDS Start-End: 1-370
gcagaatacagcggagatccagcactgtttggtcaacgctggcgatgtggggtgtggcgtgtttgaatgtttcgagaacaactcttgtgagattcggggcttacatgggatttgcatgacttttctgcacaacgctggaaaatttgatgcccagggcaagtcattcatcaaagacgccttgaaatgtaaggcccacgctctgcggcacaggttcggctgcataagccggaagtgcccggccatcagggaaatggtgtcccagttgcagcgggaatgctacctcaagcacgacctgtgcgcggctgcccaggagaacacccgggtgatagtggagatgatccatttcaaggacttgctgctgcacgagtgagtactgccccgcagagggcctgggtgaaggggccacccagcaaggatggcaatgtgtatgggaggagagccgcgttgcttctagaggctgaatgcctgtcaaatggagaaggcttccatttacttcagaaagctacactgactctactaaaaggcccctttcctgctggcttttaggaaaagagagaattccctcatcagtctcaaaatcacaagcaacagaaatgggaaatcgttttactaagaa

SEQ ID NO: 186615 - DNA, 3476 bp, Homo sapiens
  Payload ID: 16749
  Gene Symbol: SND1
  Gene Name: staphylococcal nuclease and tudor domain containing 1
  Uniprot ID: Q7KZF4
  ENST ID: ENST00000354725
  CDS Start-End: 195-2927
ggcggagatcgcgtctctttcgctccgtgtcccgctgctgctcctgtgagcgcccggcgagtccgtcccgtccaccgtccgcagctggtagccagcctgcccctcgcctcgactccctttcaccaacaccgacacccacattgacacctccagtccggccagccgctccactcgttgcctttgcatctccacacatggcgtcctccgcgcagagcggcggctcctccgggggacccgcggtccccaccgtgcagcggggcatcatcaagatggtcctctcagggtgcgccatcattgtccgaggtcagcctcgtggtgggcctcctcctgagcggcagatcaacctcagcaacattcgtgctggaaatcttgctcgccgggcagccgccacacaacctgatgcaaaggatacccctgatgagccctgggcatttccagctcgagagttccttcgaaagaagctgattgggaaggaagtctgtttcacgatagaaaacaagactccccaggggcgagagtatggcatgatctaccttggaaaagataccaatggggaaaacattgcagaatcactggttgcagagggcttagccacccggagagaaggcatgagagctaataatcctgagcagaaccggctttcagaatgtgaagaacaagcaaaggcagccaagaaagggatgtggagtgaggggaacggttcacatactatccgggatctcaagtataccattgaaaacccaaggcactttgtggactcacaccaccagaagcctgttaatgctatcatcgagcatgtgcgggacggcagtgtggtcagggccctgctcctcccagattactacctggttacagtcatgctgtcaggcatcaagtgcccaacttttcgacgggaagcagatggcagtgaaactccagagccttttgctgcagaagccaaatttttcactgagtcgcgactgcttcagagagatgttcagatcattctggagagctgccacaaccagaacattctgggtaccatccttcatccaaatggcaacatcacagagctcctcctgaaggaaggtttcgcacgctgtgtggactggtcgattgcagtttacacccggggcgcagaaaagctgagggcggcagagaggtttgccaaagagcgcaggctgagaatatggagagactatgtggctcccacagctaatttggaccaaaaggacaagcagtttgttgccaaggtgatgcaggttctgaatgctgatgccattgttgtgaagctgaactcaggcgattacaagacgattcacctgtccagcatccgaccaccgaggctggagggggagaacacccaggataagaacaagaaactgcgtcccctgtatgacattccttacatgtttgaggcccgggaatttcttcgaaaaaagcttattgggaagaaggtcaatgtgacggtggactacattagaccagccagcccagccacagagacagtgcctgccttttcagagcgtacctgtgccactgtcaccattggaggaataaacattgctgaggctcttgtcagcaaaggtctagccacagtgatcagataccggcaggatgatgaccagagatcatcacactacgatgaactgcttgctgcagaggccagagctattaagaatggcaaaggattgcatagcaagaaggaagtgcctatccaccgtgttgcagatatatctggggatacccaaaaagcaaagcagttcctgccttttcttcagcgggcaggtcgttctgaagctgtggtggaatacgtcttcagtggttctcgtctcaaactctatttgccaaaggaaacttgccttatcaccttcttgcttgcaggcattgaatgccccagaggagcccgaaacctcccaggcttggtgcaggaaggagagcccttcagcgaggaagctacacttttcaccaaggaactggtgctgcagcgagaggtggaggtggaggtggagagcatggacaaggccggcaactttatcggctggctgcacatcgacggtgccaacctgtccgtcctgctggtggagcacgcgctctccaaggtccacttcaccgccgaacgcagctcctactacaagtccctgctgtctgccgaggaggccgcaaagcagaagaaagagaaggtctgggcccactatgaggagcagcccgtggaggaggtgatgccagtgctggaggagaaggagcgatctgctagctacaagcccgtgtttgtgactgagatcactgatgacctgcacttctacgtgcaggatgtggagaccggcacccagttggagaagctgatggagaacatgcgcaatgacattgccagtcacccccctgtagagggctcctatgccccccgcaggggagagttctgcattgccaaatttgtagatggagaatggtaccgtgcccgagtagagaaagtcgagtctcctgccaaaatacatgtcttctacattgactacggcaacagagaggtcctgccatccacccgcctgggtaccctatcacctgccttcagcactcgggtgctgccagctcaagccacggagtatgccttcgccttcatccaggtgccccaagatgatgatgcccgcacggacgccgtggacagcgtagttcgggatatccagaacactcagtgcctgctcaacgtggaacacctgagtgccggctgcccccatgtcaccctgcagtttgcagattccaagggcgatgtggggctgggcttggtgaaggaagggctggtcatggtggaggtgcgcaaggagaaacagttccagaaagtgatcacagaatacctgaatgcccaagagtcagccaagagcgccaggctgaacctgtggcgctatggagactttcgagctgatgatgcagacgaatttggctacagccgctaaggaggggatcgggtttggcccccagccccgctcacgccagtccctcttcctctgccgggagggtgttttcaactccaaaccccagagaggggttgtagattgggtccagctttgcttcagtgtgtggaaatgtctcgtggggtggcatcggggctgcggggtggggaccccaaggctttctggggcagacccttgtcctctgggatgatgggcactgctatccacagtctctgccagttggttttatttggaggtttgtgggctttttttaaaaaaaaaaagtcctcaaatcaggaagaaacatcaaagactatgtcctagtggagggagtaatcctaacacccaggctggccgccagctggcacctgcctctatcccagactgccctcgtcccagctctctgtccaactgttgattatgtgatttttctgatacgtccattctcaaatgccagtgtgttcacatcttcgctctggccagcccattctgtatttaaagcttttgaggcccaataaaatagtacgtgctgtctgcagcccttattgatca

SEQ ID NO: 186616 - DNA, 695 bp, Homo sapiens
  Payload ID: 16749
  Gene Symbol: SND1
  Gene Name: staphylococcal nuclease and tudor domain containing 1
  ENST ID: ENST00000486037
  CDS Start-End: 1-695
gaggctcttgtcagcaaaggtctagccacagtgatcagataccggcaggatgatgaccagagatcatcacactacgatgaactgcttgctgcagaggccagagctattaagaatggcaaaggattgcatagcaagaaggaagtgcctatccaccgtgttgcagatatatctggggatacccaaaaagcaaagcagttcctgccttttcttcagcgggcaggtcgttctgaagctgtggtggaatacgtcttcagtggttctcgtctcaaactctatttgccaaaggaaacttgccttatcaccttcttgcttgcaggcattgaatgccccagaggagcccgaaacctcccaggcttggtgcaggaaggagagcccttcagcgaggaagctacacttttcaccaaggaactggtgctgcagcgagaggtctgggcccactatgaggagcagcccgtggaggaggtgatgccagtgctggaggagaaggagcgatctgctagctacaagcccgtgtttgtgactgagatcactgatgacctgcacttctacgtgcaggatgtggagaccggcacccagttggagaagctgatggagaacatgcgcaatgacattgccagtcacccccctgtagagggctcctatgccccccgcaggggagagttctgcattgccaaatttgtagatggagaatggta

SEQ ID NO: 186617 - DNA, 3420 bp, Homo sapiens
  Payload ID: 16750
  Gene Symbol: STBD1
  Gene Name: starch binding domain 1
  Uniprot ID: O95210
  ENST ID: ENST00000237642
  CDS Start-End: 745-1821
gagctgactggcatctttagatggatggtcctcagtccagtccttccattttacaggcgaggaggcggaagcttggggaggctaagcgcgctgagctggcggcggagcggagcttccactagggctcccagtttccccgcaccgcgcccgccgtcctccgggccacccatcccacccgaacgcgccaccgctctagcccgcgctccagcccgcgcgtcaccgacgcccgcggcctctcccacctctaagttccaggaagctctcggcctctagctgaccgcgttgctgctgagcttccctggggagaaggcgccgaggtgcccggtgcgggccgaggcagggctgggcctcgcgggcagcaggcggaagaaggaagggcggtggggcaggtcccggctgcgcggggcagttgtgcgcacttgggttcttcacgcgggacacacgtggaacgccgacccctgcgcccctggccgctggcaactggcaaggccgggaacagaaagtgtagggacagaagagcgctggagtcttccccgggagggagcccggggctgcagcccaggggcggggagcggggcggggctgggaaagttgagtactggtcgctcagggccgggctccgccggagtgcccggcgcagaaaccgtaaaaggctggagcgggcggggtaggtgtggctctgtgtgcgtgacctgagccccggtcccagtccctgtagtctcctgcggccgcggcctctcagccatgggcgccgtctggtccgccctgctggttggagggggtctggccggagcacttttcgtttggctgctgcggggcggccctggcgacaccgggaaggacggggatgcggagcaggagaaagacgcccctcttgggggagctgcgattccgggaggccatcagagtggcagcagcggactgagccctggaccttccgggcaggagctggtcaccaaaccagagcatcttcaagaaagcaatggacatttgatttctaagaccaaagaccttggtaaactgcaagcagcatcatggagattgcagaatccttccagggaagtctgtgacaattcaagagaacatgttccttctggacagtttccagacacagaagctccagctacctctgagaccagtaactctaggagttactctgaagtttcaagaaatgaaagccttgaatctcctatgggagaatggggattccaaaaaggacaagagatatctgctaaagcagctacatgttttgcagagaagttgccttctagcaacctgctcaagaacagagctaaagaagaaatgagcctctctgatttgaacagtcaggaccgggttgaccacgaggagtgggaaatggtgcctaggcactcatcttggggggatgttggtgtgggtggcagtcttaaggctccagtgttaaacctaaaccagggaatggacaatggaagaagcactttggtggaagcaagaggtcagcaagtgcatgggaaaatggaaagggtagcagtgatgcctgcagggtctcagcaagttagtgtcaggttccaggtccattatgtcacaagcactgatgtgcaattcattgcagtaactggagaccatgagtgtcttgggagatggaacacttacatcccactccactataacaaggatgggttctggtctcattccattttcctgcctgcagatacagtggtggagtggaagtttgtgttggtagagaatgggggagttacccgctgggaagaatgcagcaatagattcctagaaactggccatgaggataaagtggttcacgcatggtgggggattcactgattcagtttgcaaagtaatggagaagctgtagaacaatgtggaagaggctgaggttgtggaacacactgaataaaataaaggcagtgtgactccaaattcagccatctgaattgtttaaatttgctagtggattttgtctaatgtgcagaaatatatatgtctaatgtgcagaaatatatatgtgtgtatgtgtgtatatatatgcacacacacacagataatgcttccagtgaatgtgaacttcttttccctgtggcactgattgacagacttgtgctgatccattattactttagggcttgattctcttggggagtgacttggctaagcttcaggtgtaaactgtggtcacggagcaaaaacattaaccagctgcccagggttcaagcttgagcctttaggtgatctttaaactatggtagtaaaataagcctcactcaaacatagctgacttcctattggtacagcttgaaaagcactttttactacatacacattttatgcttaaaaagttaacatgatacgaaactgtgattagaaaatatctggtctggatgtgattagtaaggatacaagataatgttctaagactgcctaatgctttttgtttgattttcatctgccaggcgttgttatgtgctatgagggtagcaagtacgtctttgtcttaatgatctaaggctggtgtagaaacaaagggcctaatgagaaccaatcatcatggaagtcagttgcgggggcagcccataaggaaagggaaagtgagtggggttgggcataggctgagtgaggtggcctgaatgacacctcttagaggactgtgaagtacaggcacagcccgactgcagggagggatgcacccatcatttacccatgggagcatctgtaggaccatctctctcccacttcttctcccctcccccaccgcatctggccagatggactgtcctacagcaatcgtttccatctgtcaccctcttccctctcctttcataccagtcactatcttgggtaacaaatttatacaggacagtggtacagaaatacatctttgctctgagaatacagcaaatattaacttaaattattataactgaacaaataataaaacctgaattttaatatcttcatttgatgtctgaattatttgtctaaattttagtatcacaatagcctagatgtaaaataaaatacaaatattttcctccactaataagagacatatacagaaaagcaaacatcaaaaggtacagaagacatgaagattctgtttttctcctccctttggagaaaaagttgacaatatttattctcaaagttcacctttgactggagggaaattcagcacgcctgtacttgaaaatgaattcttacatgttaaaataacttttaataagtttaacatctatcagtgaaataatgtttaatccttttaaacagatggtctttgctgaaaagaataaacccaactgaaaatagcattagaaagtacttaaaagaactatgtttgacagtttttggctcatagcacttttatgttaaattcatgtatactgtttacagacttcataatgaattttatattgtaccagtaagctc

SEQ ID NO: 186618 - DNA, 1728 bp, Homo sapiens
  Payload ID: 16751
  Gene Symbol: STARD3NL
  Gene Name: STARD3 N-terminal like
  Uniprot ID: O95772
  ENST ID: ENST00000009041
  CDS Start-End: 258-962
gtgtgcgtcgacgtcagcgtgctgacgtcacgggccggaggtcccggggctgctgggtgcgggcggtgggctgcgcgttgtccgctggactgggtcccggtcacgccccgccaagccccgcccctcaggccggggcgcgaccgcggatccgcagttcccgggccagcctggggcggccggccaggaaccacccgttaaggtgtcttctctttagggatggtgaggttggaaaaaggctcctgtaaccctcctccaggatgaaccacctgccagaagacatggagaacgctctcaccgggagccagagctcccatgcttctctgcgcaatatccattccatcaaccccacacaactcatggccaggattgagtcctatgaaggaagggaaaagaaaggcatatctgatgtcaggaggactttctgtttgtttgtcacctttgacctcttattcgtaacattactgtggataatagagttaaatgtgaatggaggcattgagaacacattagagaaggaggtgatgcagtatgactactattcttcatattttgatatatttcttctggcagtttttcgatttaaagtgttaatacttgcatatgctgtgtgcagactgcgccattggtgggcaatagcgttgacaacggcagtgaccagtgcctttttactagcaaaagtgatcctttcgaagcttttctctcaaggggcttttggctatgtgctgcccatcatttcattcatccttgcctggattgagacgtggttcctggatttcaaagtgttacctcaagaagcagaagaagaaaacagactcctgatagttcaggatgcttcagagagggcagcacttatacctggtggtctttctgatggtcagttttattcccctcctgaatccgaagcaggatctgaagaagctgaagaaaaacaggacagtgagaaaccacttttagaactatgagtactacttttgttaaatgtgaaaaaccctcacagaaagtcatcgaggcaaaaagaggcaggcagtggagtctccctgtcgacagtaaagttgaaatggtgacgtccactgctggctttattgaacagctaataaagatttatttattgtaatacctcacagacgttgtaccatatccatgcacatttagttgcctgcctgtggctggtaaggtaatgtcatgattcatcctctcttcagtgagactgagcctgatgtgttaacaaataggtgaagaaagtcttgtgctgtattcctaatcaaaagacttaatatattgaagtaacacttttttagtaagcaagatacctttttatttcaattcacagaatggaatttttttgtttcatgtctcagatttattttgtatttcttttttaacactctacatttcccttgttttttaactcatgcacatgtgctctttgtacagttttaaaaagtgtaataaaatctgacatgtcaatgtggctagttttatttttcttgttttgcattatgtgtatggcctgaagtgttggacttgcaaaaggggaagaaaggaattgcgaatacatgtaaaatgtcaccagacatttgtattatttttatcatgaaatcatgtttttctctgattgttctgaaatgttctaaatactcttattttgaatgcacaaaatgacttaaaccattcatatcatgtttcctttgcgttcagccaatttcaattaaaatgaactaaattata

SEQ ID NO: 186619 - DNA, 1365 bp, Homo sapiens
  Payload ID: 16751
  Gene Symbol: STARD3NL
  Gene Name: STARD3 N-terminal like
  Uniprot ID: O95772
  ENST ID: ENST00000396013
  CDS Start-End: 185-889
ccggggcgcgaccgcggatccgcagttcccgggccagcctggggcggccggccaggaaccacccgttaagatggaatcactgaattcatcacttgacacagtactagtttggataagtttagcaaggtgtcttctctttagggatggtgaggttggaaaaaggctcctgtaaccctcctccaggatgaaccacctgccagaagacatggagaacgctctcaccgggagccagagctcccatgcttctctgcgcaatatccattccatcaaccccacacaactcatggccaggattgagtcctatgaaggaagggaaaagaaaggcatatctgatgtcaggaggactttctgtttgtttgtcacctttgacctcttattcgtaacattactgtggataatagagttaaatgtgaatggaggcattgagaacacattagagaaggaggtgatgcagtatgactactattcttcatattttgatatatttcttctggcagtttttcgatttaaagtgttaatacttgcatatgctgtgtgcagactgcgccattggtgggcaatagcgttgacaacggcagtgaccagtgcctttttactagcaaaagtgatcctttcgaagcttttctctcaaggggcttttggctatgtgctgcccatcatttcattcatccttgcctggattgagacgtggttcctggatttcaaagtgttacctcaagaagcagaagaagaaaacagactcctgatagttcaggatgcttcagagagggcagcacttatacctggtggtctttctgatggtcagttttattcccctcctgaatccgaagcaggatctgaagaagctgaagaaaaacaggacagtgagaaaccacttttagaactatgagtactacttttgttaaatgtgaaaaaccctcacagaaagtcatcgaggcaaaaagaggcaggcagtggagtctccctgtcgacagtaaagttgaaatggtgacgtccactgctggctttattgaacagctaataaagatttatttattgtaatacctcacagacgttgtaccatatccatgcacatttagttgcctgcctgtggctggtaaggtaatgtcatgattcatcctctcttcagtgagactgagcctgatgtgttaacaaataggtgaagaaagtcttgtgctgtattcctaatcaaaagacttaatatattgaagtaacacttttttagtaagcaagatacctttttatttcaattcacagaatggaatttttttgtttcatgtctcagatttattttgtatttcttttttaacactctacatttcccttgttttttaactcatgcacatgtgctctttgtacagtttt

SEQ ID NO: 186620 - DNA, 1341 bp, Homo sapiens
  Payload ID: 16751
  Gene Symbol: STARD3NL
  Gene Name: STARD3 N-terminal like
  ENST ID: ENST00000434197
  CDS Start-End: 217-867
tcccggggctgctgggtgcgggcggtgggctgcgcgttgtccgctggactgggtcccggtcacgccccgccaagccccgcccctcaggccggggcgcgaccgcggatccgcagttcccgggccagcctggggcggccggccaggaaccacccgttaaggtgtcttctctttagggatggtgaggttggaaaaaggctcctgtaaccctcctccaggatgaaccacctgccagaagacatggagaacgctctcaccgggagccagagctcccatgcttctctgcgcaatatccattccatcaaccccacacaactcatggccaggattgagtcctatgaaggaagggaaaagaaaggcatatctgatgtcaggaggactttctgtttgtttgtcacctttgacctcttattcgtaacattactgtggataatagagttaaatgtgaatggaggcattgagaacacattagagaaggaggtgatgcagtatgactactattcttcatattttgatatatttcttctggcagtttttcgatttaaagtgttaatacttgcatatgctgtgtgcagactgcgccattggtgggcaatagcgcttttctctcaaggggcttttggctatgtgctgcccatcatttcattcatccttgcctggattgagacgtggttcctggatttcaaagtgttacctcaagaagcagaagaagaaaacagactcctgatagttcaggatgcttcagagagggcagcacttatacctggtggtctttctgatggtcagttttattcccctcctgaatccgaagcaggatctgaagaagctgaagaaaaacaggacagtgagaaaccacttttagaactatgagtactacttttgttaaatgtgaaaaaccctcacagaaagtcatcgaggcaaaaagaggcaggcagtggagtctccctgtcgacagtaaagttgaaatggtgacgtccactgctggctttattgaacagctaataaagatttatttattgtaatacctcacagacgttgtaccatatccatgcacatttagttgcctgcctgtggctggtaaggtaatgtcatgattcatcctctcttcagtgagactgagcctgatgtgttaacaaataggtgaagaaagtcttgtgctgtattcctaatcaaaagacttaatatattgaagtaacacttttttagtaagcaagatacctttttatttcaattcacagaatggaatttttttgtttcatgtctcagatttattttgtatttcttttttaacactctacatttcccttgttttttaactcatgcacatgtgctctttgtacagtt

SEQ ID NO: 186621 - DNA, 859 bp, Homo sapiens
  Payload ID: 16751
  Gene Symbol: STARD3NL
  Gene Name: STARD3 N-terminal like
  ENST ID: ENST00000453225
  CDS Start-End: 343-859
tggggcggccggccaggaaccacccgttaagggtcttactctgttgcccaggctggagtgcagtggcaccatctcagctcactggagcgtctgcctccaggttcaagtgattctcctgcctcagcatcccaagtagctgggactacaggtgtgcactaccactcctgtctaatgtttgtattttttggtagagacagggtttccctatgttggccagtctggtcttgaactgctggcctcaagtgatctgcccgcctcggcctcctaaagtgctgggattacaggtgtcttctctttagggatggtgaggttggaaaaaggctcctgtaaccctcctccaggatgaaccacctgccagaagacatggagaacgctctcaccgggagccagagctcccatgcttctctgcgcaatatccattccatcaaccccacacaactcatggccaggattgagtcctatgaaggaagggaaaagaaaggcatatctgatgtcaggaggactttctgtttgtttgtcacctttgacctcttattcgtaacattactgtggataatagagttaaatgtgaatggaggcattgagaacacattagagaaggaggtgatgcagtatgactactattcttcatattttgatatatttcttctggcagtttttcgatttaaagtgttaatacttgcatatgctgtgtgcagactgcgccattggtgggcaatagcgttgacaacggcagtgaccagtgcctttttactagcaaaagtgatcctttcgaagcttttctctcaaggggcttttggctatgtgctgcccatcatttcattcatccttgcctggattgagacgtggttcctggatt

SEQ ID NO: 186622 - DNA, 857 bp, Homo sapiens
  Payload ID: 16751
  Gene Symbol: STARD3NL
  Gene Name: STARD3 N-terminal like
  ENST ID: ENST00000429075
  CDS Start-End: 240-857
cggccggccaggaaccacccgttaagatggatccatgtaggccccaccgtttttgcctgtaaaaagagtcagaaagatcaggctggcaaagtcaattgcctccaggctaggtgaagattgaggccaactggagagtgcgtgccccactgaaagtggtcagcagcttggctttattatcatggtgtcttctctttagggatggtgaggttggaaaaaggctcctgtaaccctcctccaggatgaaccacctgccagaagacatggagaacgctctcaccgggagccagagctcccatgcttctctgcgcaatatccattccatcaaccccacacaactcatggccaggattgagtcctatgaaggaagggaaaagaaaggcatatctgatgtcaggaggactttctgtttgtttgtcacctttgacctcttattcgtaacattactgtggataatagagttaaatgtgaatggaggcattgagaacacattagagaaggaggtgatgcagtatgactactattcttcatattttgatatatttcttctggcagtttttcgatttaaagtgttaatacttgcatatgctgtgtgcagactgcgccattggtgggcaatagcgttgacaacggcagtgaccagtgcctttttactagcaaaagtgatcctttcgaagcttttctctcaaggggcttttggctatgtgctgcccatcatttcattcatccttgcctggattgagacgtggttcctggatttcaaagtgttacctcaagaagcagaagaagaaaacagactcctgatagttcaggatgcttcagagagggcagcacttatacctggtggtctttctgatggt

SEQ ID NO: 186623 - DNA, 784 bp, Homo sapiens
  Payload ID: 16751
  Gene Symbol: STARD3NL
  Gene Name: STARD3 N-terminal like
  ENST ID: ENST00000440144
  CDS Start-End: 232-784
ttcccgggccagcctggggcggccggccaggaaccacccgttaagaattaactcctagaattctgacaggcggtagtgctttgcaagctttgtgttaagagctgctactggggaatatgttgttgctgtaccttccactagggtggcattgatctcattaagacagaaattatgtgtcttctctttagggatggtgaggttggaaaaaggctcctgtaaccctcctccaggatgaaccacctgccagaagacatggagaacgctctcaccgggagccagagctcccatgcttctctgcgcaatatccattccatcaaccccacacaactcatggccaggattgagtcctatgaaggaagggaaaagaaaggcatatctgatgtcaggaggactttctgtttgtttgtcacctttgacctcttattcgtaacattactgtggataatagagttaaatgtgaatggaggcattgagaacacattagagaaggaggtgatgcagtatgactactattcttcatattttgatatatttcttctggcagtttttcgatttaaagtgttaatacttgcatatgctgtgtgcagactgcgccattggtgggcaatagcgttgacaacggcagtgaccagtgcctttttactagcaaaagtgatcctttcgaagcttttctctcaaggggcttttggctatgtgctgcccatcatttcattcatccttgcctggattgagacgtggttcctggatttcaaagtgttacctcaagaagcagaagaagaaaaca

SEQ ID NO: 186624 - DNA, 1963 bp, Homo sapiens
  Payload ID: 16752
  Gene Symbol: STARD10
  Gene Name: StAR-related lipid transfer (START) domain containing 10
  Uniprot ID: Q9Y365
  ENST ID: ENST00000334805
  CDS Start-End: 921-1796
acgtgggggcgcctgagcgaagataaccgtaataaatagtaacctaacggtccagtcatcgttctgtggtcctttcttttatgattcacaaggaatgaccctcttcatcgcctctcctaattcagtcctcacaacagtccttttacaaatgggacaacaggttagaggaagtcaggcagatttccagcatcatagagagtaaaggaccagggaaggatcaggattcaaggactgcacccaggctctgcttccagcttgctgtgtgactttgggtaattttgttcccttagggaactgagctttctcatttgtaaatgcaaacaggctgttgggaggatcaaatgagatccaggggtgaaaacagcttagtttactttcaggaatttacccacgcggtatataaaggcaaaatattattatagtcaggtgattgtagattgaggaacccatttcctcattctgcaaattgcaaacctgagggcccaaagagggacaggggcttgccccaggtctcagcaggctgtgagcaagagctaaagcctaatcctcctgcctttgggcctggagcccttccttgtaccccaggggtcagtgtctttgttggatacaggcttagattgactgactgtaccctgagaacctaggggagtccctgttcccaattcttctcctacccccaccttggcctgatggaggaagaccctgctgtgttgagatgagcaccagagccaagaagctgaggaggatctggagaattctggaggaagaggagagtgttgctggagctgtacagaccctgcttctcaggtcccaggaaggtggcgtcagcatctgcagccgcgtcgacgttgtcggagcctccgcggaggacccaggagagccggactaggaccagggccctgggcctccccacactccccatggagaagctggcggcctctacagagccccaagggcctcggccggtcctgggccgtgagagtgtccaggtgcccgatgaccaagactttcgcagcttccggtcagagtgtgaggctgaggtgggctggaacctgacctatagcagggctggggtgtctgtctgggtgcaggctgtggagatggatcggacgctgcacaagatcaagtgccggatggagtgctgtgatgtgccagccgagacactctacgacgtcctacacgacattgagtaccgcaagaaatgggacagcaacgtcattgagacttttgacatcgcccgcttgacagtcaacgctgacgtgggctattactcctggaggtgtcccaagcccctgaagaaccgtgatgtcatcaccctccgctcctggctccccatgggcgctgattacatcattatgaactactcagtcaaacatcccaaatacccacctcggaaagacttggtccgagctgtgtccatccagacgggctacctcatccagagcacagggcccaagagctgcgtcatcacctacctggcccaggtggaccccaaaggctccttacccaagtgggtggtgaataaatcttctcagttcctggctcccaaggccatgaagaagatgtacaaggcgtgcctcaagtaccccgagtggaaacagaagcacctgcctcacttcaagccgtggctgcacccggagcagagcccgttgccgagcctggcgctgtcggagctgtcggtgcagcatgcggactcactggagaacatcgacgagagcgcggtggccgagagcagagaggagcggatgggcggcgcgggcggcgagggcagcgacgacgacacctcgctcacctgagcgccgcaccgcttcagggacggagacaggaccgggcgagccctggggcggcggccgctcctgcactttctcccctcccccacccggcacctggtggcaccgggccaggcccaggcgggtgctgcagcctggctggacagagccccaataaacgatcccacagcctc

SEQ ID NO: 186625 - DNA, 509 bp, Homo sapiens
  Payload ID: 16752
  Gene Symbol: STARD10
  Gene Name: StAR-related lipid transfer (START) domain containing 10
  ENST ID: ENST00000544767
  CDS Start-End: 1-509
tgccggatggagtgctgtgatgtgccagccgagacactctacgacgtcctacacgacattgagtaccgcaagaaatgggacagcaacgtcattgagacttttgacatcgcccgcttgacagtcaacgctgacgtgggctattactcctggaggtgtcccaagcccctgaagaaccgtgatgtcatcaccctccgctcctggctccccatgggcgctgattacatcattatgaactactcagtcaaacatcccaaatacccacctcggaaagacttggtccgagctgtgtccatccagacgggctacctcatccagagcacagggcccaagagctgcgtcatcacctacctggcccaggtggaccccaaaggctccttacccaagtgggtggtgaataaatcttctcagttcctggctcccaagccgtggctgcacccggagcagagcccgttgccgagcctggcgctgtcggagctgtcggtgcagcatgcggactcactggagaacat

SEQ ID NO: 186626 - DNA, 1513 bp, Homo sapiens
  Payload ID: 16752
  Gene Symbol: STARD10
  Gene Name: StAR-related lipid transfer (START) domain containing 10
  Uniprot ID: Q9Y365
  ENST ID: ENST00000543304
  CDS Start-End: 470-1345
aaccgtaataaatagtaacctaacggtccagtcatcgttctgtggtcctttcttttatgattcacaaggaatgaccctcttcatcgcctctcctaattcagtcctcacaacagtccttttacaaatgggacaacaggttagaggaagtcaggcagatttccagcatcatagagagtaaaggaccagggaaggatcaggattcaaggactgcacccaggctctgcttccagcttgctgtgtgactttggaccctgctgtgttgagatgagcaccagagccaagaagctgaggaggatctggagaattctggaggaagaggagagtgttgctggagctgtacagaccctgcttctcaggtcccaggaaggtggcgtcagcatctgcagccgcgtcgacgttgtcggagcctccgcggaggacccaggagagccggactaggaccagggccctgggcctccccacactccccatggagaagctggcggcctctacagagccccaagggcctcggccggtcctgggccgtgagagtgtccaggtgcccgatgaccaagactttcgcagcttccggtcagagtgtgaggctgaggtgggctggaacctgacctatagcagggctggggtgtctgtctgggtgcaggctgtggagatggatcggacgctgcacaagatcaagtgccggatggagtgctgtgatgtgccagccgagacactctacgacgtcctacacgacattgagtaccgcaagaaatgggacagcaacgtcattgagacttttgacatcgcccgcttgacagtcaacgctgacgtgggctattactcctggaggtgtcccaagcccctgaagaaccgtgatgtcatcaccctccgctcctggctccccatgggcgctgattacatcattatgaactactcagtcaaacatcccaaatacccacctcggaaagacttggtccgagctgtgtccatccagacgggctacctcatccagagcacagggcccaagagctgcgtcatcacctacctggcccaggtggaccccaaaggctccttacccaagtgggtggtgaataaatcttctcagttcctggctcccaaggccatgaagaagatgtacaaggcgtgcctcaagtaccccgagtggaaacagaagcacctgcctcacttcaagccgtggctgcacccggagcagagcccgttgccgagcctggcgctgtcggagctgtcggtgcagcatgcggactcactggagaacatcgacgagagcgcggtggccgagagcagagaggagcggatgggcggcgcgggcggcgagggcagcgacgacgacacctcgctcacctgagcgccgcaccgcttcagggacggagacaggaccgggcgagccctggggcggcggccgctcctgcactttctcccctcccccacccggcacctggtggcaccgggccaggcccaggcgggtgctgcagcctggctggacagagccccaataaacgatcccacagcctca

SEQ ID NO: 186627 - DNA, 798 bp, Homo sapiens
  Payload ID: 16752
  Gene Symbol: STARD10
  Gene Name: StAR-related lipid transfer (START) domain containing 10
  ENST ID: ENST00000536377
  CDS Start-End: 405-798
aaggaatgaccctcttcatcgcctctcctaattcagtcctcacaacagtccttttacaaatgggacaacaggttagaggaagtcaggcagatttccagcatcatagagagtaaaggaccagggaaggatcaggattcaaggactgcacccaggctctgcttccagcttgctgtgtgactttggaccctgctgtgttgagatgagcaccagagccaagaagctgaggaggatctggagaattctggaggaagaggagagtgttgctggagctgtacagaccctgcttctcaggtcccaggaaggtggcgtcagcatctgcagccgcgtcgacgttgtcggagcctccgcggaggacccaggagagccggactaggaccagggccctgggcctccccacactccccatggagaagctggcggcctctacagagccccaagggcctcggccggtcctgggccgtgagagtgtccaggtgcccgatgaccaagactttcgcagcttccggtcagagtgtgaggctgaggtgggctggaacctgacctatagcagggctggggtgtctgtctgggtgcaggctgtggagatggatcggacgctgcacaagatcaagcctcctgcagggactcaggattgtggctggcagatcctgaaggcagggctccaatacccctgccttgcacagagccaggctacagggcaggcttggggtttgggaccctgggaacgcatatcccccaggggaccagatggggcaggggctcgtgaagactctggtttaagggcctcaatagctgccc

SEQ ID NO: 186628 - DNA, 1678 bp, Homo sapiens
  Payload ID: 16752
  Gene Symbol: STARD10
  Gene Name: StAR-related lipid transfer (START) domain containing 10
  ENST ID: ENST00000538536
  CDS Start-End: 883-1620
gtaacctaacggtccagtcatcgttctgtggtcctttcttttatgattcacaaggaatgaccctcttcatcgcctctcctaattcagtcctcacaacagtccttttacaaatgggacaacaggttagaggaagtcaggcagatttccagcatcatagagagtaaaggaccagggaaggatcaggattcaaggactgcacccaggctctgcttccagcttgctgtgtgactttgggtaattttgttcccttagggaactgagctttctcatttgtaaatgcaaacaggctgttgggaggatcaaatgagatccaggggtgaaaacagcttagtttactttcaggaatttacccacgcggtatataaaggcaaaatattattatagtcaggtgattgtagattgaggaacccatttcctcattctgcaaattgcaaacctgagggcccaaagagggacaggggcttgccccaggtctcagcaggctgtgagcaagagctaaagcctaatcctcctgcctttgggcctggagcccttccttgtaccccaggggtcagtgtctttgttggatacaggcttagattgactgactgtaccctgagaacctaggggagtccctgttcccaattcttctcctacccccaccttggcctgatggaggaagaccctgctgtgttgagatgagcaccagagccaagaagctgaggaggatctggagaattctggaggaagaggagagtgttgctggagctgtacagaccctgcttctcaggtcccaggaaggtggcgtcagcatctgcagccgcgtcgacgttgtcggagcctccgcggaggacccaggagagccggactaggaccagggccctgggcctccccacactccccatggagaagctggcggcctctacagagccccaagggcctcggccggtcctgggccgtgagagtgtccagtgccggatggagtgctgtgatgtgccagccgagacactctacgacgtcctacacgacattgagtaccgcaagaaatgggacagcaacgtcattgagacttttgacatcgcccgcttgacagtcaacgctgacgtgggctattactcctggaggtgtcccaagcccctgaagaaccgtgatgtcatcaccctccgctcctggctccccatgggcgctgattacatcattatgaactactcagtcaaacatcccaaatacccacctcggaaagacttggtccgagctgtgtccatccagacgggctacctcatccagagcacagggcccaagagctgcgtcatcacctacctggcccaggtggaccccaaaggctccttacccaagtgggtggtgaataaatcttctcagttcctggctcccaaggccatgaagaagatgtacaaggcgtgcctcaagtaccccgagtggaaacagaagcacctgcctcacttcaagccgtggctgcacccggagcagagcccgttgccgagcctggcgctgtcggagctgtcggtgcagcatgcggactcactggagaacatcgacgagagcgcggtggccgagagcagagaggagcggatgggcggcgcgggcggcgagggcagcgacgacgacacctcgctcacctgagcgccgcaccgcttcagggacggagacaggaccgggcgagccctggggcggcggccgc

SEQ ID NO: 186629 - DNA, 558 bp, Homo sapiens
  Payload ID: 16752
  Gene Symbol: STARD10
  Gene Name: StAR-related lipid transfer (START) domain containing 10
  ENST ID: ENST00000540587
  CDS Start-End: 524-558
aaccgtaataaatagtaacctaacggtccagtcatcgttctgtggtcctttcttttatgattcacaaggaatgaccctcttcatcgcctctcctaattcagtcctcacaacagtccttttacaaatgggacaacaggttagaggaagtcaggcagatttccagcatcatagagagtaaaggaccagggaaggatcaggattcaaggactgcacccaggctctgcttccagcttgctgtgtgactttggaccctgctgtgttgagatgagcaccagagccaagaagctgaggaggatctggagaattctggaggaagaggagagtgttgctggagctgtacagaccctgcttctcagaggaggaaagagaatcccagagaggccagaactcactgagagccccacggcgaggtcccaggaaggtggcgtcagcatctgcagccgcgtcgacgttgtcggagcctccgcggaggacccaggagagccggactaggaccagggccctgggcctccccacactccccatggagaagctggcggcctctacagagccccaagg

SEQ ID NO: 186630 - DNA, 460 bp, Homo sapiens
  Payload ID: 16752
  Gene Symbol: STARD10
  Gene Name: StAR-related lipid transfer (START) domain containing 10
  ENST ID: ENST00000535054
  CDS Start-End: 286-460
ccccagcctagccgggaggggcgcgcggggctggggcccggggcggggccgggcggcgggacccactgctcctcccaccagagcccccgcgcggccccgggtctcccgggcagctgcggcggcggcgctggcaccccggccccggcgggccccggcggagcggcgggcaaaggtcccaggaaggtggcgtcagcatctgcagccgcgtcgacgttgtcggagcctccgcggaggacccaggagagccggactaggaccagggccctgggcctccccacactccccatggagaagctggcggcctctacagagccccaagggcctcggccggtcctgggccgtgagagtgtccagtgccggatggagtgctgtgatgtgccagccgagacactctacgacgtcctacacgacattgagtaccgcaagaaatgggacagcaacgtcattgagacttttgaca

SEQ ID NO: 186631 - DNA, 511 bp, Homo sapiens
  Payload ID: 16752
  Gene Symbol: STARD10
  Gene Name: StAR-related lipid transfer (START) domain containing 10
  ENST ID: ENST00000539138
  CDS Start-End: 266-511
ccttgttgccctgcacaacctgtgaatttgctccatcaaaactggcaggcagggttacccctgaggagggggtgggggagaaggggtaggggtgggaccctatcatctcccagaggggagatcaaggcagccatcatctgtcgaactagatggtcccaggaaggtggcgtcagcatctgcagccgcgtcgacgttgtcggagcctccgcggaggacccaggagagccggactaggaccagggccctgggcctccccacactccccatggagaagctggcggcctctacagagccccaagggcctcggccggtcctgggccgtgagagtgtccaggtgcccgatgaccaagactttcgcagcttccggtcagagtgtgaggctgagtgccggatggagtgctgtgatgtgccagccgagacactctacgacgtcctacacgacattgagtaccgcaagaaatgggacagcaacgtcattgagacttttgacatcgcccgcttgacagtcaac

SEQ ID NO: 186632 - DNA, 451 bp, Homo sapiens
  Payload ID: 16752
  Gene Symbol: STARD10
  Gene Name: StAR-related lipid transfer (START) domain containing 10
  ENST ID: ENST00000536728
  CDS Start-End: 1-451
tgccggatggagtgctgtgatgtgccagccgagacactctacgacgtcctacacgacattgagtaccgcaagaaatgggacagcaacgtcattgagacttttgacatcgcccgcttgacagtcaacgctgacgtgggctattactcctggaggtgtcccaagcccctgaagaaccgtgatgtcatcaccctccgctcctggctccccatgggcgctgattacatcattatgaactactcagtcaaacatcccaaatacccacctcggaaagacttggtccgagctgtgtccatccagacgggctacctcatccagagcacagggcccaagagctgcgtcatcacctacctggcccaggtggaccccaaaggccatgaagaagatgtacaaggcgtgcctcaagtaccccgagtggaaacagaagcacctgcctcacttcaagccgtggctg

SEQ ID NO: 186633 - DNA, 438 bp, Homo sapiens
  Payload ID: 16752
  Gene Symbol: STARD10
  Gene Name: StAR-related lipid transfer (START) domain containing 10
  ENST ID: ENST00000536290
  CDS Start-End: 172-438
tgctggtggacaagggccagagtgtggggctggagggagtcccggttcaagctcccaggtcccaggaaggtggcgtcagcatctgcagccgcgtcgacgttgtcggagcctccgcggaggacccaggagagccggactaggaccagggccctgggcctccccacactccccatggagaagctggcggcctctacagagccccaagggcctcggccggtcctgggccgtgagagtgtccaggtgcccgatgaccaagactttcgcagcttccggtcagagtgtgaggctgaggtgggctggaacctgacctatagcagggctggggtgtctgtctgggtgcaggctgtggagatggatcggacgctgcacaagatcaagtgccggatggagtgctgtgatgtgccagccgagacactctacgacgtcctacacgacatt

SEQ ID NO: 186634 - DNA, 1085 bp, Homo sapiens
  Payload ID: 16752
  Gene Symbol: STARD10
  Gene Name: StAR-related lipid transfer (START) domain containing 10
  ENST ID: ENST00000545082
  CDS Start-End: 293-1081
cccgagcccccagcctagccgggaggggcgcgcggggctggggcccggggcggggccgggcggcgggacccactgctcctcccaccagagcccccgcgcggccccgggtctcccgggcagctgcggcggcggcgctggcaccccggccccggcgggccccggcggagcggcgggcaaaggtcccaggaaggtggcgtcagcatctgcagccgcgtcgacgttgtcggagcctccgcggaggacccaggagagccggactaggaccagggccctgggcctccccacactccccatggagaagctggcggcctctacagagccccaagggcctcggccggtcctgggccgtgagagtgtccaggtgcccgatgaccaagactttcgcagcttccggtcagagtgtgaggctgagtgccggatggagtgctgtgatgtgccagccgagacactctacgacgtcctacacgacattgagtaccgcaagaaatgggacagcaacgtcattgagacttttgacatcgcccgcttgacagtcaacgctgacgtgggctattactcctggaggtgtcccaagcccctgaagaaccgtgatgtcatcaccctccgctcctggctccccatgggcgctgattacatcattatgaactactcagtcaaacatcccaaatacccacctcggaaagacttggtccgagctgtgtccatccagacgggctacctcatccagagcacagggcccaagagctgcgtcatcacctacctggcccaggtggaccccaaaggctccttacccaagtgggtggtgaataaatcttctcagttcctggctcccaaggccatgaagaagatgtacaaggcgtgcctcaagtaccccgagtggaaacagaagcacctgcctcacttcaagccgtggctgcacccggagcagagcccgttgccgagcctggcgctgtcggagctgtcggtgcagcatgcggactcactggagaacatcgacgagagcgcggtggccgagagcagagaggagcggatgggcggcgcgggcggcgagggcagcgacgacgacacctcgctcacctgagcgc

SEQ ID NO: 186635 - DNA, 839 bp, Homo sapiens
  Payload ID: 16752
  Gene Symbol: STARD10
  Gene Name: StAR-related lipid transfer (START) domain containing 10
  ENST ID: ENST00000542989
  CDS Start-End: 267-839
gccttgttgccctgcacaacctgtgaatttgctccatcaaaactggcaggcagggttacccctgaggagggggtgggggagaaggggtaggggtgggaccctatcatctcccagaggggagatcaaggcagccatcatctgtcgaactagatggtcccaggaaggtggcgtcagcatctgcagccgcgtcgacgttgtcggagcctccgcggaggacccaggagagccggactaggaccagggccctgggcctccccacactccccatggagaagctggcggcctctacagagccccaagggcctcggccggtcctgggccgtgagagtgtccaggtgcccgatgaccaagactttcgcagcttccggtcagagtgtgaggctgaggtgggctggaacctgacctatagcagggctggggtgtctgtctgggtgcaggctgtggagatggatcggacgctgcacaagatcaagtgccggatggagtgctgtgatgtgccagccgagacactctacgacgtcctacacgacattgagtaccgcaagaaatgggacagcaacgtcattgagacttttgacatcgcccgcttgacagtcaacgctgacgtgggctattactcctggaggtgtcccaagcccctgaagaaccgtgatgtcatcaccctccgctcctggctccccatgggcgctgattacatcattatgaactactcagtcaaacatcccaaatacccacctcggaaagacttggtccgagctgtgtccatccagacgggctacctcatccagagcacagggcccaagagctgcgtcatcacctacctggcccaggtggacccc

SEQ ID NO: 186636 - DNA, 541 bp, Homo sapiens
  Payload ID: 16752
  Gene Symbol: STARD10
  Gene Name: StAR-related lipid transfer (START) domain containing 10
  ENST ID: ENST00000400925
  CDS Start-End: 1-364
atacccacctcggaaagacttggtccgagctgtgtccatccagacgggctacctcatccagagcacagggcccaagagctgcgtcatcacctacctggcccaggtggaccccaaaggctccttacccaagtgggtggtgaataaatcttctcagttcctggctcccaaggtgagtggccttgggattttggggaggggtgttgaagactggaaagaggactatggaatgaggtgggtggagtcaagcctggagcctgagggccaggcgtggtggctcatgcctgtaatcccagcactttgggaggccttggcaggtggattacctgaggtcgggagttcaagaccagcctggccaacatggtgaaaccctgtctctactaaaaatacaaaaattagctgagtgtgatggtgggtgcctgtaatcccagctactcgggaggctaaggcaggagaatcacttgaacctggaaggcagaggttgcagtgagccgatatcatgccactgcactccagcctgggccacacagtgagattccgtctc

SEQ ID NO: 186637 - DNA, 1100 bp, Homo sapiens
  Payload ID: 16752
  Gene Symbol: STARD10
  Gene Name: StAR-related lipid transfer (START) domain containing 10
  ENST ID: ENST00000537947
  CDS Start-End: 344-1100
cacctccgcagcctggaaaatcccgagccgcggccgccgagcccccgagcccccgagcccccagcctagccgggaggggcgcgcggggctggggcccggggcggggccgggcggcgggacccactgctcctcccaccagagcccccgcgcggccccgggtctcccgggcagctgcggcggcggcgctggcaccccggccccggcgggccccggcggagcggcgggcaaaggtcccaggaaggtggcgtcagcatctgcagccgcgtcgacgttgtcggagcctccgcggaggacccaggagagccggactaggaccagggccctgggcctccccacactccccatggagaagctggcggcctctacagagccccaagggcctcggccggtcctgggccgtgagagtgtccaggtgcccgatgaccaagactttcgcagcttccggtcagagtgtgaggctgaggtgggctggaacctgacctatagcagggctggggtgtctgtctgggtgcaggctgtggagatggatcggacgctgcacaagatcaagtgccggatggagtgctgtgatgtgccagccgagacactctacgacgtcctacacgacattgagtaccgcaagaaatgggacagcaacgtcattgagacttttgacatcgcccgcttgacagtcaacgctgacgtgggctattactcctggaggtgtcccaagcccctgaagaaccgtgatgtcatcaccctccgctcctggctccccatgggcgctgattacatcattatgaactactcagtcaaacatcccaaatacccacctcggaaagacttggtccgagctgtgtccatccagacgggctacctcatccagagcacagggcccaagagctgcgtcatcacctacctggcccaggtggaccccaaaggctccttacccaagtgggtggtgaataaatcttctcagttcctggctcccaaggccatgaagaagatgtacaaggcgtgcctcaagtaccccgagtggaaacagaagcacctgcctcacttcaagccgtggctgcacccggagcagagcccgttgccgagcctggcgctgtcggagctgt

SEQ ID NO: 186638 - DNA, 426 bp, Homo sapiens
  Payload ID: 16752
  Gene Symbol: STARD10
  Gene Name: StAR-related lipid transfer (START) domain containing 10
  ENST ID: ENST00000537351
  CDS Start-End: 1-426
aaatgggacagcaacgtcattgagacttttgacatcgcccgcttgacagtcaacgctgacgtgggctattactcctggaggtgtcccaagcccctgaagaaccgtgatgtcatcaccctccgctcctggctccccatgggcgctgattacatcattatgaactactcagtcaaacatcccaaatacccacctcggaaagacttggtccgagctgtgtccatccagacgggctacctcatccagagcacagggcccaagagctgcgtcatcacctacctggcccaggtggaccccaaaggctccttacccaagtgggtggtgaataaatcttctcagttcctggctcccaaggccatgaagaagatgtacaaggcgggtgctgcagcctggctggacagagccccaataaacgatcccacagcctca

SEQ ID NO: 186639 - DNA, 620 bp, Homo sapiens
  Payload ID: 16752
  Gene Symbol: STARD10
  Gene Name: StAR-related lipid transfer (START) domain containing 10
  ENST ID: ENST00000546314
  CDS Start-End: 208-620
ggttgggtgtgtgtaggcttggtgtgcctctagcttggtgggggatgcaagctgtgggcatctctgagctgctgtggggctgtcatccctgcgagtcccaggaaggtggcgtcagcatctgcagccgcgtcgacgttgtcggagcctccgcggaggacccaggagagccggactaggaccagggccctgggcctccccacactccccatggagaagctggcggcctctacagagccccaagggcctcggccggtcctgggccgtgagagtgtccaggtgcccgatgaccaagactttcgcagcttccggtcagagtgtgaggctgaggtgggctggaacctgacctatagcagggctggggtgtctgtctgggtgcaggctgtggagatggatcggacgctgcacaagatcaagtgccggatggagtgctgtgatgtgccagccgagacactctacgacgtcctacacgacattgagtaccgcaagaaatgggacagcaacgtcattgagacttttgacatcgcccgcttgacagtcaacgctgacgtgggctattactcctggaggtgtcccaagcccctgaagaaccgtgatgtcatcaccctccgctcctggctccc

SEQ ID NO: 186640 - DNA, 1418 bp, Homo sapiens
  Payload ID: 16752
  Gene Symbol: STARD10
  Gene Name: StAR-related lipid transfer (START) domain containing 10
  ENST ID: ENST00000610783
  CDS Start-End: 281-1360
gattgaggaacccatttcctcattctgcaaattgcaaacctgagggcccaaagagggacaggggcttgccccaggtctcagcaggctgtgagcaagagctaaagcctaatcctcctgcctttgggcctggagcccttccttgtaccccaggggtcagtgtctttgttggatacaggcttagattgactgactgtaccctgagaacctaggggagtccctgttcccaattcttctcctacccccaccttggcctgatggaggaagaccctgctgtgttgagatgagcaccagagccaagaagctgaggaggatctggagaattctggaggaagaggagagtgttgctggagctgtacagaccctgcttctcaggtcccaggaaggtggcgtcgcatctgcagccgcgtcgacgttgtcggagcctccgcggaggacccaggagagccggactaggaccagggccctgggcctccccacactccccatggagaagctggcggcctctacagagccccaagggcctcggccggtcctgggccgtgagagtgtccaggtgcccgatgaccaagactttcgcagcttccggtcagagtgtgaggctgaggtgggctggaacctgacctatagcagggctggggtgtctgtctgggtgcaggctgtggagatggatcggacgctgcacaagatcaagtgccggatggagtgctgtgatgtgccagccgagacactctacgacgtcctacacgacattgagtaccgcaagaaatgggacagcaacgtcattgagacttttgacatcgcccgcttgacagtcaacgctgacgtgggctattactcctggaggtgtcccaagcccctgaagaaccgtgatgtcatcaccctccgctcctggctccccatgggcgctgattacatcattatgaactactcagtcaaacatcccaaatacccacctcggaaagacttggtccgagctgtgtccatccagacgggctacctcatccagagcacagggcccaagagctgcgtcatcacctacctggcccaggtggaccccaaaggctccttacccaagtgggtggtgaataaatcttctcagttcctggctcccaaggccatgaagaagatgtacaaggcgtgcctcaagtaccccgagtggaaacagaagcacctgcctcacttcaagccgtggctgcacccggagcagagcccgttgccgagcctggcgctgtcggagctgtcggtgcagcatgcggactcactggagaacatcgacgagagcgcggtggccgagagcagagaggagcggatgggcggcgcgggcggcgagggcagcgacgacgacacctcgctcacctgagcgccgcaccgcttcagggacggagacaggaccgggcgagccctggggcggcggccgc

SEQ ID NO: 186641 - DNA, 5798 bp, Homo sapiens
  Payload ID: 16753
  Gene Symbol: STARD13
  Gene Name: StAR-related lipid transfer (START) domain containing 13
  Uniprot ID: Q9Y3M8
  ENST ID: ENST00000255486
  CDS Start-End: 58-3375
cggaaacatgagagaggactatcatctgctccttgctctgaatttctttgaacctccatgctggaaccctcctcagttctccatgcaaacgttaaccaggcccctttgtggtgcttggtgctgcgctggtgcagagaatgcaaagacactgtctgtggtgggaaacagaaaagcagagtgaaccacacattccagcgccgggaaattgaggcaaaagaagcatgtgactggctccgtgctgccgggttcccgcaatacgctcagttatatgaggattcacaatttcccatcaacattgtggctgtcaagaatgatcatgattttcttgaaaaggaccttgtagaacctctttgcagacgactaaatacgttgaacaagtgtgcctcaatgaaacttgatgtgaacttccaaaggaaaaagggtgacgactccgatgaggaagatctttgtatcagcaacaaatggactttccaaagaaccagtcgcaggtggtctcgtgtggacgacctctacacgctgctccctcgaggagacagaaatgggtcaccgggaggcacggggatgaggaacacgaccagcagtgagagcgtcctcacagacctgagcgagcctgaggtctgctccattcacagcgaaagcagtggaggcagcgacagtcgcagccagccgggccagtgctgtacagacaacccggtcatgctggatgccccactcgtcagcagcagcctcccacagccccccagagatgtcctcaaccaccccttccaccccaagaatgagaagcccacgagggctagggccaaatcatttttgaaacgcatggaaacactccgagggaagggagcccacgggaggcataaggggtctgggcggacaggtggcctggtgatcagtgggcccatgttgcagcaggagccagagtcctttaaggctatgcagtgcatccaaataccaaatggagatctccagaattcgccgccacctgcctgcagaaaagggctcccatgctctggcaagtcgagtggcgagagcagcccgtcggagcacagcagcagcggggtgagcacgccctgcctgaaggaacgcaagtgccacgaggccaacaagcgcgggggcatgtacttggaggacctagatgtgctggcggggacagcactgccggatgcaggggaccaaagccgtatgcatgaatttcactcccaagagaatttggtggtgcatattcccaaggatcacaaaccaggaacattccccaaggcactttctattgaaagcctctctcccacagatagtagcaatggggttaattggaggaccggtagcatctccctgggcagagagcaggtccctggtgccagggagccccggctcatggcgtcctgccacagagccagccgagtcagtatctatgacaatgtccctggctcccatctgtatgccagcacaggagatcttttggacttggagaaagatgaccttttccctcacttggatgacattctgcagcatgtcaatgggctccaagaggtagtcgatgactggtccaaagatgtcttgcctgaactgcaaactcatgatacattggttggggaacctggcttatccacctttccatctcctaatcagatcaccttagattttgaaggtaactctgtctcagaaggtcggacgacacccagtgatgtggaaagagatgtaacatctcttaatgaatctgagcctcctggggtcagagacaggagggattctggtgtaggggcctctctgaccaggccaaacaggcgactccgatggaacagtttccagctgtcgcaccagccccggccggccccagcatcgccccacatcagcagccagacggccagccagctgagcctgctccagcgcttctcactgctccgcctcacggccatcatggagaagcactccatgtccaacaagcacggctggacatggtcagttccaaagttcatgaagaggatgaaagttcccgactacaaagacaaggctgtctttggcgttcctctcatagtccacgtccaaagaacgggacagcccctgcctcaaagtattcagcaagcactgagatatctacgcagcaactgcctcgatcaggtgggtctttttcgcaaatcaggagtgaagtctcgaatccatgcccttcgccaaatgaatgaaaacttccctgagaacgtcaactatgaagaccagtctgcttatgatgtggcggatatggtgaaacagttcttccgggacctccctgagcctcttttcaccaacaagctcagtgagacctttctccatatctatcagtatgtctccaaagagcagcggctgcaggccgtgcaggctgccatcctgctactggccgatgagaacagggaggtcctgcagacgctcttgtgtttcctgaacgacgtcgtcaacttggtggaagagaatcagatgacgcccatgaacctggcagtgtgtctggccccctccctctttcatcttaatttattgaagaaagaaagctctccacgagtcatacagaagaaatatgccactgggaagccagatcaaaaggacctcaacgagaatctggcagcagctcaggggctagcgcacatgatcatggaatgcgacagactttttgaggttccacacgagttggtggcccagtctcgtaactcgtatgtggaggctgagatccacgtgccaaccctggaagaattggggacacagctggaggagagtggggcaactttccacacttacctgaaccatctcatccagggcctccagaaagaagccaaggagaagttcaaaggatgggtcacgtgctccagcacggacaatacagatcttgctttcaaaaaggtgggcgacgggaacccgctgaagctgtggaaggcttctgtggaggtggaagcacccccctcagtggtcctgaaccgcgtgctgagagagcgccacctgtgggacgaggactttgtgcagtggaaggttgtggaaactctagacaggcaaacagagatctaccagtatgtgctgaacagcatggctccccatccttccagagactttgtggttctcaggacctggaaaactgatttgcccaaaggaatgtgtaccctggtgtccctctccgtggagcatgaggaagcccagctcctgggtggtgtgcgagcagtggtgatggactcgcagtacttgatagaaccgtgtggctctggcaagtcaagactgactcacatctgcaggatagacctgaaaggtcactccccagaatggtacagcaaaggctttggacatctgtgtgcagcagaagttgccaggattagaaactctttccagcccctcattgctgagggcccagaaactaaaatctgagttttgcccagtgtgacatcaaactcagggaagaggaagctaaagtgacgagtgtggcagagagtgtgcatgtgagaaagcgagagaaagaggaactgaaggacgcggttaatgcctaaaaatggaaacgttaagaagttggaatgttggagatgcaagaatttccaagaactttcttagccttcctggagatggctacatccctactaatataattttaaaatgagaactttatatatattacttaaaattaaatggactattccttgtgcattgcctaatttgctatttaaaggcttctaagaagcgtatacctaactgtaaataaatgtatgtatagcatatgtacatatgtgtgtatatctccatctttactgtatatatgtaaaataccaattttatatagaattgtgtgttttgaaaatgacggtgtctgactcagtgagtcccttcctcacacagttctttccaagtggctctgggccccatctctccactgtcctgtaagctgtgcagaacctgctgctaacaccaaggtgtgaacatgccctgatgcctaaccaaagatgagttaaccaaaggaaaataacattaaaggagacttatgtgttaacgctttgtttctgctattcaaaaactgagagtggagatctgggataaagcaaggaaataataattactcctccttaaagcaaatgggggggtgagaagtcattaccaaatttaaagctagatgaggagttgccactgggcccagtaagatggaatttcagtgagatatggaccaccggagtcagcgagagtgactgaaacagaagcgatacctctcgctcccatgcccatcactacagaccccaagtcaagatgaatatcatagcctttacttcttcacagccaaagggagcccctgtgttgtctcaagtttttataaatacatttcataatgttattaaatgtcattctatttgaccagtggcctatttggtcacagttaattggtgttttcttattgcactgaattcaactccagacaccatacaaagggagatgatggccattccgttcaaatcctagatcgttacagcttcagggaattcatattttgttatgtgtaggatactcttaaaatgtaattcattaaacttttacaatctgaaagacagggtttttaactaacatgagaccaaaactatgttctttgattagttttagatagtataatcgggtttattaattcttctgtgtttcttcactagccagtccaagctacctatgcatttgacccaaccttatttattattgtacagatgaagcgaattgactccctttagccaactgctaatggatcgaatgtgctttttattgtaattcaacagctatagagagaaagataacttattgtgtgtttgatttcagggagagagattttctttggtcatccataatagagattgataagatttagcaactggtgttggagaaaaaaagaaaagcaaatgagtgttttcaggtttttttgcattatatgcatttatgtaatgtttctgttatcagcaatgtgcaattattttattgagaggaataaaaaagctttctatgagtttggtatggtgcgaggaaaatcttacagtttgaattatgacctagaaatttttcattcccatatctacctaagaaggaagcagtaaatccataatttaccttttgggcaatgctttgtgagcaaaacaaagtcacttctgccataacatcttgaatttaaccatatatgccagattactttatatgcatcaacaagatcaccagtgaagtttaatctagctaaacactggtcctgctcctgagatgggatcctatgtgtttggaaaacgtgataggcacacgaggatgagtggctttgtatcgcccagagaggtgcttgtccagatttcacatgcacatgaattgcctggggatcttgtgaaactgcagactctgctccaagtaatctgggctgggcctgagattctgcatttctaaggagtctcagggatgcctatgctgctggcctaaaaccacactcagaaacgaggacctagaagatccctaaaacagaataagaacaaatgtgattgtatttctgattctccctctcttcgaattatctgacttttttgtttttgtgcacatagtaatcatatcaccgctgcataacaacacagtgcatctttttaaaacaaggaaaagggaaaaaaaggagaaaaaacgatgcatcaagcttgtttgtcaaataccacagtattttattcattgttatcttgccaatggaaataaagtatgatattgcatttaaatattatatttatacctcatgtatatttttacctcaattgttgatatcaatcatcaattgtaaataaataattgccaaggcaaataaattt

SEQ ID NO: 186642 - DNA, 5917 bp, Homo sapiens
  Payload ID: 16753
  Gene Symbol: STARD13
  Gene Name: StAR-related lipid transfer (START) domain containing 13
  Uniprot ID: Q9Y3M8
  ENST ID: ENST00000336934
  CDS Start-End: 118-3459
aaaaatcgctgggtctgttgagctgtcctgggctgggtgccttgctctttgactgagactggagacagacggcaacagccacaggcagactgaggtggcaataggaaatctgccgagatgttcagtcaggtgcccaggaccccagcctcaggctgctactacctaaattccatgacacctgagggccaggagatgtacttgcgatttgatcagactacaagacgctctccttacaggatgagccggattctagcacgccatcagctagtgactaaaattcaacaagaaattgaggcaaaagaagcatgtgactggctccgtgctgccgggttcccgcaatacgctcagttatatgaggattcacaatttcccatcaacattgtggctgtcaagaatgatcatgattttcttgaaaaggaccttgtagaacctctttgcagacgactaaatacgttgaacaagtgtgcctcaatgaaacttgatgtgaacttccaaaggaaaaagggtgacgactccgatgaggaagatctttgtatcagcaacaaatggactttccaaagaaccagtcgcaggtggtctcgtgtggacgacctctacacgctgctccctcgaggagacagaaatgggtcaccgggaggcacggggatgaggaacacgaccagcagtgagagcgtcctcacagacctgagcgagcctgaggtctgctccattcacagcgaaagcagtggaggcagcgacagtcgcagccagccgggccagtgctgtacagacaacccggtcatgctggatgccccactcgtcagcagcagcctcccacagccccccagagatgtcctcaaccaccccttccaccccaagaatgagaagcccacgagggctagggccaaatcatttttgaaacgcatggaaacactccgagggaagggagcccacgggaggcataaggggtctgggcggacaggtggcctggtgatcagtgggcccatgttgcagcaggagccagagtcctttaaggctatgcagtgcatccaaataccaaatggagatctccagaattcgccgccacctgcctgcagaaaagggctcccatgctctggcaagtcgagtggcgagagcagcccgtcggagcacagcagcagcggggtgagcacgccctgcctgaaggaacgcaagtgccacgaggccaacaagcgcgggggcatgtacttggaggacctagatgtgctggcggggacagcactgccggatgcaggggaccaaagccgtatgcatgaatttcactcccaagagaatttggtggtgcatattcccaaggatcacaaaccaggaacattccccaaggcactttctattgaaagcctctctcccacagatagtagcaatggggttaattggaggaccggtagcatctccctgggcagagagcaggtccctggtgccagggagccccggctcatggcgtcctgccacagagccagccgagtcagtatctatgacaatgtccctggctcccatctgtatgccagcacaggagatcttttggacttggagaaagatgaccttttccctcacttggatgacattctgcagcatgtcaatgggctccaagaggtagtcgatgactggtccaaagatgtcttgcctgaactgcaaactcatgatacattggttggggaacctggcttatccacctttccatctcctaatcagatcaccttagattttgaaggtaactctgtctcagaaggtcggacgacacccagtgatgtggaaagagatgtaacatctcttaatgaatctgagcctcctggggtcagagacaggagggattctggtgtaggggcctctctgaccaggccaaacaggcgactccgatggaacagtttccagctgtcgcaccagccccggccggccccagcatcgccccacatcagcagccagacggccagccagctgagcctgctccagcgcttctcactgctccgcctcacggccatcatggagaagcactccatgtccaacaagcacggctggacatggtcagttccaaagttcatgaagaggatgaaagttcccgactacaaagacaaggctgtctttggcgttcctctcatagtccacgtccaaagaacgggacagcccctgcctcaaagtattcagcaagcactgagatatctacgcagcaactgcctcgatcaggtgggtctttttcgcaaatcaggagtgaagtctcgaatccatgcccttcgccaaatgaatgaaaacttccctgagaacgtcaactatgaagaccagtctgcttatgatgtggcggatatggtgaaacagttcttccgggacctccctgagcctcttttcaccaacaagctcagtgagacctttctccatatctatcagtatgtctccaaagagcagcggctgcaggccgtgcaggctgccatcctgctactggccgatgagaacagggaggtcctgcagacgctcttgtgtttcctgaacgacgtcgtcaacttggtggaagagaatcagatgacgcccatgaacctggcagtgtgtctggccccctccctctttcatcttaatttattgaagaaagaaagctctccacgagtcatacagaagaaatatgccactgggaagccagatcaaaaggacctcaacgagaatctggcagcagctcaggggctagcgcacatgatcatggaatgcgacagactttttgaggttccacacgagttggtggcccagtctcgtaactcgtatgtggaggctgagatccacgtgccaaccctggaagaattggggacacagctggaggagagtggggcaactttccacacttacctgaaccatctcatccagggcctccagaaagaagccaaggagaagttcaaaggatgggtcacgtgctccagcacggacaatacagatcttgctttcaaaaaggtgggcgacgggaacccgctgaagctgtggaaggcttctgtggaggtggaagcacccccctcagtggtcctgaaccgcgtgctgagagagcgccacctgtgggacgaggactttgtgcagtggaaggttgtggaaactctagacaggcaaacagagatctaccagtatgtgctgaacagcatggctccccatccttccagagactttgtggttctcaggacctggaaaactgatttgcccaaaggaatgtgtaccctggtgtccctctccgtggagcatgaggaagcccagctcctgggtggtgtgcgagcagtggtgatggactcgcagtacttgatagaaccgtgtggctctggcaagtcaagactgactcacatctgcaggatagacctgaaaggtcactccccagaatggtacagcaaaggctttggacatctgtgtgcagcagaagttgccaggattagaaactctttccagcccctcattgctgagggcccagaaactaaaatctgagttttgcccagtgtgacatcaaactcagggaagaggaagctaaagtgacgagtgtggcagagagtgtgcatgtgagaaagcgagagaaagaggaactgaaggacgcggttaatgcctaaaaatggaaacgttaagaagttggaatgttggagatgcaagaatttccaagaactttcttagccttcctggagatggctacatccctactaatataattttaaaatgagaactttatatatattacttaaaattaaatggactattccttgtgcattgcctaatttgctatttaaaggcttctaagaagcgtatacctaactgtaaataaatgtatgtatagcatatgtacatatgtgtgtatatctccatctttactgtatatatgtaaaataccaattttatatagaattgtgtgttttgaaaatgacggtgtctgactcagtgagtcccttcctcacacagttctttccaagtggctctgggccccatctctccactgtcctgtaagctgtgcagaacctgctgctaacaccaaggtgtgaacatgccctgatgcctaaccaaagatgagttaaccaaaggaaaataacattaaaggagacttatgtgttaacgctttgtttctgctattcaaaaactgagagtggagatctgggataaagcaaggaaataataattactcctccttaaagcaaatgggggggtgagaagtcattaccaaatttaaagctagatgaggagttgccactgggcccagtaagatggaatttcagtgagatatggaccaccggagtcagcgagagtgactgaaacagaagcgatacctctcgctcccatgcccatcactacagaccccaagtcaagatgaatatcatagcctttacttcttcacagccaaagggagcccctgtgttgtctcaagtttttataaatacatttcataatgttattaaatgtcattctatttgaccagtggcctatttggtcacagttaattggtgttttcttattgcactgaattcaactccagacaccatacaaagggagatgatggccattccgttcaaatcctagatcgttacagcttcagggaattcatattttgttatgtgtaggatactcttaaaatgtaattcattaaacttttacaatctgaaagacagggtttttaactaacatgagaccaaaactatgttctttgattagttttagatagtataatcgggtttattaattcttctgtgtttcttcactagccagtccaagctacctatgcatttgacccaaccttatttattattgtacagatgaagcgaattgactccctttagccaactgctaatggatcgaatgtgctttttattgtaattcaacagctatagagagaaagataacttattgtgtgtttgatttcagggagagagattttctttggtcatccataatagagattgataagatttagcaactggtgttggagaaaaaaagaaaagcaaatgagtgttttcaggtttttttgcattatatgcatttatgtaatgtttctgttatcagcaatgtgcaattattttattgagaggaataaaaaagctttctatgagtttggtatggtgcgaggaaaatcttacagtttgaattatgacctagaaatttttcattcccatatctacctaagaaggaagcagtaaatccataatttaccttttgggcaatgctttgtgagcaaaacaaagtcacttctgccataacatcttgaatttaaccatatatgccagattactttatatgcatcaacaagatcaccagtgaagtttaatctagctaaacactggtcctgctcctgagatgggatcctatgtgtttggaaaacgtgataggcacacgaggatgagtggctttgtatcgcccagagaggtgcttgtccagatttcacatgcacatgaattgcctggggatcttgtgaaactgcagactctgctccaagtaatctgggctgggcctgagattctgcatttctaaggagtctcagggatgcctatgctgctggcctaaaaccacactcagaaacgaggacctagaagatccctaaaacagaataagaacaaatgtgattgtatttctgattctccctctcttcgaattatctgacttttttgtttttgtgcacatagtaatcatatcaccgctgcataacaacacagtgcatctttttaaaacaaggaaaagggaaaaaaaggagaaaaaacgatgcatcaagcttgtttgtcaaataccacagtattttattcattgttatcttgccaatggaaataaagtatgatattgcatttaaatattatatttatacctcatgtatatttttacctcaattgttgatatcaatcatcaattgtaaataaataattgccaaggcaaataaatttatatatattaaatatttcctattttctataaaata

SEQ ID NO: 186643 - DNA, 5784 bp, Homo sapiens
  Payload ID: 16753
  Gene Symbol: STARD13
  Gene Name: StAR-related lipid transfer (START) domain containing 13
  Uniprot ID: Q9Y3M8
  ENST ID: ENST00000399365
  CDS Start-End: 374-3361
ctcacagacaacagccaagcacagaggaaatattagctggcagagataacgaagagaaaacactcggtgacagatgcaccatctgtcagtttctgaggagcagttttcaagaaagctgaaaatgaattgaagaagagaggggttttgtttgaaaggtacagcacagcctaaggacaattttaaacaaaaaattgaggcaaaagaagcatgtgactggctccgtgctgccgggttcccgcaatacgctcagttatatgaggattcacaatttcccatcaacattgtggctgtcaagaatgatcatgattttcttgaaaaggaccttgtagaacctctttgcagacgactaaatacgttgaacaagtgtgcctcaatgaaacttgatgtgaacttccaaaggaaaaagggtgacgactccgatgaggaagatctttgtatcagcaacaaatggactttccaaagaaccagtcgcaggtggtctcgtgtggacgacctctacacgctgctccctcgaggagacagaaatgggtcaccgggaggcacggggatgaggaacacgaccagcagtgagagcgtcctcacagacctgagcgagcctgaggtctgctccattcacagcgaaagcagtggaggcagcgacagtcgcagccagccgggccagtgctgtacagacaacccggtcatgctggatgccccactcgtcagcagcagcctcccacagccccccagagatgtcctcaaccaccccttccaccccaagaatgagaagcccacgagggctagggccaaatcatttttgaaacgcatggaaacactccgagggaagggagcccacgggaggcataaggggtctgggcggacaggtggcctggtgatcagtgggcccatgttgcagcaggagccagagtcctttaaggctatgcagtgcatccaaataccaaatggagatctccagaattcgccgccacctgcctgcagaaaagggctcccatgctctggcaagtcgagtggcgagagcagcccgtcggagcacagcagcagcggggtgagcacgccctgcctgaaggaacgcaagtgccacgaggccaacaagcgcgggggcatgtacttggaggacctagatgtgctggcggggacagcactgccggatgcaggggaccaaagccgtatgcatgaatttcactcccaagagaatttggtggtgcatattcccaaggatcacaaaccaggaacattccccaaggcactttctattgaaagcctctctcccacagatagtagcaatggggttaattggaggaccggtagcatctccctgggcagagagcaggtccctggtgccagggagccccggctcatggcgtcctgccacagagccagccgagtcagtatctatgacaatgtccctggctcccatctgtatgccagcacaggagatcttttggacttggagaaagatgaccttttccctcacttggatgacattctgcagcatgtcaatgggctccaagaggtagtcgatgactggtccaaagatgtcttgcctgaactgcaaactcatgatacattggttggggaacctggcttatccacctttccatctcctaatcagatcaccttagattttgaaggtaactctgtctcagaaggtcggacgacacccagtgatgtggaaagagatgtaacatctcttaatgaatctgagcctcctggggtcagagacaggagggattctggtgtaggggcctctctgaccaggccaaacaggcgactccgatggaacagtttccagctgtcgcaccagccccggccggccccagcatcgccccacatcagcagccagacggccagccagctgagcctgctccagcgcttctcactgctccgcctcacggccatcatggagaagcactccatgtccaacaagcacggctggacatggtcagttccaaagttcatgaagaggatgaaagttcccgactacaaagacaaggctgtctttggcgttcctctcatagtccacgtccaaagaacgggacagcccctgcctcaaagtattcagcaagcactgagatatctacgcagcaactgcctcgatcaggtgggtctttttcgcaaatcaggagtgaagtctcgaatccatgcccttcgccaaatgaatgaaaacttccctgagaacgtcaactatgaagaccagtctgcttatgatgtggcggatatggtgaaacagttcttccgggacctccctgagcctcttttcaccaacaagctcagtgagacctttctccatatctatcagtatgtctccaaagagcagcggctgcaggccgtgcaggctgccatcctgctactggccgatgagaacagggaggtcctgcagacgctcttgtgtttcctgaacgacgtcgtcaacttggtggaagagaatcagatgacgcccatgaacctggcagtgtgtctggccccctccctctttcatcttaatttattgaagaaagaaagctctccacgagtcatacagaagaaatatgccactgggaagccagatcaaaaggacctcaacgagaatctggcagcagctcaggggctagcgcacatgatcatggaatgcgacagactttttgaggttccacacgagttggtggcccagtctcgtaactcgtatgtggaggctgagatccacgtgccaaccctggaagaattggggacacagctggaggagagtggggcaactttccacacttacctgaaccatctcatccagggcctccagaaagaagccaaggagaagttcaaaggatgggtcacgtgctccagcacggacaatacagatcttgctttcaaaaaggtgggcgacgggaacccgctgaagctgtggaaggcttctgtggaggtggaagcacccccctcagtggtcctgaaccgcgtgctgagagagcgccacctgtgggacgaggactttgtgcagtggaaggttgtggaaactctagacaggcaaacagagatctaccagtatgtgctgaacagcatggctccccatccttccagagactttgtggttctcaggacctggaaaactgatttgcccaaaggaatgtgtaccctggtgtccctctccgtggagcatgaggaagcccagctcctgggtggtgtgcgagcagtggtgatggactcgcagtacttgatagaaccgtgtggctctggcaagtcaagactgactcacatctgcaggatagacctgaaaggtcactccccagaatggtacagcaaaggctttggacatctgtgtgcagcagaagttgccaggattagaaactctttccagcccctcattgctgagggcccagaaactaaaatctgagttttgcccagtgtgacatcaaactcagggaagaggaagctaaagtgacgagtgtggcagagagtgtgcatgtgagaaagcgagagaaagaggaactgaaggacgcggttaatgcctaaaaatggaaacgttaagaagttggaatgttggagatgcaagaatttccaagaactttcttagccttcctggagatggctacatccctactaatataattttaaaatgagaactttatatatattacttaaaattaaatggactattccttgtgcattgcctaatttgctatttaaaggcttctaagaagcgtatacctaactgtaaataaatgtatgtatagcatatgtacatatgtgtgtatatctccatctttactgtatatatgtaaaataccaattttatatagaattgtgtgttttgaaaatgacggtgtctgactcagtgagtcccttcctcacacagttctttccaagtggctctgggccccatctctccactgtcctgtaagctgtgcagaacctgctgctaacaccaaggtgtgaacatgccctgatgcctaaccaaagatgagttaaccaaaggaaaataacattaaaggagacttatgtgttaacgctttgtttctgctattcaaaaactgagagtggagatctgggataaagcaaggaaataataattactcctccttaaagcaaatgggggggtgagaagtcattaccaaatttaaagctagatgaggagttgccactgggcccagtaagatggaatttcagtgagatatggaccaccggagtcagcgagagtgactgaaacagaagcgatacctctcgctcccatgcccatcactacagaccccaagtcaagatgaatatcatagcctttacttcttcacagccaaagggagcccctgtgttgtctcaagtttttataaatacatttcataatgttattaaatgtcattctatttgaccagtggcctatttggtcacagttaattggtgttttcttattgcactgaattcaactccagacaccatacaaagggagatgatggccattccgttcaaatcctagatcgttacagcttcagggaattcatattttgttatgtgtaggatactcttaaaatgtaattcattaaacttttacaatctgaaagacagggtttttaactaacatgagaccaaaactatgttctttgattagttttagatagtataatcgggtttattaattcttctgtgtttcttcactagccagtccaagctacctatgcatttgacccaaccttatttattattgtacagatgaagcgaattgactccctttagccaactgctaatggatcgaatgtgctttttattgtaattcaacagctatagagagaaagataacttattgtgtgtttgatttcagggagagagattttctttggtcatccataatagagattgataagatttagcaactggtgttggagaaaaaaagaaaagcaaatgagtgttttcaggtttttttgcattatatgcatttatgtaatgtttctgttatcagcaatgtgcaattattttattgagaggaataaaaaagctttctatgagtttggtatggtgcgaggaaaatcttacagtttgaattatgacctagaaatttttcattcccatatctacctaagaaggaagcagtaaatccataatttaccttttgggcaatgctttgtgagcaaaacaaagtcacttctgccataacatcttgaatttaaccatatatgccagattactttatatgcatcaacaagatcaccagtgaagtttaatctagctaaacactggtcctgctcctgagatgggatcctatgtgtttggaaaacgtgataggcacacgaggatgagtggctttgtatcgcccagagaggtgcttgtccagatttcacatgcacatgaattgcctggggatcttgtgaaactgcagactctgctccaagtaatctgggctgggcctgagattctgcatttctaaggagtctcagggatgcctatgctgctggcctaaaaccacactcagaaacgaggacctagaagatccctaaaacagaataagaacaaatgtgattgtatttctgattctccctctcttcgaattatctgacttttttgtttttgtgcacatagtaatcatatcaccgctgcataacaacacagtgcatctttttaaaacaaggaaaagggaaaaaaaggagaaaaaacgatgcatcaagcttgtttgtcaaataccacagtattttattcattgttatcttgccaatggaaataaagtatgatattgcatttaaatattatatttatacctcatgtatatttttacctcaattgttgatatcaatcatcaattgtaaataaataattgccaaggcaaataaattt

SEQ ID NO: 186644 - DNA, 2037 bp, Homo sapiens
  Payload ID: 16753
  Gene Symbol: STARD13
  Gene Name: StAR-related lipid transfer (START) domain containing 13
  ENST ID: ENST00000567873
  CDS Start-End: 218-2037
aataacctagcgcggcgtttctggtggccaggcatcccggtcctcgcgcgtggcgcagcctcccagcgccggaccgacccatgtcgcgcccgcattgggtcccgggaccccggcgggagtgccgcgtccgtcctttccagtcgccgggagtctgagtcgcgggccacgcgggagtggcggtggagagcccgccggtcgttatgaggacggatctaaaatgaccagcaaacggaaaccttgccaaacgcagctcaggagatccatcagtgagcagttgcgggactccacggccagagcctgggatctgctgtggaagaacgtccgggagaggcggctggcagaaattgaggcaaaagaagcatgtgactggctccgtgctgccgggttcccgcaatacgctcagttatatgaggattcacaatttcccatcaacattgtggctgtcaagaatgatcatgattttcttgaaaaggaccttgtagaacctctttgcagacgactaaatacgttgaacaagtgtgcctcaatgaaacttgatgtgaacttccaaaggaaaaagggtgacgactccgatgaggaagatctttgtatcagcaacaaatggactttccaaagaaccagtcgcaggtggtctcgtgtggacgacctctacacgctgctccctcgaggagacagaaatgggtcaccgggaggcacggggatgaggaacacgaccagcagtgagagcgtcctcacagacctgagcgagcctgaggtctgctccattcacagcgaaagcagtggaggcagcgacagtcgcagccagccgggccagtgctgtacagacaacccggtcatgctggatgccccactcgtcagcagcagcctcccacagccccccagagatgtcctcaaccaccccttccaccccaagaatgagaagcccacgagggctagggccaaatcatttttgaaacgcatggaaacactccgagggaagggagcccacgggaggcataaggggtctgggcggacaggtggcctggtgatcagtgggcccatgttgcagcaggagccagagtcctttaaggctatgcagtgcatccaaataccaaatggagatctccagaattcgccgccacctgcctgcagaaaagggctcccatgctctggcaagtcgagtggcgagagcagcccgtcggagcacagcagcagcggggtgagcacgccctgcctgaaggaacgcaagtgccacgaggccaacaagcgcgggggcatgtacttggaggacctagatgtgctggcggggacagcactgccggatgcaggggaccaaagccgtatgcatgaatttcactcccaagagaatttggtggtgcatattcccaaggatcacaaaccaggaacattccccaaggcactttctattgaaagcctctctcccacagatagtagcaatggggttaattggaggaccggtagcatctccctgggcagagagcaggtccctggtgccagggagccccggctcatggcgtcctgccacagagccagccgagtcagtatctatgacaatgtccctggctcccatctgtatgccagcacaggagatcttttggacttggagaaagatgaccttttccctcacttggatgacattctgcagcatgtcaatgggctccaagaggtagtcgatgactggtccaaagatgtcttgcctgaactgcaaactcatgatacattggttggggaacctggcttatccacctttccatctcctaatcagatcaccttagattttgaaggtaactctgtctcagaaggtcggacgacacccagtgatgtggaaagagatgtaacatctcttaatgaatctgagcctcctggggtcagagacaggagggattctggtgtaggggcctctctgaccaggccaaacaggcgactccgatggaacagtttccagctgtcgcaccagccccggccggccccagcatcgccccacatcagcagccagacggccagccagctgagcctgctccagcgcttctcactgct

SEQ ID NO: 186645 - DNA, 945 bp, Homo sapiens
  Payload ID: 16753
  Gene Symbol: STARD13
  Gene Name: StAR-related lipid transfer (START) domain containing 13
  ENST ID: ENST00000439831
  CDS Start-End: 212-403
ctagcgcggcgtttctggtggccaggcatcccggtcctcgcgcgtggcgcagcctcccagcgccggaccgacccatgtcgcgcccgcattgggtcccgggaccccggcgggagtgccgcgtccgtcctttccagtcgccgggagtctgagtcgcgggccacgcgggagtggcggtggagagcccgccggtcgttatgaggacggatctaaaatgaccagcaaacggaaaccttgccaaacgcagctcaggagatccatcagtgagcagttgcgggactccacggccagagcctgggatctgctgtggaagaacgtccgggagaggcggctggcaggactatctcttgagctgggcagtgaccaccacatggggcagaagaaagttctagagaagaaggtctgatgcctagaaagaaggaaaggacaccactggtgaagcgggagatttaaccttctttgaactcctcccttttttccttacttgaactgtaaagcaagtggtttgctaggtgttctgcccttaaacccatgcacccacatcctcatcagcctgaaagcattctggggaagatgcccagaatctatagcaccttgagagaaggtcactagcaagctaaattagaagtggagattatggatgattccaacactcaatgttgtaagcatacaatgttcattccacattttctctccaacacagtggccacatttagtgtgcacctaagaaataaacagacttttttggtttggacccagaaataaattgtggtaacccagcagttttgactgttgatgtttaaaaacctgtacatgcactgtagacctcaattaataacaattagtaactttccctgttatcatgctaaattgtatattctacatgatggatggtgttagagaaatttttgtggtctagtaaacttttgttgcttcataacttcagaa

SEQ ID NO: 186646 - DNA, 2132 bp, Homo sapiens
  Payload ID: 16754
  Gene Symbol: STARD3
  Gene Name: StAR-related lipid transfer (START) domain containing 3
  Uniprot ID: Q14849
  ENST ID: ENST00000336308
  CDS Start-End: 219-1556
ggcggggccgcaggcgaacgcaagtcccgcttcgctctcgggggcggactcagcggcggaagtggcgctgccggaagatcttcttccgctctgaggcgctactgaggccgcggagccggactgcggttggggcgggaagagccggggccgtggctgacatggagcagccctgctgctgaggccgcgccctccccgccctgaggtgggggcccaccaggatgagcaagctgcccagggagctgacccgagacttggagcgcagcctgcctgccgtggcctccctgggctcctcactgtcccacagccagagcctctcctcgcacctccttccgccgcctgagaagcgaagggccatctctgatgtccgccgcaccttctgtctcttcgtcaccttcgacctgctcttcatctccctgctctggatcatcgaactgaataccaacacaggcatccgtaagaacttggagcaggagatcatccagtacaactttaaaacttccttcttcgacatctttgtcctggccttcttccgcttctctggactgctcctaggctatgccgtgctgcggctccggcactggtgggtgattgcggtcacgacgctggtgtccagtgcattcctcattgtcaaggtcatcctctctgagctgctcagcaaaggggcatttggctacctgctccccatcgtctcttttgtcctcgcctggttggagacctggttccttgacttcaaagtcctaccccaggaagctgaagaggagcgatggtatcttgccgcccaggttgctgttgcccgtggacccctgctgttctccggtgctctgtccgagggacagttctattcacccccagaatcctttgcagggtctgacaatgaatcagatgaagaagttgctgggaagaaaagtttctctgctcaggagcgggagtacatccgccaggggaaggaggccacggcagtggtggaccagatcttggcccaggaagagaactggaagtttgagaagaataatgaatatggggacaccgtgtacaccattgaagttccctttcacggcaagacgtttatcctgaagaccttcctgccctgtcctgcggagctcgtgtaccaggaggtgatcctgcagcccgagaggatggtgctgtggaacaagacagtgactgcctgccagatcctgcagcgagtggaagacaacaccctcatctcctatgacgtgtctgcaggggctgcgggcggcgtggtctccccaagggacttcgtgaatgtccggcgcattgagcggcgcagggaccgatacttgtcatcagggatcgccacctcacacagtgccaagcccccgacgcacaaatatgtccggggagagaatggccctgggggcttcatcgtgctcaagtcggccagtaacccccgtgtttgcacctttgtctggattcttaatacagatctcaagggccgcctgccccggtacctcatccaccagagcctcgcggccaccatgtttgaatttgcctttcacctgcgacagcgcatcagcgagctgggggcccgggcgtgactgtgccccctcccaccctgcgggccagggtcctgtcgccaccacttccagagccagaaagggtgccagttgggctcgcactgcccacatgggacctggccccaggctgtcaccctccaccgagccacgcagtgcctggagttgactgactgagcaggctgtggggtggagcactggactccggggccccactggctggaggaagtggggtctggcctgttgatgtttacatggcgccctgcctcctggaggaccagattgctctgccccaccttgccagggcagggtctgggctgggcacctgacttggctggggaggaccagggccctgggcagggcagggcagcctgtcacccgtgtgaagatgaaggggctcttcatctgcctgcgctctcgtcggtttttttaggattattgaaagagtctgggacccttgttggggagtgggtggcaggtgggggtgggctgctggccatgaatctctgcctctcccaggctgtccccctcctcccagggcctcctgggggacctttgtattaagccaattaaaaacatgaatttaaaaaaaaaaaaaaa

SEQ ID NO: 186647 - DNA, 1949 bp, Homo sapiens
  Payload ID: 16754
  Gene Symbol: STARD3
  Gene Name: StAR-related lipid transfer (START) domain containing 3
  Uniprot ID: Q14849
  ENST ID: ENST00000394250
  CDS Start-End: 140-1423
cttcttccgctctgaggcgctactgaggccgcggagccggactgcggttggggcgggaagagccggggccgtggctgacatggagcagccctgctgctgaggccgcgccctccccgccctgaggtgggggcccaccaggatgagcaagctgcccagggagctgacccgagacttggagcgcagcctgcctgccgtggcctccctgggctcctcactgtcccacagccagagcctctcctcgcacctccttccgccgcctgagaagcgaagggccatctctgatgtccgccgcaccttctgtctcttcgtcaccttcgacctgctcttcatctccctgctctggatcatcgaactgaataccaacacaggcatccgtaagaacttggagcaggagatcatccagtacaactttaaaacttccttcttcgacatctttgtcctggccttcttccgcttctctggactgctcctaggctatgccgtgctgcggctccggcactggtgggtgattgcgctgctcagcaaaggggcatttggctacctgctccccatcgtctcttttgtcctcgcctggttggagacctggttccttgacttcaaagtcctaccccaggaagctgaagaggagcgatggtatcttgccgcccaggttgctgttgcccgtggacccctgctgttctccggtgctctgtccgagggacagttctattcacccccagaatcctttgcagggtctgacaatgaatcagatgaagaagttgctgggaagaaaagtttctctgctcaggagcgggagtacatccgccaggggaaggaggccacggcagtggtggaccagatcttggcccaggaagagaactggaagtttgagaagaataatgaatatggggacaccgtgtacaccattgaagttccctttcacggcaagacgtttatcctgaagaccttcctgccctgtcctgcggagctcgtgtaccaggaggtgatcctgcagcccgagaggatggtgctgtggaacaagacagtgactgcctgccagatcctgcagcgagtggaagacaacaccctcatctcctatgacgtgtctgcaggggctgcgggcggcgtggtctccccaagggacttcgtgaatgtccggcgcattgagcggcgcagggaccgatacttgtcatcagggatcgccacctcacacagtgccaagcccccgacgcacaaatatgtccggggagagaatggccctgggggcttcatcgtgctcaagtcggccagtaacccccgtgtttgcacctttgtctggattcttaatacagatctcaagggccgcctgccccggtacctcatccaccagagcctcgcggccaccatgtttgaatttgcctttcacctgcgacagcgcatcagcgagctgggggcccgggcgtgactgtgccccctcccaccctgcgggccagggtcctgtcgccaccacttccagagccagaaagggtgccagttgggctcgcactgcccacatgggacctggccccaggctgtcaccctccaccgagccacgcagtgcctggagttgactgactgagcaggctgtggggtggagcactggactccggggccccactggctggaggaagtggggtctggcctgttgatgtttacatggcgccctgcctcctggaggaccagattgctctgccccaccttgccagggcagggtctgggctgggcacctgacttggctggggaggaccagggccctgggcagggcagggcagcctgtcacccgtgtgaagatgaaggggctcttcatctgcctgcgctctcgtcggtttttttaggattattgaaagagtctgggacccttgttggggagtgggtggcaggtgggggtgggctgctggccatgaatctctgcctctcccaggctgtccccctcctcccagggcctcctgggg

SEQ ID NO: 186648 - DNA, 673 bp, Homo sapiens
  Payload ID: 16754
  Gene Symbol: STARD3
  Gene Name: StAR-related lipid transfer (START) domain containing 3
  ENST ID: ENST00000443521
  CDS Start-End: 86-673
caggaccagaggctggagctcagggctaggcctgccctgctgctgaggccgcgccctccccgccctgaggtgggggcccaccaggatgagcaagctgcccagggagctgacccgagacttggagcgcagcctgcctgccgtggcctccctgggctcctcactgtcccacagccagagcctctcctcgcacctccttccgccgcctgagaagcgaagggccatctctgatgtccgccgcaccttctgtctcttcgtcaccttcgacctgctcttcatctccctgctctggatcatcgaactgaataccaacacaggcatccgtaagaacttggagcaggagatcatccagtacaactttaaaacttccttcttcgacatctttgtcctggccttcttccgcttctctggactgctcctaggctatgccgtgctgcggctccggcactggtgggtgattgcggtcacgacgctggtgtccagtgcattcctcattgtcaaggtcatcctctctgagctgctcagcaaaggggcatttggctacctgctccccatcgtctcttttgtcctcgcctggttggagacctggttccttgacttcaaagtcctaccccaggaagctgaagaggagcgatggtatcttgccgcccaggttgctgttgcccgtggacccctg

SEQ ID NO: 186649 - DNA, 1666 bp, Homo sapiens
  Payload ID: 16754
  Gene Symbol: STARD3
  Gene Name: StAR-related lipid transfer (START) domain containing 3
  Uniprot ID: Q14849
  ENST ID: ENST00000544210
  CDS Start-End: 143-1480
gatcttcttccgctctgaggcgctactgaggccgcggagccggactgcggttggggcgggaagagccggggccgtggctgacatggagcagccctgctgctgaggccgcgccctccccgccctgaggtgggggcccaccaggatgagcaagctgcccagggagctgacccgagacttggagcgcagcctgcctgccgtggcctccctgggctcctcactgtcccacagccagagcctctcctcgcacctccttccgccgcctgagaagcgaagggccatctctgatgtccgccgcaccttctgtctcttcgtcaccttcgacctgctcttcatctccctgctctggatcatcgaactgaataccaacacaggcatccgtaagaacttggagcaggagatcatccagtacaactttaaaacttccttcttcgacatctttgtcctggccttcttccgcttctctggactgctcctaggctatgccgtgctgcggctccggcactggtcacgacgctggtgtccagtgcattcctcattgtcaaggtcatcctctctgagctgctcagcaaaggggcatttggctacctgctccccatcgtctcttttgtcctcgcctggttggagacctggttccttgacttcaaagtcctaccccaggaagctgaagaggagcgattctgctcctccagggtatcttgccgcccaggttgctgttgcccgtggacccctgctgttctccggtgctctgtccgagggacagttctattcacccccagaatcctttgcagggtctgacaatgaatcagatgaagaagttgctgggaagaaaagtttctctgctcaggagcgggagtacatccgccaggggaaggaggccacggcagtggtggaccagatcttggcccaggaagagaactggaagtttgagaagaataatgaatatggggacaccgtgtacaccattgaagttccctttcacggcaagacgtttatcctgaagaccttcctgccctgtcctgcggagctcgtgtaccaggaggtgatcctgcagcccgagaggatggtgctgtggaacaagacagtgactgcctgccagatcctgcagcgagtggaagacaacaccctcatctcctatgacgtgtctgcaggggctgcgggcggcgtggtctccccaagggacttcgtgaatgtccggcgcattgagcggcgcagggaccgatacttgtcatcagggatcgccacctcacacagtgccaagcccccgacgcacaaatatgtccggggagagaatggccctgggggcttcatcgtgctcaagtcggccagtaacccccgtgtttgcacctttgtctggattcttaatacagatctcaagggccgcctgccccggtacctcatccaccagagcctcgcggccaccatgtttgaatttgcctttcacctgcgacagcgcatcagcgagctgggggcccgggcgtgactgtgccccctcccaccctgcgggccagggtcctgtcgccaccacttccagagccagaaagggtgccagttgggctcgcactgcccacatgggacctggccccaggctgtcaccctccaccgagccacgcagtgcctggagttgactgactgagcaggctgtggggtggagcactggactccgggg

SEQ ID NO: 186650 - DNA, 560 bp, Homo sapiens
  Payload ID: 16754
  Gene Symbol: STARD3
  Gene Name: StAR-related lipid transfer (START) domain containing 3
  ENST ID: ENST00000579479
  CDS Start-End: 228-560
cttccgctctgaggcgctactgaggccgcggagccggactgcggttggggcgggaagagccggggccgtggctgacatggagcagagacgggtttcactgtgttagccagaatggtctcgatctcctgaccttgtgatccacccacctcccgcctcccagagtgctgggattacagccctgctgctgaggccgcgccctccccgccctgaggtgggggcccaccaggatgagcaagctgcccagggagctgacccgagacttggagcgcagcctgcctgccgtggcctccctgggctcctcactgtcccacagccagagcctctcctcgcacctccttccgccgcctgagaagcgaagggccatctctgatgtccgccgcaccttctgtctcttcgtcaccttcgacctgctcttcatctccctgctctggatcatcgaactgaataccaacacaggcatccgtaagaacttggagcaggagatcatccagtacaactttaaaacttccttcttcgacatctttgtcctggccttcttccgcttctctggactgctccta

SEQ ID NO: 186651 - DNA, 558 bp, Homo sapiens
  Payload ID: 16754
  Gene Symbol: STARD3
  Gene Name: StAR-related lipid transfer (START) domain containing 3
  ENST ID: ENST00000580331
  CDS Start-End: 295-558
atcatgttatgctgtgatttggagcaggagggtgggaggctttctgaggagaggacttttgagctgcctgttgaagggtctgtgggagaacattccaggcatggggagagccagatcgaaggtcccaaggcaggacagggcagctgtattgagggatgtaaaaaaggccagagtggcggtggcagcaagacagagagaagggctgggcagaggccacctgcaggcctggactgagagggcctgccctgctgctgaggccgcgccctccccgccctgaggtgggggcccaccaggatgagcaagctgcccagggagctgacccgagacttggagcgcagcctgcctgccgtggcctccctgggctcctcactgtcccacagccagagcctctcctcgcacctccttccgccgcctgagaagcgaagggccatctctgatgtccgccgcaccttctgtctcttcgtcaccttcgacctgctcttcatctccctgctctggatcatcgaactgaataccaacacaggcatccgtaagaacttggagcaggagatcatccag

SEQ ID NO: 186652 - DNA, 591 bp, Homo sapiens
  Payload ID: 16754
  Gene Symbol: STARD3
  Gene Name: StAR-related lipid transfer (START) domain containing 3
  ENST ID: ENST00000581894
  CDS Start-End: 236-591
atcttcttccgctctgaggcgctactgaggccgcggagccggactgcggttggggcgggaagagccggggccgtggctgacatggagcagtagagacgggtttcactgtgttagccagaatggtctcgatctcctgaccttgtgatccacccacctcccgcctcccagagtgctgggattacagccctgctgctgaggccgcgccctccccgccctgaggtgggggcccaccaggatgagcaagctgcccagggagctgacccgagacttggagcgcagcctgcctgccgtggcctccctgggctcctcactgtcccacagccagagcctctcctcgcacctccttccgccgcctgagaagcgaagggccatctctgatgtccgccgcaccttctgtctcttcgtcaccttcgacctgctcttcatctccctgctctggatcatcgaactgaataccaacacaggcatccgtaagaacttggagcaggagatcatccagtacaactttaaaacttccttcttcgacatctttgtcctggccttcttccgcttctctggactgctcctaggctatgccgtgctgcggctccg

SEQ ID NO: 186653 - DNA, 571 bp, Homo sapiens
  Payload ID: 16754
  Gene Symbol: STARD3
  Gene Name: StAR-related lipid transfer (START) domain containing 3
  ENST ID: ENST00000577248
  CDS Start-End: 102-571
cttccgctctgaggcgctactgaggccgcggagccggactgcggttggggcgggaagagccggggccgtggctgacatggagcaggtgggggcccaccaggatgagcaagctgcccagggagctgacccgagacttggagcgcagcctgcctgccgtggcctccctgggctcctcactgtcccacagccagagcctctcctcgcacctccttccgccgcctgagaagcgaagggccatctctgatgtccgccgcaccttctgtctcttcgtcaccttcgacctgctcttcatctccctgctctggatcatcgaactgaataccaacacaggcatccgtaagaacttggagcaggagatcatccagtacaactttaaaacttccttcttcgacatctttgtcctggccttcttccgcttctctggactgctcctaggctatgccgtgctgcggctccggcactggtcacgacgctggtgtccagtgcattcctcattgtcaaggtcatcctctctgagctgctcagcaaaggggcatttggctacctgctccccatcgtctcttttgtcctc

SEQ ID NO: 186654 - DNA, 1989 bp, Homo sapiens
  Payload ID: 16754
  Gene Symbol: STARD3
  Gene Name: StAR-related lipid transfer (START) domain containing 3
  ENST ID: ENST00000580611
  CDS Start-End: 131-1558
ctctgaggcgctactgaggccgcggagccggactgcggttggggcgggaagagccggggccgtggctgacatggagcagccctgctgctgaggccgcgccctccccgccctgaggtgggggcccaccaggatgagcaagctgcccagggagctgacccgagacttggagcgcagcctgcctgccgtggcctccctgggctcctcactgtcccacagccagagcctctcctcgcacctccttccgccgcctgagaagcgaagggccatctctgatgtccgccgcaccttctgtctcttcgtcaccttcgacctgctcttcatctccctgctctggatcatcgaactgaatgtcctggccttcttccgcttctctggactgctcctaggctatgccgtgctgcggctccggcactggtgggtgattgcggtcacgacgctggtgtccagtgcattcctcattgtcaaggtcatcctctctgagctgctcagcaaaggggcatttggctacctgctccccatcgtctcttttgtcctcgcctggttggagacctggttccttgacttcaaagtcctaccccaggaagctgaagaggagcgatggtatcttgccgcccaggttgctgttgcccgtggacccctgctgttctccggtgctctgtccgagggacagttctattcacccccagaatcctttgcagggtctgacaatgaatcagatgaagaagttgctgggaagaaaagtttctctgctcaggagcgggagtacatccgccaggggaaggaggccacggcagtggtggaccagatcttggcccaggaagagaactggaagtttgagaagaataatgaatatggggacaccgtgtacaccattgaagttccctttcacggcaagacgtttatcctgaagaccttcctgccctgtcctgcggagctcgtgtaccaggaggtgatcctgcagcccgagaggatggtgctgtggaacaagacagtgactgcctgccagatcctgcagcgagtggaagacaacaccctcatctcctatgacgtgtctgcaggggctgcgggcggcgtggtctccccaagggacttcgtgaatgtccggcgcattgagcggcgcagggaccgatacttgtcatcagggatcgccacctcacacagtgccaagcccccgacgcacaaatatgtccggggagagaatggccctgggggcttcatcgtgctcaagtcggccagtaacccccgtgtttgcacctttgtctggattcttaatacagatctcaaggtggggtgctggggggctgccagggccgcctgccccggtacctcatccaccagagcctcgcggccaccatgtttgaatttgcctttcacctgcgacagcgcatcagcgagctgggggcccgggcgtgactgtgccccctcccaccctgcgggccagggtcctgtcgccaccacttccagagccagaaagggtgccagttgggctcgcactgcccacatgggacctggccccaggctgtcaccctccaccgagccacgcagtgcctggagttgactgactgagcaggctgtggggtggagcactggactccggggccccactggctggaggaagtggggtctggcctgttgatgtttacatggcgccctgcctcctggaggaccagattgctctgccccaccttgccagggcagggtctgggctgggcacctgacttggctggggaggaccagggccctgggcagggcagggcagcctgtcacccgtgtgaagatgaaggggctcttcatctgcctgcgctctcgtcggtttttttaggattattgaaagagtctgggacccttgttggggagtgggtggcaggtgggggtgggctgctggccatgaatctctgcctctcccaggctgtccccctcctcccagggcctcctgggggacctttgtattaagccaattaaaaacatgaatttaaaaaaaaaaaaaaa

SEQ ID NO: 186655 - DNA, 579 bp, Homo sapiens
  Payload ID: 16754
  Gene Symbol: STARD3
  Gene Name: StAR-related lipid transfer (START) domain containing 3
  ENST ID: ENST00000583419
  CDS Start-End: 95-579
attgcaacgcattctctaggccggctatgtgaagagcaggaggccctgctgctgaggccgcgccctccccgccctgaggtgggggcccaccaggatgagcaagctgcccagggagctgacccgagacttggagcgcagcctgcctgccgtggcctccctgggctcctcactgtcccacagccagagcctctcctcgcacctccttccgccgcctgagaagcgaagggccatctctgatgtccgccgcaccttctgtctcttcgtcaccttcgacctgctcttcatctccctgctctggatcatcgaactgaataccaacacaggcatccgtaagaacttggagcaggagatcatccagtacaactttaaaacttccttcttcgacatctttgtcctggccttcttccgcttctctggactgctcctaggctatgccgtgctgcggctccggcactggtgggtgattgcggtcacgacgctggtgtccagtgcattcctcattgtcaaggtcatcctctctgagctgctcagcaaaggggcatttggctacctgctccccatcgtctcttttgtcctcgc

SEQ ID NO: 186656 - DNA, 550 bp, Homo sapiens
  Payload ID: 16754
  Gene Symbol: STARD3
  Gene Name: StAR-related lipid transfer (START) domain containing 3
  ENST ID: ENST00000583718
  CDS Start-End: 198-550
cttcctctgtctggcctcgcgccgccccgcgcgggttggggtctccagcaatgactcttggcgaccccgcctatcctggggagcccggggaggacgttcgggatctccttccaaagcctccgtcttaactgaggggagaggagaggccctgctgctgaggccgcgccctccccgccctgaggtgggggcccaccaggatgagcaagctgcccagggagctgacccgagacttggagcgcagcctgcctgccgtggcctccctgggctcctcactgtcccacagccagagcctctcctcgcacctccttccgccgcctgagaagcgaagggccatctctgatgtccgccgcaccttctgtctcttcgtcaccttcgacctgctcttcatctccctgctctggatcatcgaactgaataccaacacaggcatccgtaagaacttggagcaggagatcatccagtacaactttaaaacttccttcttcgacatctttgtcctggccttcttccgcttctctggactgctcctaggctatgccgtgctgcggct

SEQ ID NO: 186657 - DNA, 602 bp, Homo sapiens
  Payload ID: 16754
  Gene Symbol: STARD3
  Gene Name: StAR-related lipid transfer (START) domain containing 3
  ENST ID: ENST00000583884
  CDS Start-End: 1-187
atcagatgaagaagttgctgggaagaaaagtttctctgctcaggagcgggagtacatccgccaggggaaggaggccacggcagtggtggaccagatcttggcccaggaagagaactggaagtttgagaagaataatcccaccccctgcctccactctcctccctgccaccttctgtccctgccataggaatatggggacaccgtgtacaccattgaagttccctttcacggcaagacgtttatcctgaagaccttcctgccctgtcctgcggagctcgtgtaccaggaggtgatcctgcagcccgagaggatggtgctgtggaacaagacagtgactgcctgccagatcctgcagcgagtggaagacaacaccctcatctcctatgacgtgtctgcaggggctgcgggcggcgtggtctccccaagggacttcgtgaatgtccggcgcattgagcggcgcagggaccgatacttgtcatcagggatcgccacctcacacagtgccaagcccccgacgcacaaatatgtccggggagagaatggccctgggggcttcatcgtgctcaagtcggccagtaacccccgtgtttgcacctttgtct

SEQ ID NO: 186658 - DNA, 1511 bp, Homo sapiens
  Payload ID: 16754
  Gene Symbol: STARD3
  Gene Name: StAR-related lipid transfer (START) domain containing 3
  ENST ID: ENST00000578577
  CDS Start-End: 142-930
atcttcttccgctctgaggcgctactgaggccgcggagccggactgcggttggggcgggaagagccggggccgtggctgacatggagcagccctgctgctgaggccgcgccctccccgccctgaggtgggggcccaccaggatgagcaagctgcccagggagctgacccgagacttggagcgcagcctgcctgccgtggcctccctgggctcctcactgtcccacagccagagcctctcctcgcacctccttccgccgcctgagaagcgaagggccatctctgatgtccgccgcaccttctgtctcttcgtcaccttcgacctgctcttcatctccctgctctggatcatcgaactgaataccaacacaggcatccgtaagaacttggagcaggagatcatccagtacaactttaaaacttccttcttcgacatctttgtcctggccttcttccgcttctctggactgctcctaggctatgccgtgctgcggctccggcactgctgctcagcaaaggggcatttggctacctgctccccatcgtctcttttgtcctcgcctggttggagacctggttccttgacttcaaagtcctaccccaggaagctgaagaggagcgatggtatcttgccgcccaggttgctgttgcccgtggacccctgctgttctccggtgctctgtccgagggacagttctattcacccccagaatcctttgcagggtctgacaatgaatcagatgaagaagttgctgggaagaaaagtttctctgctcaggagcgggagtacatccgccaggggaaggaggccacggcagtggtggaccagatcttggcccaggaagagaactggaagtttgagaagaataatgaatatggggacaccgtgtacaccattgaagttccctttcacggcaagacgtttatcctgaagaccttcctgccctgtcctgcggagctcgtgtaccaggaggtgatcctgcagcccgagaggatggtgctgtggaacaagacagtgactgcctgccagatcctgcagcgagtggaagacaacaccctcatctcctatgacgtgtctgcaggggctgcgggcggcgtggtctccccaagggacttcgtgaatgtccggcgcattgagcggcgcagggaccgatacttgtcatcagggatcgccacctcacacagtgccaagcccccgacgcacaaatatgtccggggagagaatggccctgggggcttcatcgtgctcaagtcggccagtaacccccgtgtttgcacctttgtctggattcttaatacagatctcaagggccgcctgccccggtacctcatccaccagagcctcgcggccaccatgtttgaatttgcctttcacctgcgacagcgcatcagcgagctgggggcccgggcgtgactgtgccccctcccaccctgcgggccagggtcctgtcgccaccacttccagagccagaaagggtgccagttgggctcgcactgcccacatgggacctgg

SEQ ID NO: 186659 - DNA, 4606 bp, Homo sapiens
  Payload ID: 16755
  Gene Symbol: STARD4
  Gene Name: StAR-related lipid transfer (START) domain containing 4
  Uniprot ID: Q96DR4
  ENST ID: ENST00000296632
  CDS Start-End: 136-753
acaagttggctgctgtcgcctgcgcatcggcgggccgggaggctgagcagtactgttgagagcggtgtgaggtgcttggtagcgcgccgtagctgcttccacgtccttgcttcacctcaggtaaagagagaagtaatggaaggcctgtctgatgttgcttcttttgcaactaaacttaaaaacactctcatccagtaccatagcattgaagaagataagtggcgagttgctaagaaaacgaaagatgtaactgtttggagaaaaccctcagaagaatttaatggatatctctacaaagcccaaggtgttatagatgaccttgtctatagtataatagaccatatacgcccagggccttgtcgtttggattgggacagcttgatgacttctttggatattctggagaactttgaagagaattgctgtgtgatgcgttacactactgctggtcagctttggaatataatttccccaagagaatttgttgatttctcctatactgtgggctataaagaagggcttttatcttgtggaataagtcttgactgggatgaaaagagaccagaatttgttcgaggatataaccatccctgtggttggttttgtgttccacttaaagacaacccaaaccagagtcttttgacaggatatattcagacagatctgcgtgggatgattcctcagtctgcggtagatacagccatggcaagcactttaaccaacttctatggtgatttacgaaaagctttatgagaggcaaaatacattcaaacttgtagtactacagatcaactctctcagctacatggcctgtaaaaatcattgattccacttttctgcatagccggtagaaaaatttgaaatgtttttggttcactagtacaatgtttggttttattcctaaagtaaatagctatctaagagagggcattttcacttttttttttttaaattttgagacaggctctcactctgttgcccatgctggagggcagtggtatgatcacagctcactgcagctttgatctgaccgctcaaggggttattctacctcagcctcctgaatagctgggaatacaggtgcacgccactatgcatggctaatttttgtttaattttttgtagagatgtggtcacactgtgttgcccaggctggtcttgaactcctggcctcaagtcattccccaccttagcctcccaaagtgttgggattataagcgtgagccaccatgcctggccccaatttaaaatgtggaattcagttggtgtccaagacttatcttgagactcttaaaagcatcagtctgtaactagaacaaatacagtcttagatttacccaagtgcctagatatcattttataatgattagaattgagtattgtgggtcccctaattctgtgggtgccttaagtgagaatttctaaatgattttcacattctaaatgactttgggttttgaactctccatctagtttacttctaaaatgggaacttgaggcaattcaggtatccaggcaaatctttgtatatatttttttgtgtacatgcacacatctcgaaatccatttccgtgtttaatgttagttgtttatgtgttagtattcctgtgtctactgttttgttgttgttaatatgggtaaagtgagccctgaaatacatgctaaacaagacatgaaatgcagaaaggtacatagtgtttcaagtgcatggtagtttgatctgtgttttactttattgtgttttcttgagtgtaaagaaagaataaatcaaagttcttcatacccattttgacaaagtggaacagtggagctgttttttgcttttgtttttatttattttttgccactggtgatgatagatttcaaaaaacaaaaggtggcagcagcacaatgttcatggtgaattatctcatagtatctagattgatcaagatctgacagaaggaatgcacaaaggattctatattcttaatgatttattaattaccaggatccttttctaaattgaatgtacttttgaattactaggtttcttctttttttttgttctgcaatagtgaaagaaaactcagtagtttagtttcagtttctcatggaaattggtaaatgttagttttgacttcatctattttttatttgtttttattagcgtagagtaggaagtctcatattctactgttctatctaggatggtgaaattccaaaggtgcctaacttgagtaagggatttgtgacaagatagtacacattactataagggctattatttcctgaactggatgtccctaaaagcaaataaactgcccactatctctactctagtgctctctttgtccttatcaacatatacctccaataagtaattacataattcaccgttaaacatggacccactctaggtaaaattaccctcatggaaacattttcactgtgagaatgatgaatttaaaaattatgtttgaatcacctaaaatgtatgtgcagcttctagatggccccttagatctgctgggctctagctgtgtactttaaaaaaacaaaaacagctttattgatatataatttacatattatgtaatttacccacttttaagtatctaattcagtgatgttttaatacatatgtagaactatgcagccatcagcacaatctggatttagaacgtttccatcattccaaaagattccttttgtcttttttgcagactcatacctaacacaaatctaaagtttatcactgttgccaggataattacagcaggttatgtttggtttcatttttaagagtggaggtgttcatgattctaagctcaggaatcttgtgatcatgtattaaatatgttatctcatactataatgataaaaaagcttaatgatgtgggttgggatggatattaacataaataattgagtccgctgcttctatagcaatgctgtaggatagaacaataatgtaagtgatatatgtaattaaaaaattctagaagccacattaaaaaataaaaataaacagctgaagttaattttaatattttatttaactcaatacatccaaaatgttatcattttaacatgtaattgatgtaaagatttattctgatagtttgtactatttcttgtactaattttttgaaatctggtatgcattttacaaatttgggcaagccacattttaagtgctcattagccacatgaggccagtggatactgtattgaatagcacagtcctatagcatatttattaatttgtcttgtagtaagatgaaatagacaataatacggaataatatcttaaatggaaatctttgttagtctctagagccttcattgcttgataaataggacatctaaactttagatataaatcagttgtcaatgagataaaattattgccagcaaatattttccttcaaagataagtaacttttgatatggcagttggtgaaatgaaagaatataatctgccttcttgttaaatggttgactattctgtagcttgtaggtagtacgtattagaaacttgtgtatgtgggaaatatttggcataatactgttttcagtatatagtagctattttttaaggaaattagtttcatacaagaaaaagattattataaaagtgatacttttgcatgaaatattagtttgtgttgataactcttagttaacccttaaagtttaaaacagtactcaaaaaaaaataatgagaatctagtattctgtagttaactaatctataagataaattgctaaagtactagggagcttgtaaatcttaaaaatctttttatttcagtgttcattcaggttggatatatttgaaattgtagatttctatctgtacaacatctcctagttaatagaatttttttccttcccctcccttctctctcctcctccttttctaaccaaagggcattttatcaacaatcatgctgaattcaattaatatctcaagctaaaaaactatgtaattgaggttgtatctggagaagatgggaaaacattgtataatttaagcccttaattgtctgttgagcttttagggctgagtaattgcctttcatacaaataaaagctttaactcttttctcaagagtgtaccaccgtccttagaatcaggtgttttaaatccagtttcttttaattaaatgggactgtagtgatccctaccctgtagagaaatcaacagaactagagaagctaagggcttgatcaggtttcccctagaacctgtgttgcctgcctgctgtatcttccatgtctttcttattcaacttctagaagtagagaaggttgggacttgagtgtagaagaaacatcagaataatttcaaaaaacaggaagttggaactataatttttaaattattgtattgtttttacggattttacatgtatagttaaatattaaaattcatctcttgcagttcaataaaagctatagtatagattttatttttaagaagtttatataattcttttgtgaaccaatatgtaaaactagaatatttattaaactaataatatgtattagtatcaataaaatatgtatttatttttaaattggtatgaaacaaaataaaaatttgtagacactcttaaaa

SEQ ID NO: 186660 - DNA, 577 bp, Homo sapiens
  Payload ID: 16755
  Gene Symbol: STARD4
  Gene Name: StAR-related lipid transfer (START) domain containing 4
  ENST ID: ENST00000455172
  CDS Start-End: 138-344
ttacaagttggctgctgtcgcctgcgcatcggcgggccgggaggctgagcagtactgttgagagcggtgtgaggtgcttggtagcgcgccgtagctgcttccacgtccttgcttcacctcaggtaaagagagaagtaatggaaggcctgtctgatgttgcttcttttgcaactaaacttaaaaacactctcatccagtaccatagcattgaagaagataagtggcgagttgctaagaaaacgaaagatgtaactgtttggagaaaaccctcagaagaatttaatggatatctagtcttaaagggatatgtgatcaaaagagctacaaagcccaaggtgttatagatgaccttgtctatagtataatagaccatatacgcccagggccttgtcgtttggattgggacagcttgatgacttctttggatattctggagaactttgaagagaattgctgtgtgatgcgttacactactgctggtcagctttggaatataatttccccaagagaatttgttgatttctcctatactgtgggctataaagaagggcttttatcttgtggtaataatctcaac

SEQ ID NO: 186661 - DNA, 1135 bp, Homo sapiens
  Payload ID: 16755
  Gene Symbol: STARD4
  Gene Name: StAR-related lipid transfer (START) domain containing 4
  ENST ID: ENST00000511137
  CDS Start-End: 161-328
agttggctgcgaccagcggtgacttacaagttggctgctgtcgcctgcgcatcggcgggccgggaggctgagcagtactgttgagagcggtgtgaggtgcttggtagcgcgccgtagctgcttccacgtccttgcttcacctcaggtaaagagagaagtaatggaaggcctgtctgatgttgcttcttttgcaactaaacttaaaaacactctcatccagtaccatagcattgaagaagataagtggcgagttgctaagaaaacgaaagatgtaactgtttggagaaaaccctcagaagaatttaatggatatctaattgctgtgtgatgcgttacactactgctggtcagctttggaatataatttccccaagagaatttgttgatttctcctatactgtgggctataaagaagggcttttatcttgtggaataagtcttgactgggatgaaaagagaccagaatttgttcgaggatataaccatccctgtggttggttttgtgttccacttaaagacaacccaaaccagagtcttttgacaggatatattcagacagatctgcgtgggatgattcctcagtctgcggtagatacagccatggcaagcactttaaccaacttctatggtgatttacgaaaagctttatgagaggcaaaatacattcaaacttgtagtactacagatcaactctctcagctacatggcctgtaaaaatcattgattccacttttctgcatagccggtagaaaaatttgaaatgtttttggttcactagtacaatgtttggttttattcctaaagtaaatagctatctaagagagggcattttcacttttttttttttaaattttgagacaggctctcactctgttgcccatgctggagggcagtggtatgatcacagctcactgcagctttgatctgaccgctcaaggggttattctacctcagcctcctgaatagctgggaatacaggtgcacgccactatgcatggctaatttttgtttaattttttgtagagatgtggtcacactgtgttgcccaggctggtcttgaactcctggcctcaagtcattccccaccttagcctcccaaagtgttgggattataagcgtgagccaccatgcctgg

SEQ ID NO: 186662 - DNA, 1186 bp, Homo sapiens
  Payload ID: 16755
  Gene Symbol: STARD4
  Gene Name: StAR-related lipid transfer (START) domain containing 4
  ENST ID: ENST00000509887
  CDS Start-End: 161-328
agttggctgcgaccagcggtgacttacaagttggctgctgtcgcctgcgcatcggcgggccgggaggctgagcagtactgttgagagcggtgtgaggtgcttggtagcgcgccgtagctgcttccacgtccttgcttcacctcaggtaaagagagaagtaatggaaggcctgtctgatgttgcttcttttgcaactaaacttaaaaacactctcatccagtaccatagcattgaagaagataagtggcgagttgctaagaaaacgaaagatgtaactgtttggagaaaaccctcagaagaatttaatggatatctaattgctgtgtgatgcgttacactactgctggtcagctttggaatataatttccccaagagaatttgttgatttctcctatactgtgggctataaagaagggcttttatcttgtggtaataatctcaacatgttatgctttttttcagtatggtttaaatatttgtgttttcttggctggatgtctctttccttgtgagatatattttcaactctgactctgtaatcactaacattttttgcaagtgctaaactctagggagtaaaatagcaatatcaaaagagttttgaaacccttctgataagtttttgttcccagttacacagtatcctctaggtcagaggtagcaaatgtggatcacatgactgcctctaagaaagggttctagtaaatggattttcttctaagccactctcagaaaacagtttcttggtcatacacagagaagtactagatttggtgtgtcttagaatattcttccttccttgagctgtgttgtatttttcttttcaagattaaaaatactgccattggaaggctcctgttttctaaaacgtacctataggtaaattaatattattttgtatatagtgtatacttaagttagcagttgtaagtaaacatctacttgtttattcttaactagccagtaccaaactataatatggtagtcgctgtggggaatagttacggtaccatggatttgatttttggcacctcaaggcctggatactacaaccaagatttgtagcttccaaggagtactaagatgatatgatgtcatgtattctgaaaggattaaaagtttccccattacctatctgccaacctcttgtcagaattctccttggtaagtctctttttcactctg

SEQ ID NO: 186663 - DNA, 3500 bp, Homo sapiens
  Payload ID: 16755
  Gene Symbol: STARD4
  Gene Name: StAR-related lipid transfer (START) domain containing 4
  ENST ID: ENST00000512160
  CDS Start-End: 155-322
agttggctgcgaccagcggtgacttacaagttggctgctgtcgcctgcgcatcggcgggccgggaggctgagcagtactgttgagagcggtgtgaggtgcttggtagcgcgccgtagctgcttccacgtccttgcttcacctcagagagaagtaatggaaggcctgtctgatgttgcttcttttgcaactaaacttaaaaacactctcatccagtaccatagcattgaagaagataagtggcgagttgctaagaaaacgaaagatgtaactgtttggagaaaaccctcagaagaatttaatggatatctaattgctgtgtgatgcgttacactactgctggaataagtcttgactgggatgaaaagagaccagaatttgttcgaggatataaccatccctgtggttggttttgtgttccacttaaagacaacccaaaccagagtcttttgacaggatatattcagacagatctgcgtgggatgattcctcagtctgcggtagatacagccatggcaagcactttaaccaacttctatggtgatttacgaaaagctttatgagaggcaaaatacattcaaacttgtagtactacagatcaactctctcagctacatggcctgtaaaaatcattgattccacttttctgcatagccggtagaaaaatttgaaatgtttttggttcactagtacaatgtttggttttattcctaaagtaaatagctatctaagagagggcattttcacttttttttttttaaattttgagacaggctctcactctgttgcccatgctggagggcagtggtatgatcacagctcactgcagctttgatctgaccgctcaaggggttattctacctcagcctcctgaatagctgggaatacaggtgcacgccactatgcatggctaatttttgtttaattttttgtagagatgtggtcacactgtgttgcccaggctggtcttgaactcctggcctcaagtcattccccaccttagcctcccaaagtgttgggattataagcgtgagccaccatgcctggccccaatttaaaatgtggaattcagttggtgtccaagacttatcttgagactcttaaaagcatcagtctgtaactagaacaaatacagtcttagatttacccaagtgcctagatatcattttataatgattagaattgagtattgtgggtcccctaattctgtgggtgccttaagtgagaatttctaaatgattttcacattctaaatgactttgggttttgaactctccatctagtttacttctaaaatgggaacttgaggcaattcaggtatccaggcaaatctttgtatatatttttttgtgtacatgcacacatctcgaaatccatttccgtgtttaatgttagttgtttatgtgttagtattcctgtgtctactgttttgttgttgttaatatgggtaaagtgagccctgaaatacatgctaaacaagacatgaaatgcagaaaggtacatagtgtttcaagtgcatggtagtttgatctgtgttttactttattgtgttttcttgagtgtaaagaaagaataaatcaaagttcttcatacccattttgacaaagtggaacagtggagctgttttttgcttttgtttttatttattttttgccactggtgatgatagatttcaaaaaacaaaaggtggcagcagcacaatgttcatggtgaattatctcatagtatctagattgatcaagatctgacagaaggaatgcacaaaggattctatattcttaatgatttattaattaccaggatccttttctaaattgaatgtacttttgaattactaggtttcttctttttttttgttctgcaatagtgaaagaaaactcagtagtttagtttcagtttctcatggaaattggtaaatgttagttttgacttcatctattttttatttgtttttattagcgtagagtaggaagtctcatattctactgttctatctaggatggtgaaattccaaaggtgcctaacttgagtaagggatttgtgacaagatagtacacattactataagggctattatttcctgaactggatgtccctaaaagcaaataaactgcccactatctctactctagtgctctctttgtccttatcaacatatacctccaataagtaattacataattcaccgttaaacatggacccactctaggtaaaattaccctcatggaaacattttcactgtgagaatgatgaatttaaaaattatgtttgaatcacctaaaatgtatgtgcagcttctagatggccccttagatctgctgggctctagctgtgtactttaaaaaaacaaaaacagctttattgatatataatttacatattatgtaatttacccacttttaagtatctaattcagtgatgttttaatacatatgtagaactatgcagccatcagcacaatctggatttagaacgtttccatcattccaaaagattccttttgtcttttttgcagactcatacctaacacaaatctaaagtttatcactgttgccaggataattacagcaggttatgtttggtttcatttttaagagtggaggtgttcatgattctaagctcaggaatcttgtgatcatgtattaaatatgttatctcatactataatgataaaaaagcttaatgatgtgggttgggatggatattaacataaataattgagtccgctgcttctatagcaatgctgtaggatagaacaataatgtaagtgatatatgtaattaaaaaattctagaagccacattaaaaaataaaaataaacagctgaagttaattttaatattttatttaactcaatacatccaaaatgttatcattttaacatgtaattgatgtaaagatttattctgatagtttgtactatttcttgtactaattttttgaaatctggtatgcattttacaaatttgggcaagccacattttaagtgctcattagccacatgaggccagtggatactgtattgaatagcacagtcctatagcatatttattaatttgtcttgtagtaagatgaaatagacaataatacggaataatatcttaaatggaaatctttgttagtctctagagccttcattgcttgataaataggacatctaaactttagatataaatcagttgtcaatgagataaaattattgccagcaaatattttccttcaaagataagtaacttttgatatggcagttggtgaaatgaaagaatataatctgccttcttgttaaatggttgactattctgtagcttgtaggtagtacgtattagaaacttgtgtatgtgggaaatatttggcataatactgttttcagtatatagtagctattttttaaggaaattagtttcatacaagaaaaagattattataaaagtgatacttttgcatgaaatattagtttgtgttgataactcttagttaacccttaaagtttaaaacagtactc

SEQ ID NO: 186664 - DNA, 803 bp, Homo sapiens
  Payload ID: 16755
  Gene Symbol: STARD4
  Gene Name: StAR-related lipid transfer (START) domain containing 4
  Uniprot ID: Q96DR4
  ENST ID: ENST00000505803
  CDS Start-End: 182-799
cttgccctgaggcgctgggtgccttccagttggctgcgaccagcggtgacttacaagttggctgctgtcgcctgcgcatcggcgggccgggaggctgagcagtactgttgagagcggtgtgaggtgcttggtagcgcgccgtagctgcttccacgtccttgcttcacctcagagagaagtaatggaaggcctgtctgatgttgcttcttttgcaactaaacttaaaaacactctcatccagtaccatagcattgaagaagataagtggcgagttgctaagaaaacgaaagatgtaactgtttggagaaaaccctcagaagaatttaatggatatctctacaaagcccaaggtgttatagatgaccttgtctatagtataatagaccatatacgcccagggccttgtcgtttggattgggacagcttgatgacttctttggatattctggagaactttgaagagaattgctgtgtgatgcgttacactactgctggtcagctttggaatataatttccccaagagaatttgttgatttctcctatactgtgggctataaagaagggcttttatcttgtggaataagtcttgactgggatgaaaagagaccagaatttgttcgaggatataaccatccctgtggttggttttgtgttccacttaaagacaacccaaaccagagtcttttgacaggatatattcagacagatctgcgtgggatgattcctcagtctgcggtagatacagccatggcaagcactttaaccaacttctatggtgatttacgaaaagctttatgagagg

SEQ ID NO: 186665 - DNA, 1467 bp, Homo sapiens
  Payload ID: 16755
  Gene Symbol: STARD4
  Gene Name: StAR-related lipid transfer (START) domain containing 4
  Uniprot ID: Q96DR4
  ENST ID: ENST00000502322
  CDS Start-End: 216-695
agggggcggggctgggggctcggcccgccttgccctgaggcgctgggtgccttccagttggctgcgaccagcggtgacttacaagttggctgctgtcgcctgcgcatcggcgggccgggaggctgagcagtactgttgagagcggtgtgaggtgcttggtagcgcgccgtagctgcttccacgtccttgcttcacctcaggtaaagagagaagtaatggaaggcctgtctgatgttgcttcttttgcaactaaacttaaaaacactctcatccagtaccatagcattgaagaagataagtggcgagttgctaagaaaacgaaagatgtaactgtttggagaaaaccctcagaagaatttaatggatatctctacaaagcccaaggtgttatagatgaccttgtctatagtataatagaccatatacgcccagggccttgtcgtttggattgggacagcttgatgacttctttggatattctggagaactttgaagagaattgctgtgtgatgcgttacactactgctggtcagctttggaatataatttccccaagagaatttgttgatttctcctatactgtgggctataaagaagggcttttatcttgtggtaataatctcaacatgttatgctttttttcagtatggtttaaatatttgtgttttcttggctggatgtctctttccttgtgagatatattttcaactctgactctgtaatcactaacattttttgcaagtgctaaactctagggagtaaaatagcaatatcaaaagagttttgaaacccttctgataagtttttgttcccagttacacagtatcctctaggtcagaggtagcaaatgtggatcacatgactgcctctaagaaagggttctagtaaatggattttcttctaagccactctcagaaaacagtttcttggtcatacacagagaagtactagatttggtgtgtcttagaatattcttccttccttgagctgtgttgtatttttcttttcaagattaaaaatactgccattggaaggctcctgttttctaaaacgtacctataggtaaattaatattattttgtatatagtgtatacttaagttagcagttgtaagtaaacatctacttgtttattcttaactagccagtaccaaactataatatggtagtcgctgtggggaatagttacggtaccatggatttgatttttggcacctcaaggcctggatactacaaccaagatttgtagcttccaaggagtactaagatgatatgatgtcatgtattctgaaaggattaaaagtttccccattacctatctgccaacctcttgtcagaattctccttggtaagtctctttttcactctgccatggtcactttgggatttaattttcatctatatggataataataaatatttaaataagaattctggtaatattttaaaatgagagttttatgtcagt

SEQ ID NO: 186666 - DNA, 4871 bp, Homo sapiens
  Payload ID: 16756
  Gene Symbol: STARD5
  Gene Name: StAR-related lipid transfer (START) domain containing 5
  Uniprot ID: Q9NSY2
  ENST ID: ENST00000302824
  CDS Start-End: 27-668
cgcagctaagcgcagctcccgacgcaatggacccggcgctggcagcccagatgagcgaggctgtggccgagaagatgctccagtaccggcgggacacagcaggctggaagatttgccgggaaggcaatggagtttcagtttcctggaggccatctgtggagtttccagggaacctgtaccgaggagaaggcattgtatatgggacactagaggaggtgtgggactgtgtgaagccagctgttggaggcctacgagtgaagtgggatgagaatgtgaccggttttgaaattatccaaagcatcactgacaccctgtgtgtaagcagaacctccactccctccgctgccatgaagctcatttctcccagagattttgtggacttggtgctagtcaagagatatgaggatgggaccatcagttccaacgccacccatgtggagcatccgttatgtcccccgaagccaggttttgtgagaggatttaaccatccttgtggttgcttctgtgaacctcttccaggggaacccaccaagaccaacctggtcacattcttccataccgacctcagcggttacctcccacagaacgtggtggactccttcttcccccgcagcatgacccggttttatgccaaccttcagaaagcagtgaagcaattccatgagtaatgctatcgttacttcttggcaaagaactcccgtgactcatcgaggagctccagctgttgggacaccaaggagcctgggagcacgcagaggcctgtgttcactctttggaacaagctgatggactgcgcatctctgagaatgccaaccagaggcggcagcccacccttcctgcctcctgccccactcagggttggcgtgtgatgagccattcatgtgttccaaactccatctgcctgttacccaaacacgcctctcctggcagggtagacccaggcctctaaccatctgacagagactcggcctggacaccatgcgatgcactctggcaccaaggctttatgtgcccatcactctcagagaccacgtttccctgactgtcatagagaatcatcatcgccactgaaaaccaggccctgttgccttttaagcatgtaccgctccctcagtcctgtgctgcagccccccaaatatatttttctgatatagaccttgtatatggctttaatgccgcaaaatatttatttttccttaaaaaaggtgtcaacttggaaataatggtttaaaaacaggataagcattaaggaaaaacactttcaatgtgtcttccatttgatgaatttgtttttctctctttatccccgcaaggtggagtttcatgtcctcggtgaaaccagacagtgtgaatctgttccagcccaaatctgcagcattagggatgagttctcagaagtgattctgaactgagcacgcactcatgtctgcatggggaactctggggagaagagccttccttttctttcccttgggcatttgcctttccttgtcgtcttactgaggcggaggcaggaggtctctgtcttccaggccctggccaggccatcctgccatcaggaaagatggaagagtaggcctccgtctagcagccctggctggaaatcccccctctagatcctgctgcaagactgtacaaactcacaggggccatgtccacccaggcacatcatcagaaccagggagcacagccttgccacctagaaggggcctcagcagccgtgcaactttctttccctatctccaatccagagagggatcctctaacattctctagcaacctcatctgcacccccaccaccttccttgtaagaaagaccacgtgtgactaaaatcccttcacgctgcatttacccaggttactattgtgcgcgcaaaatgttttcacagtgttctcagcctttgctcctccaaacagaaaacgtttcccctgcgttactgttacttccctatttttgagtcctggggtgactgtctcttaaatgtgccaagatgtgagcaagctttaaaacatgacagctcagtgttaaggagacagaaagcttcctctttctctgttctattgcaactacaaattctacagtcatgcctaagatcctttagctaacacccttttcaagaaatcatcagactcttggattgacttagaattcattcattcattaagtgcttaccgagtccccgctctgtggcaagcactgttctatatcaacttctcatgagttcagccaattctaggtgcaccagccaaggaaacttcatgcctgccctctctgagctccatactctgaggtggtggtcttatcaagatgggatcgccttgtacatccctgtgtagccaagtggaaggccagccaaccaagaatgcatctcactgggcctatgggacatactgtgcctgcactgctcctccacgtgactgcatcaggttaaactggtcagagccctggatgaggagctggaaaacatgcatccagtccaagctctgccacttgggccaagtgtgctcttgaacagtcacttaatatatctgctttgatttgtcttttaaagaaaatatggaggcaggaataccagtgtcagtgtagcctgcttcttgagtgttggcacaagtgagataatgtatgaatcagtaaaatgctgggcaaagcaaagaagtagggctgcctgggagtggattcctttttatggtgagttaagacgacttcacaattgttagctgtgatgcctgcagtgtttgaggatggcattgccttcatcctgtgtcagctctgaagaagttggcagagcaaagctaagcctcaagtgtaaatcccagcatcatggaacgcaaatggatgagcttttgttttaggatcttcttgctgattcctacccagaggacttccccagcctagagaccagaaacctgggcaatagttatatcttcagtggccctaggagttgttgtgtctccttggggaggagagaaccttctaaaacaggccagagacaggaggtactgggagggccatgggctcacctgcatctatgcccagataacctgggacagataacctctgtcccaatcacttgctttgcctggtctctcaaggagtctcttggtaccccaggcccacggccagctccatgctcatccctgtccccaccttccagtcttgatgaaaacccaccttctctttcatcccttggctgcttgataagacttaaaacaattccctgattttagggaaggccactgcgtgcacagatggtgagtttgtgcaggcaaggaatgtgccctccacatcacgtggcctccttgcccagcctgggtcatgggaagggagtgttgaattgaatcacgtctttcgttggtagattatgttcatcttcaatgtttctattaagtctaaaaagtggatacaaatggtgcctccaagttcttgtctaattgcttgtctactgcttgacaaaatccagaatggaataggccaaacaagttaaccagcaggacagaaactgctctaagcccattattccttgagatgaatagaacagtgagctgaacgcctgctctaatgaagccactaaaggggtttacaggaaggttaggagcccagatgggttttgagtccactgctgggaaacagattcttcacttcctgtggaccctggagaagccatcagattacattaacatggctccactgatgatggcctgagaattactattgtttgtgtttcatctgtgtccttgccaggtcttcccccacatccttacttcacaggatcaggggctgagaggagaccaatactctggcccaggcctggtcaagggatgctggttgttgctgatgcaaagtcacattgcctggtcctgagcttggcaatcaggcatccagagatggccaaaccaaatatccctttggccaggcactcaggcattccctgtaatgttgtgcacttaaagcatcttgggctgatagtctccaccgaatcacagaagaaaactcaatctgccgcatcactcaccagctggataagccatttactgtacacagtgtgtgccctcttatcaatacattggcacagaaccatacaccgtagaagctgctgtgatcactaaaggcaatgcccgtttagccctgagcacagtgcttggcatgtggtaggtaagtagtagcaattttatttgataccctcatatacacgctggttccttctgtcggcacacctgtccacgctttgagcttggtgcttcacctgtactcctctgtttactggctccaccacccttccctaggattacttctccaatccaaccaaaaacaattttgcaaatgtttcatgtgacaaactgtatttttcataaatgaccccagcaatatttcctctccccttaaacccaggcaggtttgtgtcagctctaactgatggagtatggtggaggtgatgccatgcaacttccaaggcaaaggtataaacaagatgcagcttctacatggctcttgcgatcctgggatgctcatcctgggaatccagacaccatgttgtgaggaggcccaggccacaaggagaggccacctataagcattcaggccagcagccccaggtgagttcccagccaacatcaacggccagatgtatgagtgaatgatctcacgtggtcccagcctttgcatgactttgcatgacgccagctgatgccaagtgggacagagatgagctgcccattccaatctctgcccacattgcagattcatgagaaaaataaatgtcactgtttgggggtgaatcatgacacagttacagtacttgaaacattttgcgaagccaggcatgaatgtcatatgaaattctaataaatccattttatttgtggcaccacaa

SEQ ID NO: 186667 - DNA, 1264 bp, Homo sapiens
  Payload ID: 16756
  Gene Symbol: STARD5
  Gene Name: StAR-related lipid transfer (START) domain containing 5
  Uniprot ID: Q9NSY2
  ENST ID: ENST00000325346
  CDS Start-End: 85-276
gagctccagcctccaggcacccgggatccagcgccgccgctcataacacccgcgaccccgcagctaagcgcagctcccgacgcaatggacccggcgctggcagcccagatgagcgaggctgtggccgagaagatgctccagtaccggcgggacacagcaggctggaagatttgccgggaaggcgtaccgaggagaaggcattgtatatgggacactagaggaggtgtgggactgtgtgaagccagctgttggaggcctacgagtgaagtgggatgagaatgtgaccggttttgaaattatccaaagcatcactgacaccctgtgtgtaagcagaacctccactccctccgctgccatgaagctcatttctcccagagattttgtggacttggtgctagtcaagagatatgaggatgggaccatcagttccaacgccacccatgtggagcatccgttatgtcccccgaagccaggttttgtgagaggatttaaccatccttgtggttgcttctgtgaacctcttccaggggaacccaccaagaccaacctggtcacattcttccataccgacctcagcggttacctcccacagaacgtggtggactccttcttcccccgcagcatgacccggttttatgccaaccttcagaaagcagtgaagcaattccatgagtaatgctatcgttacttcttggcaaagaactcccgtgactcatcgaggagctccagctgttgggacaccaaggagcctgggagcacgcagaggcctgtgttcactctttggaacaagctgatggactgcgcatctctgagaatgccaaccagaggcggcagcccacccttcctgcctcctgccccactcagggttggcgtgtgatgagccattcatgtgttccaaactccatctgcctgttacccaaacacgcctctcctggcagggtagacccaggcctctaaccatctgacagagactcggcctggacaccatgcgatgcactctggcaccaaggctttatgtgcccatcactctcagagaccacgtttccctgactgtcatagagaatcatcatcgccactgaaaaccaggccctgttgccttttaagcatgtaccgctccctcagtcctgtgctgcagccccccaaatatatttttctgatatagaccttgtatatggctttaatgccgcaaaatatttatttttccttaaaaaaggtgtcaacttggaaataatggtttaaaaacaggataagcattaaggaaaaa

SEQ ID NO: 186668 - DNA, 579 bp, Homo sapiens
  Payload ID: 16756
  Gene Symbol: STARD5
  Gene Name: StAR-related lipid transfer (START) domain containing 5
  ENST ID: ENST00000560156
  CDS Start-End: 43-375
ataacacccgcgaccccgcagctaagcgcagctcccgacgcaatggacccggcgctggcagcccagatgagcgaggctgtggccgagaagatgctccagtaccggcgggacacagcaggctggaagatttgccgggaaggcgtgagtgaggagctgggcgggaaggggtcgcggagacggcttcgtggagcccgggtccccagaagcccccaagcgcctcctctccccgttgttttctgctccccaatcccctggacccgattgagagggattccaatggggattgttttcttctttaaaaaaaagattgggcctgttatgctcacaatgacttcaggtggtaccgaggagaaggcattgtatatgggacactagaggaggtgtgggactgtgtgaagccagctgttggaggcctacgagtgaagtgggatgagaatgtgaccggttttgaaattatccaaagcatcactgacaccctgtgtgtaagcagaacctccactccctccgctgccatgaagctcatttctcccagagattttgtggacttggtgctagtcaagagatatgaggatgggacca

SEQ ID NO: 186669 - DNA, 663 bp, Homo sapiens
  Payload ID: 16757
  Gene Symbol: STARD6
  Gene Name: StAR-related lipid transfer (START) domain containing 6
  Uniprot ID: P59095
  ENST ID: ENST00000307844
  CDS Start-End: 1-663
atggacttcaaggcaattgcccaacaaactgcccaagaagttttaggttataatcgagatacatcaggctggaaagtggttaaaacttcaaaaaagataactgtttccagtaaggcttctagaaaattccatggaaatctatatcgtgttgaagggataattccagaatcaccagctaaactatctgatttcctctaccaaactggagacagaattacatgggataaatcattgcaagtgtataatatggtacacaggattgattcggacacattcatatgtcataccattacacaaagttttgccgtgggctccatttcccctcgagactttatcgacttagtgtacatcaagcgctacgaaggaaatatgaacattatcagttctaaaagtgtggattttccagaatatcctccatcttcaaattatatccgcggttataaccatccttgtggctttgtatgttcaccaatggaagaaaacccagcatattccaaactagtgatgtttgtccagacagaaatgagaggaaaattgtccccatcaataattgaaaaaaccatgccttccaacttagtaaacttcatcctcaatgcaaaagatggaataaaggcacacagaactccatcaagacgtggatttcatcataatagtcattcatga

SEQ ID NO: 186670 - DNA, 1371 bp, Homo sapiens
  Payload ID: 16757
  Gene Symbol: STARD6
  Gene Name: StAR-related lipid transfer (START) domain containing 6
  Uniprot ID: P59095
  ENST ID: ENST00000581310
  CDS Start-End: 375-1037
ctccgcagtcacagcagagctcgacacccgcgctcgctttcaaaccgccccaacatggcgccggcctgcggtgcgcatgcgcggcagtggggcgccgggcgcgagcggagatgagggagcggccggagaagagaggatgctgttgagcgttaggtcgcgacccctgctggaagaggccatcccaatgttggtttatgtttattttccactgaccctatgagtgaagatatccttgaccatgagtccatctgaatatgttccagctcatccgacgttccaccaccatgttaagagatatggagatttccacaaggatttggagaggagccccagtagttactaaaattctgcattagatctgtcaggaaagatagatggacttcaaggcaattgcccaacaaactgcccaagaagttttaggttataatcgagatacatcaggctggaaagtggttaaaacttcaaaaaagataactgtttccagtaaggcttctagaaaattccatggaaatctatatcgtgttgaagggataattccagaatcaccagctaaactatctgatttcctctaccaaactggagacagaattacatgggataaatcattgcaagtgtataatatggtacacaggattgattcggacacattcatatgtcataccattacacaaagttttgccgtgggctccatttcccctcgagactttatcgacttagtgtacatcaagcgctacgaaggaaatatgaacattatcagttctaaaagtgtggattttccagaatatcctccatcttcaaattatatccgcggttataaccatccttgtggctttgtatgttcaccaatggaagaaaacccagcatattccaaactagtgatgtttgtccagacagaaatgagaggaaaattgtccccatcaataattgaaaaaaccatgccttccaacttagtaaacttcatcctcaatgcaaaagatggaataaaggcacacagaactccatcaagacgtggatttcatcataatagtcattcatgataccaaaagaagaaatgaggccgttctgctataaaatcatgtgtagtagttattgctgtttacttctaagtcaacgcacataaataatactgttaaactattctagacagtattcttgtacacatggctgaagatagttcataaaaataagaactcatagttgtacaagaatatggcattaaataccgtttttaatctcacgtaagaatgatgttaaataagtgttattagtatatttttatcttttgcttttgtccctgtaaaatcctctgtataaggaccaataagaaagcagatacagtcagaggtcagcattaactaaaagttaaaatac

SEQ ID NO: 186671 - DNA, 660 bp, Homo sapiens
  Payload ID: 16757
  Gene Symbol: STARD6
  Gene Name: StAR-related lipid transfer (START) domain containing 6
  ENST ID: ENST00000584040
  CDS Start-End: 238-465
gcggagatgagggagcggccggagaagagaggatgctgttgagcgttaggtcgcgacccctgctggaaggttaagagatatggagatttccacaaggatttggagaggagccccagtagttactaaaattctgcattagatctgtcaggaaagcttcccctaactgaaagctggatgatgacccgaaggaccagtgagactgcagcttccggaactcattcacagcagtaataatagatggacttcaaggcaattgcccaacaaactgcccaagaagttttaggttataatcgagatacatcaggctggaaagtggttaaaacttcagtgcagtggtgtgcacctatagtcccagctactcaggaggctaacacaggaggactgcttgagcacaggagtttgaggctgtcatgcaccatgattgtgcctgtgaatagccagtacactacagactgggcaacatagtgagaccctgtctctgaaaaatatatatatatatttttttcttttacaaaccagaaaaaaaagtgtttttacttttgttagtttttcattttcatttttcctgcatttgacagctaattatttgtggatttttattcccctttgagaaaaagataactgtttccagtaaggcttctagaaaattccatggaaatc

SEQ ID NO: 186672 - DNA, 696 bp, Homo sapiens
  Payload ID: 16757
  Gene Symbol: STARD6
  Gene Name: StAR-related lipid transfer (START) domain containing 6
  ENST ID: ENST00000577499
  CDS Start-End: 146-373
gagcggccggagaagagaggatgctgttgagcgttaggtcgcgacccctgctggaaggttaagagatatggagatttccacaaggatttggagaggagccccagtagttactaaaattctgcattagatctgtcaggaaagatagatggacttcaaggcaattgcccaacaaactgcccaagaagttttaggttataatcgagatacatcaggctggaaagtggttaaaacttcagtgcagtggtgtgcacctatagtcccagctactcaggaggctaacacaggaggactgcttgagcacaggagtttgaggctgtcatgcaccatgattgtgcctgtgaatagccagtacactacagactgggcaacatagtgagaccctgtctctgaaaaatatatatatatatttttttcttttacaaaccagaaaaaaaagtgtttttacttttgttagtttttcattttcatttttcctgcatttgacagctaattatttgtggatttttattcccctttgagaaaaagataactgtttccagtaaggcttctagaaaattccatggaaatctgtgagtacaatcttctatttacaattactgttttaaattcaatgccattgatgtatctggaatttcagtgctgcttcattagctataataaattattttatagtaataaatagaaattattaagtca

SEQ ID NO: 186673 - DNA, 3368 bp, Homo sapiens
  Payload ID: 16758
  Gene Symbol: STARD7
  Gene Name: StAR-related lipid transfer (START) domain containing 7
  Uniprot ID: Q9NQZ5
  ENST ID: ENST00000337288
  CDS Start-End: 385-1497
gcggaaggcgcgggagcttgcgtgctgctgggcctgagctgtctgtctcgtttctgtccgcgcgccctgcatcccggccccgggcgcccgctggaggtcgccgaggagccacagggctgactggtctgctgcccgggcccaggagtgcctggtgtagcagtcgcggagccatcccggcgtctgctgccatgaccgactctcccctcagaggagactcttcctcagcggtggctgcagagacagatgagcggcggctcctggccgcgggaccgtgagacgggttcgtggccggccatttagggggacgctgcgaccaccgcctgcgcccctccggactggttccttgggccccggaagctcgcggcgggccctgcgggaggcggcatgctcccgcggaggctgctggccgcctggctggcggggacgcggggcgggggcctgctggcgcttctggccaatcagtgccgcttcgtcacgggcctgcgcgtgcggcgcgcgcagcagatcgcgcagctctacggccgcctctactccgagagctcacgccgcgttctcctcggccgcctctggcgccggctgcacggccgtcctggccatgcctctgccttgatggcggcgttagccggcgtcttcgtttgggacgaggagaggatccaggaggaggagttgcagagatctattaatgagatgaagcggttggaagaaatgtcaaatatgtttcagagctctggagtccagcaccaccctccagaaccaaaagcccaaacagaagggaatgaagattcagagggcaaagagcaacgttgggaaatggtgatggataagaaacactttaagctgtggcggcgcccaattacaggcacccacctttaccagtaccgagtttttggaacctacacagatgtgacacctcggcagttcttcaatgttcagctggacacagagtatagaaaaaaatgggatgccctggtaatcaagctggaggtgattgagagggatgtggttagtggttccgaggttcttcactgggtaacccattttccttatccaatgtactcacgggattatgtttatgttcggcggtatagtgtggatcaggaaaacaacatgatggtgttggtgtcgcgtgctgtggagcatccgagtgtgccagagtctccagaattcgtcagggtcagatcatatgaatcccaaatggttatccgtccccacaagtcatttgatgagaatggctttgactacttactaacatacagtgacaatccccaaacggtgtttcctcgctactgtgttagttggatggtttccagtggcatgccagatttcctggagaagctgcacatggccactctgaaagccaagaatatggagattaaagtaaaggactacatctcagctaagcctctggaaatgagtagtgaagccaaggccaccagccagtcctctgagcgaaagaacgagggcagctgtggccctgctcggattgagtatgcttgacaggctttgggataagaagggacaaggtgcttctagccctgtctcagtccgttatcactctgctgtagaagggggacatgccacatgtattagaaggcatctgctgtaacttccagtgcaagataattcaataactgatgtcccatttcattcagagcccttattgctcttatcaaaacagaagaaggctacatttgtgggagtgttgtcatattctcaggccaactgttttgaaattcggtatctcactgagctaatctggaacaaacctctcacctcaggccagaaggggatgacctccatttgcttctctgagtagtttcctctgctgacattccaaatcccaccatcgattgtgcagcgctttggatttccttcagttctccaggtccacctggaaagtatagttggccagttgagtctctcaaatgaggggctactgggagtgctcttggtaacaatcatgatgtgaatgggtgtgaacgatacttggctatgttaagtgccttgtccgcaccttgcttttatctctagagacatgaagttattattaattttttttttttttaagtagagatggagtttcactctgtttcccaggctggtcttgaactcctgggccatgcctggccagggacatgaatttgtacaaagaaatttccctccctgcctgcacaatatcacccattgactcaccttatccaaagcaagtttcctgtgaatcggccagttcttctatattcattggatcattgcctccttcctaaccttccccatttaccaagaacactgggagactaatccttttagatagtagctttttgatgctcaaaacatcacatttaaatttagtttaaaaattttttaacttttgtgtcaaataggagttgaggaattgagcaggattctaccctagtccgattgtatagaaaacaccattttgattcaggtattatttttcatatttcaggtttgacttgttcttttcagaaggctaaagtcagaggaatgggggctgggccactcccttggagctctcagatctacagacaagctgtgtgaatgcatagatgtaatcttgtctcaaatactaatacagtggagatttggtttatgttaccattaagttcctctaaaaagtttttcttcctctcttcagagccaaaataaaagtgaactacactgttcagataaggtcacaatctgatgctgtcagtttgaccgagctggttttgcttatggtcatgctgcaatttgttagaataatagggatcaagttttaaatcctcctccttcccttttttctggagtcttgagggccagagtttttgtttttgtttttgtttttgttttcctgcttgctactgttttgtggtgttgaaaagtggtttaaacctgagactaacttaaacacttccttgaccttcttgttgcctgttcatttttgtgccaaggaagtagctgccccagtgtatgtcttgccttctccgcgtcattgttggaagaggagagatgcatcgagcagtcccagctgcttttcatttattacttcttctttccaggacctgacagaagtcagggaagagtccctgggttatgtccaaacttagcacctgcaattgttgggatgtggatggatgtgtgcataagagagagagagaatatgtgtgtgtgtgtgtgcgtctgcgagcgcacacacatgcacaagtgcgaaggagttgcggttgctccatgttctgacttagggcaatttgattctgcacttggggtctgtctgtacagttactcatgtcattgtaatgatttcactcctaactgtgacatttttatcaaatgtgtgaataaatacataaagattggtacaaaaaaaa

SEQ ID NO: 186674 - DNA, 742 bp, Homo sapiens
  Payload ID: 16758
  Gene Symbol: STARD7
  Gene Name: StAR-related lipid transfer (START) domain containing 7
  ENST ID: ENST00000443962
  CDS Start-End: 301-742
ggcagtcgcggaaggcgcgggagcttgcgtgctgctgggcctgagctgtctgtctcgtttctgtccgcgcgccctgcatcccggccccgggcgcccgctggaggtcgccgaggagccacagggctgactggtctgctgcccgggcccaggagtgcctggtgtagcagtcgcggagccatcccggcgtctgctgccatgaccgactctcccctcagaggagactcttcctcagcggtggctgcagagacagatgagcggcggctcctggccgcgggaccgtgagacggatctattaatgagatgaagcggttggaagaaatgtcaaatatgtttcagagctctggagtccagcaccaccctccagaaccaaaagcccaaacagaagggaatgaagattcagagggcaaagagcaacgttgggaaatggtgatggataagaaacactttaagctgtggcggcgcccaattacaggcacccacctttaccagtaccgagtttttggaacctacacagatgtgacacctcggcagttcttcaatgttcagctggacacagagtatagaaaaaaatgggatgccctggtaatcaagctggaggtgattgagagggatgtggttagtggttccgaggttcttcactgggtaacccattttccttatccaatgtactcacgggattatgtttatgttcggcggtatagtgtggatcaggaaaacaacatgatggtgttggtgtcgcggt

SEQ ID NO: 186675 - DNA, 4862 bp, Homo sapiens
  Payload ID: 16759
  Gene Symbol: STARD8
  Gene Name: StAR-related lipid transfer (START) domain containing 8
  Uniprot ID: Q92502
  ENST ID: ENST00000252336
  CDS Start-End: 373-3444
ggccttccaggaggcgggaggcgcccgctgtcgaggcagctgagccccggcaaccgctgctctccgcctctcccctcgcggggccggctcatggagcgcagggaccgggctggctctcgccgagccccgggcctcttttagcctcgtccccagagagggaggagccggtgcccggcacagccccgccggccctagaagctccccacgcgccaccatgcctctgctggacgttttctggtcttgcttcaggaaggtgaagtgcttcccattgctgcaggtgaagaagaacgctgaagccgaggccaaaagagcatgtgagtggcttcaagcaacaggattccctcagtatgtgcagctttttgaaggaggctgatgaccttgaataattgtgcctcgatgaaactggaggttcattttcaaagcaagcagaatgaagactcagaagaggaagagcagtgtaccatcagtagccactgggccttccagcaggaaagtaagtgctggtctcctatggggtcctctgatctgttggccccaccgagccctggcctgccagcgacctcaagctgtgagagcgtcctcaccgagcttagtgccacctctctgccagtcatcaccgtgagcctaccacccgagccagcagacttgcccttgccaggccgtgcccccagctcgagtgaccggcccctcctcagccccacccagggccaggagggtccccaggacaaagccaagaagcgccatcgtaaccgtagcttcctcaagcaccttgaatctctgaggcggaaggaaaagagtggcagccagcaagcagagcccaagcatagtccagccacctcagagaaggtctccaaagcctcatctttccgcagttgtcgtggcttcctctcagctggattttacagggccaagaactgggccgccacctcagccggtggcagtggtgccaatactcggaaggcctgggaggcctggcctgtggcctcgttccggcatcctcagtggacacaccggggtgattgcctggtgcacgttcctggggaccacaaaccaggcacattccctcgctccctgtccattgagagcctgtgtcctgaggatggacaccgcctggcagactggcagccaggtaggcggtggggctgtgaggggcgccggggctcctgtggctcaacgggcagccatgccagcacgtatgacaacttgcctgagctgtacccagctgagcctgtaatggttggggctgaggctgaagatgaagatgatgaggagagtgggggcagctatgctcacctagacgacatcctccagcacgtgtgggggctacagcaacgagtagagctgtggtctcgggccatgtacccagacctggggcctggagatgaggaagaggaggaggccacttcatcagtagaaatagccacagttgaggtcaaatgccaagctgaggctctcagccagatggaggttccggcccatggagagtccccagcctgggcccaggctgaagtccagccagcagtcctggctccggctcaggctccagctgaggctgaaccagtggcacaggaagaggctgaggccccggccccagccccggccccggccccagcccaggacagtgagcaggaggcacattcaggcggggaacccacctttgcctctagcctgtctgtggaagaaggacactccatttctgacactgtggcctcctccagcgaacttgacagtagtgggaactccatgaatgaggctgaggctgcggggcccctggctggactccaggcatcaatgccccgtgaacggcgcgattcaggtgttggggcctcacttaccagaccctgcaggaagctccgttggcatagcttccagaactcccatcgtcccagcctcaactcagagtcgctggagatcaaccggcagtttgcaggccagatcaacctcctgcacaagggctcactgctgcggcttaccgcgttcatggagaagtacactgtgccccacaagcagggctgggtctggtcaatgcccaagttcatgaggaggaacaagaccccagattaccggggacagcacgtatttggggtgccacccctcatccacgtgcagcgcacgggccagccactgccacagagcattcagcaagccatgcgctacttgcgcagccagtgcctggaccaagtaggcatcttccgcaagtctggggtcaagtccaggatccagaacctgcgtcaaatgaatgagacctcgcctgacaatgtctgctacgagggccagtcagcctacgacgtggctgacctgctaaagcagtatttccgggacctgcctgagcccatcttcaccagcaagctcaccaccactttcctccagatctaccagctcctccccaaggatcagtggttggcagcagcacaagccgccaccttgctgctccccgatgagaaccgagaggtgctacagaccctgctctacttcttaagtgacattgcctctgccgaggaaaaccagatgacagcaggcaacctggcagtgtgcctggcgccctccatcttccacctcaatgtctctaagaaggatagcccctctcccaggatcaagagcaaacgcagcctcattggcaggccaggccctagggacctgagtgacaacatggcagccacccagggcctgtcgcacatgatcagtgactgcaagaaacttttccaggtgccccaggacatggtgctgcagctgtgcagctcctacagcgcagctgagctcagccctcccggcccagccctggctgagctgcgtcaggcccaagctgcaggggtaagcctgagcctctacatggaagagaatatccaggacctgctgcgtgatgctgctgagcgcttcaagggctggatgagcgtgccagggccccagcacacggagctggcttgcaggaaggcaccggatgggcaccccctgcggctatggaaggcatccacagaggtggcagcccccccagctgtggtgctgcatcgtgttctccgggagcgggccctctgggatgaggatctgctgcgggcccaggtgctggaagccctgatgccgggtgtggagctgtaccactatgtcaccgacagcatggcaccccatccctgccgcgactttgtggtgcttcggatgtggcgctctgacctgcctcgtgggggttgcctgcttgtctcccagtccctggatccggaacaacctgtgccagagtcgggtgtgcgagccctcatgctcacatcccagtacctcatggagccttgcggcttgggccgctctcggctcacacacatctgccgggctgacctcaggggccgttctcctgactggtacaacaaagtctttggacacctgtgtgccatggaagtggcaaagatccgggactccttccccaccctgcaggcagcgggccctgagacaaagctgtgagccttgggctggtcccagggtggcaccacccaggccccctgggcaccaagggagcgagggggaataagagcagggcagccccctgggtgccgctgtcaggagcagagccaggcccaggtggctccagctgcctgtcctgtcccctttcctaaagctcctctgcacatagaggggagaaaaagagaatttaggcaactccactcccccttcacccccaaccctgtattctactctcccgaaaagagaagagaatcgcatgagtagcaagactgctgccaccagccacctgcttgtgaggccgccacttggcatgaagcctccacagctccccgcctgcaggggcaaagaggtcgacagcaatgtgtgatcccagctctctgccagactgagagggcaagccgtcttgtttgctgcaaggatgcttttgaggttggacaggaggttctggtcctgcctttggggccaacgctggctctgaagtgtctttttcagaggaattggactggagtgaatgggcacaggggtggagcgcagggcagccccagtcaccacgagctgtttcatttgtgtaaatacgatgctgaattttatgaggctgagttaagagtgggcactgacgggcccctaatatgtgacatgacgatttggcatagatagggatgtgagagtggagtaccttcctttctcaagtctcgagatgccagtgaaaccagtattccctgacttgggtttcacactttatcgaccaccccatggggtcctgtgtagcctttggccacgcactgacactgcccaggccaagcaaaagcagagtgtggttaagagacaagggtctatgtcatcatcccttttgcttatggtagtgggctaacataacagcccctttctcaagcagagacctggcccctgggccagccagatggaagggcctatcttagccagctggagcttaagccaaacctgttctgtcccactggccagccatctttgctcacatggaaattcaaatgccattcaaaggccactggtgctttatttttctatctgctgagtaaactgaaatgagatgggtcccaaccaccactgtaattttcaagcctattttatttgtacctgtaaatactgtacagctaatatatatatatatatatatatatgtgtgtgtgtgtgtgtgtgtatatgtgtttatagagatacacacacatatatatgtgtgtatatatatacacatacatatatatacacacacgcatttgcacagacacacacatatatcaattctcatgagtgtattataatctctggtgggggcaagtgtctggaaggcctgaggggcacttcagatgagaatggagaggtagggagccaggtgcagcaggatccctcaaatcaataaagcattaccagagatgcacttt

SEQ ID NO: 186676 - DNA, 4820 bp, Homo sapiens
  Payload ID: 16759
  Gene Symbol: STARD8
  Gene Name: StAR-related lipid transfer (START) domain containing 8
  Uniprot ID: Q92502
  ENST ID: ENST00000374597
  CDS Start-End: 338-3409
ctcgggttgacaacggctaagcagccgcggcagctgctcttctggctggcaccgtcacccctgcccgaccccaggccccgcgtgtgtcccggacggagcagtccctcctgggctcgcctcctgcccgctcgctctgtgtcagcgcccgaacccaaaggggtggacgcggcctccagaagccgaggccaaaagagcatgtgagtggcttcaagcaacaggattccctcagtatgtgcagctttttgaagaaggttcgtttcccctggatattggctctgtgaagaaaaaccacggttttctggacgaggactctttgggggccctgtgtaggaggctgatgaccttgaataattgtgcctcgatgaaactggaggttcattttcaaagcaagcagaatgaagactcagaagaggaagagcagtgtaccatcagtagccactgggccttccagcaggaaagtaagtgctggtctcctatggggtcctctgatctgttggccccaccgagccctggcctgccagcgacctcaagctgtgagagcgtcctcaccgagcttagtgccacctctctgccagtcatcaccgtgagcctaccacccgagccagcagacttgcccttgccaggccgtgcccccagctcgagtgaccggcccctcctcagccccacccagggccaggagggtccccaggacaaagccaagaagcgccatcgtaaccgtagcttcctcaagcaccttgaatctctgaggcggaaggaaaagagtggcagccagcaagcagagcccaagcatagtccagccacctcagagaaggtctccaaagcctcatctttccgcagttgtcgtggcttcctctcagctggattttacagggccaagaactgggccgccacctcagccggtggcagtggtgccaatactcggaaggcctgggaggcctggcctgtggcctcgttccggcatcctcagtggacacaccggggtgattgcctggtgcacgttcctggggaccacaaaccaggcacattccctcgctccctgtccattgagagcctgtgtcctgaggatggacaccgcctggcagactggcagccaggtaggcggtggggctgtgaggggcgccggggctcctgtggctcaacgggcagccatgccagcacgtatgacaacttgcctgagctgtacccagctgagcctgtaatggttggggctgaggctgaagatgaagatgatgaggagagtgggggcagctatgctcacctagacgacatcctccagcacgtgtgggggctacagcaacgagtagagctgtggtctcgggccatgtacccagacctggggcctggagatgaggaagaggaggaggccacttcatcagtagaaatagccacagttgaggtcaaatgccaagctgaggctctcagccagatggaggttccggcccatggagagtccccagcctgggcccaggctgaagtccagccagcagtcctggctccggctcaggctccagctgaggctgaaccagtggcacaggaagaggctgaggccccggccccagccccggccccggccccagcccaggacagtgagcaggaggcacattcaggcggggaacccacctttgcctctagcctgtctgtggaagaaggacactccatttctgacactgtggcctcctccagcgaacttgacagtagtgggaactccatgaatgaggctgaggctgcggggcccctggctggactccaggcatcaatgccccgtgaacggcgcgattcaggtgttggggcctcacttaccagaccctgcaggaagctccgttggcatagcttccagaactcccatcgtcccagcctcaactcagagtcgctggagatcaaccggcagtttgcaggccagatcaacctcctgcacaagggctcactgctgcggcttaccgcgttcatggagaagtacactgtgccccacaagcagggctgggtctggtcaatgcccaagttcatgaggaggaacaagaccccagattaccggggacagcacgtatttggggtgccacccctcatccacgtgcagcgcacgggccagccactgccacagagcattcagcaagccatgcgctacttgcgcagccagtgcctggaccaagtaggcatcttccgcaagtctggggtcaagtccaggatccagaacctgcgtcaaatgaatgagacctcgcctgacaatgtctgctacgagggccagtcagcctacgacgtggctgacctgctaaagcagtatttccgggacctgcctgagcccatcttcaccagcaagctcaccaccactttcctccagatctaccagctcctccccaaggatcagtggttggcagcagcacaagccgccaccttgctgctccccgatgagaaccgagaggtgctacagaccctgctctacttcttaagtgacattgcctctgccgaggaaaaccagatgacagcaggcaacctggcagtgtgcctggcgccctccatcttccacctcaatgtctctaagaaggatagcccctctcccaggatcaagagcaaacgcagcctcattggcaggccaggccctagggacctgagtgacaacatggcagccacccagggcctgtcgcacatgatcagtgactgcaagaaacttttccaggtgccccaggacatggtgctgcagctgtgcagctcctacagcgcagctgagctcagccctcccggcccagccctggctgagctgcgtcaggcccaagctgcaggggtaagcctgagcctctacatggaagagaatatccaggacctgctgcgtgatgctgctgagcgcttcaagggctggatgagcgtgccagggccccagcacacggagctggcttgcaggaaggcaccggatgggcaccccctgcggctatggaaggcatccacagaggtggcagcccccccagctgtggtgctgcatcgtgttctccgggagcgggccctctgggatgaggatctgctgcgggcccaggtgctggaagccctgatgccgggtgtggagctgtaccactatgtcaccgacagcatggcaccccatccctgccgcgactttgtggtgcttcggatgtggcgctctgacctgcctcgtgggggttgcctgcttgtctcccagtccctggatccggaacaacctgtgccagagtcgggtgtgcgagccctcatgctcacatcccagtacctcatggagccttgcggcttgggccgctctcggctcacacacatctgccgggctgacctcaggggccgttctcctgactggtacaacaaagtctttggacacctgtgtgccatggaagtggcaaagatccgggactccttccccaccctgcaggcagcgggccctgagacaaagctgtgagccttgggctggtcccagggtggcaccacccaggccccctgggcaccaagggagcgagggggaataagagcagggcagccccctgggtgccgctgtcaggagcagagccaggcccaggtggctccagctgcctgtcctgtcccctttcctaaagctcctctgcacatagaggggagaaaaagagaatttaggcaactccactcccccttcacccccaaccctgtattctactctcccgaaaagagaagagaatcgcatgagtagcaagactgctgccaccagccacctgcttgtgaggccgccacttggcatgaagcctccacagctccccgcctgcaggggcaaagaggtcgacagcaatgtgtgatcccagctctctgccagactgagagggcaagccgtcttgtttgctgcaaggatgcttttgaggttggacaggaggttctggtcctgcctttggggccaacgctggctctgaagtgtctttttcagaggaattggactggagtgaatgggcacaggggtggagcgcagggcagccccagtcaccacgagctgtttcatttgtgtaaatacgatgctgaattttatgaggctgagttaagagtgggcactgacgggcccctaatatgtgacatgacgatttggcatagatagggatgtgagagtggagtaccttcctttctcaagtctcgagatgccagtgaaaccagtattccctgacttgggtttcacactttatcgaccaccccatggggtcctgtgtagcctttggccacgcactgacactgcccaggccaagcaaaagcagagtgtggttaagagacaagggtctatgtcatcatcccttttgcttatggtagtgggctaacataacagcccctttctcaagcagagacctggcccctgggccagccagatggaagggcctatcttagccagctggagcttaagccaaacctgttctgtcccactggccagccatctttgctcacatggaaattcaaatgccattcaaaggccactggtgctttatttttctatctgctgagtaaactgaaatgagatgggtcccaaccaccactgtaattttcaagcctattttatttgtacctgtaaatactgtacagctaatatatatatatatatatatatatgtgtgtgtgtgtgtgtgtgtatatgtgtttatagagatacacacacatatatatgtgtgtatatatatacacatacatatatatacacacacgcatttgcacagacacacacatatatcaattctcatgagtgtattataatctctggtgggggcaagtgtctggaaggcctgaggggcacttcagatgagaatggagaggtagggagccaggtgcagcaggatccctcaaatcaataaagcattaccagagat

SEQ ID NO: 186677 - DNA, 4841 bp, Homo sapiens
  Payload ID: 16759
  Gene Symbol: STARD8
  Gene Name: StAR-related lipid transfer (START) domain containing 8
  Uniprot ID: Q92502
  ENST ID: ENST00000374599
  CDS Start-End: 116-3427
agggaccgggctggctctcgccgagccccgggcctcttttagcctcgtccccagagagggaggagccggtgcccggcacagccccgccggccctagaagctccccacgcgccaccatgcctctgctggacgttttctggtcttgcttcaggaaggtgaagtgcttcccattgctgcaggtgaagaagaacgctgaagccgaggccaaaagagcatgtgagtggcttcaagcaacaggattccctcagtatgtgcagctttttgaagaaggttcgtttcccctggatattggctctgtgaagaaaaaccacggttttctggacgaggactctttgggggccctgtgtaggaggctgatgaccttgaataattgtgcctcgatgaaactggaggttcattttcaaagcaagcagaatgaagactcagaagaggaagagcagtgtaccatcagtagccactgggccttccagcaggaaagtaagtgctggtctcctatggggtcctctgatctgttggccccaccgagccctggcctgccagcgacctcaagctgtgagagcgtcctcaccgagcttagtgccacctctctgccagtcatcaccgtgagcctaccacccgagccagcagacttgcccttgccaggccgtgcccccagctcgagtgaccggcccctcctcagccccacccagggccaggagggtccccaggacaaagccaagaagcgccatcgtaaccgtagcttcctcaagcaccttgaatctctgaggcggaaggaaaagagtggcagccagcaagcagagcccaagcatagtccagccacctcagagaaggtctccaaagcctcatctttccgcagttgtcgtggcttcctctcagctggattttacagggccaagaactgggccgccacctcagccggtggcagtggtgccaatactcggaaggcctgggaggcctggcctgtggcctcgttccggcatcctcagtggacacaccggggtgattgcctggtgcacgttcctggggaccacaaaccaggcacattccctcgctccctgtccattgagagcctgtgtcctgaggatggacaccgcctggcagactggcagccaggtaggcggtggggctgtgaggggcgccggggctcctgtggctcaacgggcagccatgccagcacgtatgacaacttgcctgagctgtacccagctgagcctgtaatggttggggctgaggctgaagatgaagatgatgaggagagtgggggcagctatgctcacctagacgacatcctccagcacgtgtgggggctacagcaacgagtagagctgtggtctcgggccatgtacccagacctggggcctggagatgaggaagaggaggaggccacttcatcagtagaaatagccacagttgaggtcaaatgccaagctgaggctctcagccagatggaggttccggcccatggagagtccccagcctgggcccaggctgaagtccagccagcagtcctggctccggctcaggctccagctgaggctgaaccagtggcacaggaagaggctgaggccccggccccagccccggccccggccccagcccaggacagtgagcaggaggcacattcaggcggggaacccacctttgcctctagcctgtctgtggaagaaggacactccatttctgacactgtggcctcctccagcgaacttgacagtagtgggaactccatgaatgaggctgaggctgcggggcccctggctggactccaggcatcaatgccccgtgaacggcgcgattcaggtgttggggcctcacttaccagaccctgcaggaagctccgttggcatagcttccagaactcccatcgtcccagcctcaactcagagtcgctggagatcaaccggcagtttgcaggccagatcaacctcctgcacaagggctcactgctgcggcttaccgcgttcatggagaagtacactgtgccccacaagcagggctgggtctggtcaatgcccaagttcatgaggaggaacaagaccccagattaccggggacagcacgtatttggggtgccacccctcatccacgtgcagcgcacgggccagccactgccacagagcattcagcaagccatgcgctacttgcgcagccagtgcctggaccaagtaggcatcttccgcaagtctggggtcaagtccaggatccagaacctgcgtcaaatgaatgagacctcgcctgacaatgtctgctacgagggccagtcagcctacgacgtggctgacctgctaaagcagtatttccgggacctgcctgagcccatcttcaccagcaagctcaccaccactttcctccagatctaccagctcctccccaaggatcagtggttggcagcagcacaagccgccaccttgctgctccccgatgagaaccgagaggtgctacagaccctgctctacttcttaagtgacattgcctctgccgaggaaaaccagatgacagcaggcaacctggcagtgtgcctggcgccctccatcttccacctcaatgtctctaagaaggatagcccctctcccaggatcaagagcaaacgcagcctcattggcaggccaggccctagggacctgagtgacaacatggcagccacccagggcctgtcgcacatgatcagtgactgcaagaaacttttccaggtgccccaggacatggtgctgcagctgtgcagctcctacagcgcagctgagctcagccctcccggcccagccctggctgagctgcgtcaggcccaagctgcaggggtaagcctgagcctctacatggaagagaatatccaggacctgctgcgtgatgctgctgagcgcttcaagggctggatgagcgtgccagggccccagcacacggagctggcttgcaggaaggcaccggatgggcaccccctgcggctatggaaggcatccacagaggtggcagcccccccagctgtggtgctgcatcgtgttctccgggagcgggccctctgggatgaggatctgctgcgggcccaggtgctggaagccctgatgccgggtgtggagctgtaccactatgtcaccgacagcatggcaccccatccctgccgcgactttgtggtgcttcggatgtggcgctctgacctgcctcgtgggggttgcctgcttgtctcccagtccctggatccggaacaacctgtgccagagtcgggtgtgcgagccctcatgctcacatcccagtacctcatggagccttgcggcttgggccgctctcggctcacacacatctgccgggctgacctcaggggccgttctcctgactggtacaacaaagtctttggacacctgtgtgccatggaagtggcaaagatccgggactccttccccaccctgcaggcagcgggccctgagacaaagctgtgagccttgggctggtcccagggtggcaccacccaggccccctgggcaccaagggagcgagggggaataagagcagggcagccccctgggtgccgctgtcaggagcagagccaggcccaggtggctccagctgcctgtcctgtcccctttcctaaagctcctctgcacatagaggggagaaaaagagaatttaggcaactccactcccccttcacccccaaccctgtattctactctcccgaaaagagaagagaatcgcatgagtagcaagactgctgccaccagccacctgcttgtgaggccgccacttggcatgaagcctccacagctccccgcctgcaggggcaaagaggtcgacagcaatgtgtgatcccagctctctgccagactgagagggcaagccgtcttgtttgctgcaaggatgcttttgaggttggacaggaggttctggtcctgcctttggggccaacgctggctctgaagtgtctttttcagaggaattggactggagtgaatgggcacaggggtggagcgcagggcagccccagtcaccacgagctgtttcatttgtgtaaatacgatgctgaattttatgaggctgagttaagagtgggcactgacgggcccctaatatgtgacatgacgatttggcatagatagggatgtgagagtggagtaccttcctttctcaagtctcgagatgccagtgaaaccagtattccctgacttgggtttcacactttatcgaccaccccatggggtcctgtgtagcctttggccacgcactgacactgcccaggccaagcaaaagcagagtgtggttaagagacaagggtctatgtcatcatcccttttgcttatggtagtgggctaacataacagcccctttctcaagcagagacctggcccctgggccagccagatggaagggcctatcttagccagctggagcttaagccaaacctgttctgtcccactggccagccatctttgctcacatggaaattcaaatgccattcaaaggccactggtgctttatttttctatctgctgagtaaactgaaatgagatgggtcccaaccaccactgtaattttcaagcctattttatttgtacctgtaaatactgtacagctaatatatatatatatatatatatatgtgtgtgtgtgtgtgtgtgtatatgtgtttatagagatacacacacatatatatgtgtgtatatatatacacatacatatatatacacacacgcatttgcacagacacacacatatatcaattctcatgagtgtattataatctctggtgggggcaagtgtctggaaggcctgaggggcacttcagatgagaatggagaggtagggagccaggtgcagcaggatccctcaaatcaataaagcattaccagagatgca

SEQ ID NO: 186678 - DNA, 4864 bp, Homo sapiens
  Payload ID: 16759
  Gene Symbol: STARD8
  Gene Name: StAR-related lipid transfer (START) domain containing 8
  ENST ID: ENST00000523864
  CDS Start-End: 215-373
ggccttccaggaggcgggaggcgcccgctgtcgaggcagctgagccccggcaaccgctgctctccgcctctcccctcgcggggccggctcatggagcgcagggaccgggctggctctcgccgagccccgggcctcttttagcctcgtccccagagagggaggagccggtgcccggcacagccccgccggccctagaagctccccacgcgccaccatgcctctgctggacgttttctggtcttgcttcaggaaggtgaagtgcttcccattgctgcaggtgaagaagaacgctgaagccgaggccaaaagagcatgtgagtggcttcaagcaacaggattccctcagtatgtgcagctttttgaaggaggctgatgaccttgaataattgtgcctcgatgaaactggaggttcattttcaaagcaagcagaatgaagactcagaagaggaagagcagtgtaccatcagtagccactgggccttccagcaggaaagtaagtgctggtctcctatggggtcctctgatctgttggccccaccgagccctggcctgccagcgacctcaagctgtgagagcgtcctcaccgagcttagtgccacctctctgccagtcatcaccgtgagcctaccacccgagccagcagacttgcccttgccaggccgtgcccccagctcgagtgaccggcccctcctcagccccacccagggccaggagggtccccaggacaaagccaagaagcgccatcgtaaccgtagcttcctcaagcaccttgaatctctgaggcggaaggaaaagagtggcagccagcaagcagagcccaagcatagtccagccacctcagagaaggtctccaaagcctcatctttccgcagttgtcgtggcttcctctcagctggattttacagggccaagaactgggccgccacctcagccggtggcagtggtgccaatactcggaaggcctgggaggcctggcctgtggcctcgttccggcatcctcagtggacacaccggggtgattgcctggtgcacgttcctggggaccacaaaccaggcacattccctcgctccctgtccattgagagcctgtgtcctgaggatggacaccgcctggcagactggcagccaggtaggcggtggggctgtgaggggcgccggggctcctgtggctcaacgggcagccatgccagcacgtatgacaacttgcctgagctgtacccagctgagcctgtaatggttggggctgaggctgaagatgaagatgatgaggagagtgggggcagctatgctcacctagacgacatcctccagcacgtgtgggggctacagcaacgagtagagctgtggtctcgggccatgtacccagacctggggcctggagatgaggaagaggaggaggccacttcatcagtagaaatagccacagttgaggtcaaatgccaagctgaggctctcagccagatggaggttccggcccatggagagtccccagcctgggcccaggctgaagtccagccagcagtcctggctccggctcaggctccagctgaggctgaaccagtggcacaggaagaggctgaggccccggccccagccccggccccggccccagcccaggacagtgagcaggaggcacattcaggcggggaacccacctttgcctctagcctgtctgtggaagaaggacactccatttctgacactgtggcctcctccagcgaacttgacagtagtgggaactccatgaatgaggctgaggctgcggggcccctggctggactccaggcatcaatgccccgtgaacggcgcgattcaggtgttggggcctcacttaccagaccctgcaggaagctccgttggcatagcttccagaactcccatcgtcccagcctcaactcagagtcgctggagatcaaccggcagtttgcaggccagatcaacctcctgcacaagggctcactgctgcggcttaccgcgttcatggagaagtacactgtgccccacaagcagggctgggtctggtcaatgcccaagttcatgaggaggaacaagaccccagattaccggggacagcacgtatttggggtgccacccctcatccacgtgcagcgcacgggccagccactgccacagagcattcagcaagccatgcgctacttgcgcagccagtgcctggaccaagtaggcatcttccgcaagtctggggtcaagtccaggatccagaacctgcgtcaaatgaatgagacctcgcctgacaatgtctgctacgagggccagtcagcctacgacgtggctgacctgctaaagcagtatttccgggacctgcctgagcccatcttcaccagcaagctcaccaccactttcctccagatctaccagctcctccccaaggatcagtggttggcagcagcacaagccgccaccttgctgctccccgatgagaaccgagaggtgctacagaccctgctctacttcttaagtgacattgcctctgccgaggaaaaccagatgacagcaggcaacctggcagtgtgcctggcgccctccatcttccacctcaatgtctctaagaaggatagcccctctcccaggatcaagagcaaacgcagcctcattggcaggccaggccctagggacctgagtgacaacatggcagccacccagggcctgtcgcacatgatcagtgactgcaagaaacttttccaggtgccccaggacatggtgctgcagctgtgcagctcctacagcgcagctgagctcagccctcccggcccagccctggctgagctgcgtcaggcccaagctgcaggggtaagcctgagcctctacatggaagagaatatccaggacctgctgcgtgatgctgctgagcgcttcaagggctggatgagcgtgccagggccccagcacacggagctggcttgcaggaaggcaccggatgggcaccccctgcggctatggaaggcatccacagaggtggcagcccccccagctgtggtgctgcatcgtgttctccgggagcgggccctctgggatgaggatctgctgcgggcccaggtgctggaagccctgatgccgggtgtggagctgtaccactatgtcaccgacagcatggcaccccatccctgccgcgactttgtggtgcttcggatgtggcgctctgacctgcctcgtgggggttgcctgcttgtctcccagtccctggatccggaacaacctgtgccagagtcgggtgtgcgagccctcatgctcacatcccagtacctcatggagccttgcggcttgggccgctctcggctcacacacatctgccgggctgacctcaggggccgttctcctgactggtacaacaaagtctttggacacctgtgtgccatggaagtggcaaagatccgggactccttccccaccctgcaggcagcgggccctgagacaaagctgtgagccttgggctggtcccagggtggcaccacccaggccccctgggcaccaagggagcgagggggaataagagcagggcagccccctgggtgccgctgtcaggagcagagccaggcccaggtggctccagctgcctgtcctgtcccctttcctaaagctcctctgcacatagaggggagaaaaagagaatttaggcaactccactcccccttcacccccaaccctgtattctactctcccgaaaagagaagagaatcgcatgagtagcaagactgctgccaccagccacctgcttgtgaggccgccacttggcatgaagcctccacagctccccgcctgcaggggcaaagaggtcgacagcaatgtgtgatcccagctctctgccagactgagagggcaagccgtcttgtttgctgcaaggatgcttttgaggttggacaggaggttctggtcctgcctttggggccaacgctggctctgaagtgtctttttcagaggaattggactggagtgaatgggcacaggggtggagcgcagggcagccccagtcaccacgagctgtttcatttgtgtaaatacgatgctgaattttatgaggctgagttaagagtgggcactgacgggcccctaatatgtgacatgacgatttggcatagatagggatgtgagagtggagtaccttcctttctcaagtctcgagatgccagtgaaaccagtattccctgacttgggtttcacactttatcgaccaccccatggggtcctgtgtagcctttggccacgcactgacactgcccaggccaagcaaaagcagagtgtggttaagagacaagggtctatgtcatcatcccttttgcttatggtagtgggctaacataacagcccctttctcaagcagagacctggcccctgggccagccagatggaagggcctatcttagccagctggagcttaagccaaacctgttctgtcccactggccagccatctttgctcacatggaaattcaaatgccattcaaaggccactggtgctttatttttctatctgctgagtaaactgaaatgagatgggtcccaaccaccactgtaattttcaagcctattttatttgtacctgtaaatactgtacagctaatatatatatatatatatatatatgtgtgtgtgtgtgtgtgtgtatatgtgtttatagagatacacacacatatatatgtgtgtatatatatacacatacatatatatacacacacgcatttgcacagacacacacatatatcaattctcatgagtgtattataatctctggtgggggcaagtgtctggaaggcctgaggggcacttcagatgagaatggagaggtagggagccaggtgcagcaggatccctcaaatcaataaagcattaccagagatgcactttaa

SEQ ID NO: 186679 - DNA, 15567 bp, Homo sapiens
  Payload ID: 16760
  Gene Symbol: STARD9
  Gene Name: StAR-related lipid transfer (START) domain containing 9
  Uniprot ID: Q9P2P6
  ENST ID: ENST00000290607
  CDS Start-End: 58-14160
gggggcctgggatgctgccgctgagctgacccgctggacttgggttgtggcagacggatggcgaacgtgcaggtcgccgtgcgggtccggccgctcagcaagagggagaccaaagaagggggaagaattattgtggaagttgatggcaaagtggcaaaaatcaggaatttaaaggtggacaatcgaccagatggctttggggactcccgggagaaggttatggcatttggctttgattactgctactggtcagtcaacccagaggatccccagtatgcatctcaagatgtggttttccaggatttagggatggaagtactgtctggagttgccaaaggctataacatatgcctttttgcttatggacagacaggctctgggaagacatataccatgctggggaccccagcctctgttgggttgacaccacggatatgtgagggtctcttcgtcagggagaaagactgtgcctcactgccttcctcctgtaggataaaagtaagttttctagaaatctataatgaacgggtgcgggatctgttgaagcaatctggtcaaaaaaagtcctataccctgcgggtcagggagcatccagagatggggccctatgtacaaggtttatctcaacatgtagttaccaattataagcaagtaatccaactcttggaggagggaattgcaaacagaatcacagcagccacccatgttcatgaggccagcagcagatcccacgccattttcacgatccactacacgcaggcaatcctggagaacaacctcccttctgaaatggctagcaagatcaaccttgtggacctagcaggcagcgaaagagcagatcccagttactgtaaggaccgcattgctgaaggagccaatatcaacaagtcccttgtgactctaggaattgtcatctccaccttagcccagaactcccaagttttcagcagctgccagagcctcaacagctcagtcagcaatggtggtgacagtgggatccttagctctccttctgggaccagcagtggaggggcaccctcccgaaggcagtcttatatcccataccgagactctgtgttgacctggctgctgaaggacagccttggaggcaactctaaaaccatcatggttgccacggtgtctcctgcacacactagctacagtgagaccatgagcacactgagatatgcatccagtgccaaaaacattatcaacaagccacgagtaaatgaggatgcaaacttaaaactgattagagaactcagagaagagattgaaagactgaaagccctgctgctgagctttgaactgagaaacttcagttcattgagtgatgaaaacctgaaggagctggttctccaaaatgaattgaagatagaccagctgactaaagactggacccagaagtggaatgattggcaggccctcatggagcattacagtgtggacatcaacaggaggagggctggggtggtcatcgactccagcctgccacacttgatggccttggaggatgatgtgctcagcacaggtgttgtgctctatcatctcaaggaagggacaacaaaaataggaaggattgactcagaccaggaacaggacattgtcctgcagggtcagtggattgagagagaccactgcactatcaccagtgcctgtggtgtagttgttctacgacctgcccgtggggcccgctgtacagtcaatggccgggaggtcactgcctcctgccgtctgactcaaggagctgtcataaccctggggaaggcacagaagttccgattcaaccacccagcagaggctgctgtcctgcggcagcgaaggcaggttggagaggctgctgctggtcgtggctcgttggagtggctggatttggatggagatctcgctgcctcccggctgggtctctcccctttgctttggaaggaaaggagagcgcttgaagagcaatgtgacgaggaccatcagacaccgagggatggagagacatcccacagggcccagattcagcagcagcagagctacgtagaggatttgaggcatcaaatcctagcagaagagattcgagctgcgaaggaactggaatttgaccaagcttggattagccagcagattaaagaaaaccagcagtgtctgctcagagaagagacctggctggccagcttgcaacagcagcagcaagaagaccaggtagcagagaaagaacttgaggcatctgtggcacttgatgcttggcttcagacagatcctgagattcagccatccccatttgtccaaagtcagaaaagggtggtgcacctgcagctcctgcggagacacactcttcgggcagcagagcggaatgtccggcggaaaaaggtctcattccagctagagagaatcatcaaaaagcagaggctgctggaggcccagaagagactggagaagctcacgacattgtgctggctccaggatgacagcacccaggagcccccataccaggtcctcagccctgatgccacagtcccacggcctccatgtagaagcaaattgacgagttgcagttctttgagcccccaaagactctgcagcaagcacatgccccagctacacagcattttcctaagttgggatccctctaccacattgccacctaggcctgaccctacacaccaaacatcagagaaaacatcatcagaagagcatttgccacaggctgcttcctaccctgcaaggacagggtgcctccgcaagaacggcctgcattcctcaggtcatgggcagccctgcacagccagagcagccttggccaggaagggagcctcagctccagacgcttgcctcaccatgagtcccaactctgttggcatccaggaaatggagatgggggttaagcagccccatcagatggtgagccagggcttagcatctctgaggaaatcagctaacaaactaaagccaaggcatgagccaaagatcttcacctctactacccagaccagaggggcgaagggactagcagaccctagccacacacaagctgggtggcgaaaagaagggaaccttgggacccacaaggctgctaagggagccagttgcaattccttgtatcctcatggacccaggcagactgctgggcacggaaaggcagtcaagactttttggacagaatacaaaccaccttctccaagcagggcatcaaaaaggcatcagagggttctggcaactagggtcagaaatattaccaaaaagtcctctcacttgcctcttggcagtcctttgaagagacaacaaaatacaagggacccagacaccatggtcccactcacagatttcagcccagtaatggatcattcaagagaaaaagacaatgatttatctgacacagatagcaactactcattggattctctctcatgtgtctatgccaaagccctgatagagccactgaagccagaggagaggaaatgggatttcccagagccagagaactctgaaagtgatgacagccaactatctgaggactcactggctgagaagaggtaccaaagccccaaaaacaggctagggggcaatcgtcccaccaacaaccgtggccaacccaggaccagaactagagcttctgtgaggggcttcactgcagcctcagacagtgacctacttgctcaaactcataggagcttctccttggatagcctgattgatgcagaggaagaactgggggaagatcagcaagaagaacctttccctggttcagctgacgagatacccacagagactttttggcacctggaggactctagtctgcctgtaatggaccaagaggcaatatgcaggcttggtcccatcaactacagaacagcagctaggctggatgccgtcctgccaatgagcagttcgttttaccttgatcctcagttccaaccccattgtgagctccaaccccattgtgagctccaaccccattgtgagctccagccccattgtgagcaggctgaatcacaggtagagccaagctactctgaacaagccgactctctccaaggcatgcagctttcaagagagagcccactgatgtccatggattcctggttttcctgtgactctaagatcaaccccagcagccccccaggaatagtgggttctttatgtccaagtcctgatatgcaggaatttcactcctgtaagggggagaggcctggatactggccaaatactgaggaactaaagccatcagatgcagaaacggttctgccatatagctccaaactgcaccaaggcagtactgagctcctctgcagtgcaagagatgagcacacagcctctgctgctgatacgtctaggctgtctctctggggaattcaaaggcttattcaaccaggagctgatggcacctttcagggcagatgtatccctgacatgacccagcagggcagctctgaagcatcccacaattctagcgtatcaaacgtgctggctgcctctgccaccaccttgactcatgtaggcagcacccatgaaagggattggtctgcccttcagcagaagtacctccttgaactctcttgtcctgttttggaggccataggagcacccaagccagcttacccctaccttgaggaagactctggttccctggcccaagcttctagcaaaggaggagatactctattgccagttggccctagggtatctagcaatctgaatctcaacaactttccagtccatctgtccagaatcaggcgtttgagggcagagaaagaacaggacagtttaaatgccaaattagaaggtgtttcagatttctttagcactagtgagaaagaggcgagttatgacgaaacttattcggcagacttagaatcattgtctgcttctcgatctacaaatgcacaggtctttgcaacagagaacgcgataccagattccatgacagaagcatgtgaagtcaagcagaacaacttggaagaatgccttcagagttgcaggaaacctggactgatgacttcctctgatgaggattttttccagaagaacgcttgtcacagtaatgtcactacagccaccaaagcagaccattggtcccaaggctgggctcctctcaggaaaaatagtgcagtccagccagggcaattaagtcccgacagccactacccactagaggaagagaagacagattgccaggagagctctaaggaagcagttagaagacacataaatgtttcctttgcccttccttcaggtccagagctataccttcactctgctccctggaatccattgtcatcttccctgcagcccccactcttggaaacattctatgtgaccaaaagcagggatgccctgacagaaactgccttagagattccagcttgcagagaagtaagggtaccctccccaccccccagggaagcctggggctttggtcacaaccaccaagctctccaaggtgcttatttgaagaataatttgccagtgctgttacaaaaccagaattctaagattgcctcatctcagcaggtcacagctgagataccagttgatctgaataccagggaagtcatcagagaatcaggtaaatgccctggaaatattacagaagaaagccatgattcagtttattcttctgttactcagaacagacattttctcccctctaccagcacaaaagtatgtgaatttgaaaaccaagttgtaattttaaataaaaaacacagttttccagcacttgagggaggagaggtcactgctcagtcctgttgcggtgcttcctcagacagcactgagtctgggaagtctctcctctttcgtgaatctgaggcacgagaggaagaagagctggatcagaatacggttctgaggcagaccatcaatgtaagccttgagaaagacatgccaggggaaagtgctgtttctttgaaatccagatcagtagatcgtagagtaagcagcccagtgatggtggcccagggtggtggcccaacccctaagtgggaagggaaaaatgaaactgggcttcttgaaaaaggtcttcgtcccaaagatagctcagaagagtttaagcttccaggtacaaagcctgcatatgaaaggttccagttagttgcatgccctcaggaaagaaaccccagtgaatgcaagtcacaagaaatgttaaatcccaacagagaaccttctggaaagaaacagaataaaagagttaataatactgatgaaatggctaggctaattaggagtgtaatgcagctggaaaatggcatcttagaaattgaatctaagcagaataagcaggttcatgcttcccacacaccaggaaccgataaggagttggtgttccaggaccagaaggagcaggagaagactgaccatgcctttaggccagacagctctggaaaccctttgccctctaaggatcagccatcttctccaagacagacagatgatactgtctttagggatagtgaagctggagcgatggaggttaacagcattgggaaccatccccaggtccagaaaatcaccccaaaccccttcaggtcaagggaaggtgtacgagagagtgaacctgtgagagagcacacccacccagctggatcggacagacctgccagggatatttgtgattctttagggaaacacacaacttgcagagagttcaccaacacttctcttcacccacagagaatgaaagcattggctagagctctgccattgcaacccaggctagagaggtcttctaagaataatggccagtttgtaaaagcatcagcaagtctcaaagggcagccttggggcttaggaagtcttgaggaattggagactgtgaaaggttttcaggaaagccaagtagctgaacacgtaagtagttccaaccaagaagagccaaaagctcaaggtaaagttgaagaaatgcctatgcaaaggggaggcagccttcaggaagaaaataaagtgactcagaaatttcctagtctcagccagctttgtagggacacgtttttcaggcaggaaactgtcagcccattactaagccggacagaattctgtacagctcctcttcaccaagacctgagtaataccttgcccttgaattctccaaggtggccaagaaggtgtcttcatgtacctgttgctctaggcatctcttcacttgactgtgtgctggatctcacaatgttgaaaattcataacagtcccttggtaactggagtagagcatcaggaccagagtacggagaccagaagccacagccccgaaggaaatgttagagggcgttcctctgaggcacacactgcctggtgtgggtctgtgcgatccatggccatgggatctcatagtcaatctggtgtaccagagagcattcctctggggacagaggacaggatctcagcaagcaccagcccccaagaccatggaaaggacctcagaatcaccttgctgggtttcagtaccagtgaagattttgcttctgaagccgaggtggctgtacaaaaagaaataagagtcagttcactgaacaaggtctctagccagcctgaaaagagggtcagcttctccttggaagaggatagtgaccaagccagcaagccaaggcagaaggcagagaaggagactgaggacgtcggactgaccagcggtgtttccttagcacctgtttccctgccgagggtgcccagtccagagcctaggctgttggagccctctgaccatgcatccatgtgcctggccatcttggaggagatcagacaggcaaaggcccagagaaagcagcttcatgactttgtggccaggggcacagtcctttcttactgtgaaactttactagaacccgaatgttcttcaagggttgctggcaggcctcagtgtaaacaaatagaccagtcatcatcagaccagaccaggaatgagggtgaagcaccgggatttcatgtggcatctctatctgctgaagcagggcagatagatctgttacctgatgagaggaaagtccaggccacatctctgtctgcagacagctttgaatctctgcccaatacggaaactgacagagagccatgggatcctgtgcaggctttctcccatgctgctcctgctcaagacaggaaacgtcgtactggagaactgaggcagttcgcgggagcaagtgaaccatttatatgtcactctagttcttctgaaatcatagagaaaaagaaagatgcaaccagaacaccttcctcagctgatcctttggccccagacagtcctcgttcttcagcacctgtggaggaggtcaggagggtagtatcaaagaaggtagtggctgccttaccttctcaggccccttatgatgatcctagagtgactctgcatgagctaagtcagtcagttccgcaggagactgcagagggcataccccctggcagtcaggacagcagcccagagcatcaggaacccagaactctagacaccacatatggagaagtttcagataatttgttagtgactgcacagggagaaaaaacagcccattttgaaagtcagtctgtgacctgtgatgttcagaattctacaagtgcctcagggcctaagcaagaccatgtccaatgccctgaggcttctactggctttgaagaaggtagggcaagtcccaaacaagataccattctgcctggagctctgacaagggttgcactggaagctcccacacagcagtgtgtgcagtgtaaggagagtgttgggtctgggttgacagaagtctgcagggctggcagcaaacattccaggccaattccactgccagatcaaagaccaagcgcaaatcctgggggaattggggaggaagccccatgtagacacccaagggaagctttagatggccctgtcttctcaaggaaccctgaaggcagcaggactctcagcccgtctagagggaaagagagcagaactcttccttgccgacagccatgcagttctcaacctgttgctactcatgcttattcctcccattcctctactttactgtgttttagagatggtgacctagggaaggagcctttcaaggctgccccacatactatccacccaccctgtgtagtaccttccagggcctatgaaatggatgagacaggagagatctctaggggacctgatgtgcacttgacacatggccttgagcccaaagatgttaacagggaatttaggctaacagagagcagcacttgtgagccttctactgtggctgctgtcctatctcgagctcaaggctgcagatccccttctgctcctgacgtgaggacaggttccttcagccactcagctactgatggaagcgtggggttaataggggttcctgagaaaaaggttgctgagaagcaagcaagcacagaacttgaggctgcctctttccctgcaggcatgtactctgagcccctgaggcagtttagggacagctctgtaggtgaccagaatgcacaggtgtgtcaaaccaatccagaaccacctgcaacaactcagggaccacacaccctggatttaagtgaagggtctgctgagagcaagttggtggtagagccacagcatgaatgtttagaaaataccactagatgttttttggaaaagccacaattttccactgagttgagggatcacaatcgcttggattcccaagccaagtttgtagcaaggttaaaacatacctgcagcccccaggaagacagtccctggcaggaagaagagcagcacagagaccaggcttcaggtggtggagaaggcttcgcccagggtgtgaatccccttcctgatgaagatggcttagatggctgtcagattttagatgctgggagagaggaggtggctgtggccaagcctcctgtgtccaagattttatcacagggcttcaaagacccagccactgtgtccttgaggcaaaatgaaacaccgcagcctgctgctcagaggagtggccacctctacactggcagagagcagccagcacccaaccacaggggctcacttcctgtgactacaatcttctctggccccaaacactccaggtcctcccccacaccacagttctcagttgtcggctcttctcgttctcttcaggagctgaacttgagtgtggagcctccttcccctacagacgaagatacacaggggcctaacagattgtggaacccacatctcaggggctattcctcaggaaagtcagtggcaagaacatctctgcaggctgaggacagcaatcagaaagcctcatctcgcttggatgatgggactaccgatcacaggcacctgaagcctgccacccctccttatccaatgccttccactctctcacacatgccaacccctgatttcacgaccagctggatgtctggtactttggaacaagcccaacagggaaagcgagagaaactgggtgtccaggttaggccagaaaattggtgctctcagatggacaaaggaatgctgcactttggctccagtgacatcagtccctatgcgctgccgtggcgtccggaggagcctgcacgtatcagctggaagcagtatatgtctggcagtgcagtcgatgtttcctgcagccagaagccccaggggctgacactatcaaatgtggcccggtgctccagcatggacaatggcctagaagaccagaactcccctttccactcccacctcagcacttacgccaatatttgtgatctgtcaaccacacacagcagcactgagaatgcccagggttcaaatgaggcctgggaagtattccgagggagttcttcaattgccttaggagacccccacatcccgacgagccctgaaggagtagcccccacttcgggtcatgacagaaggcctcagttcaggggcccttctggtgaagcagactgtctgaggagtaagccccccttggccaaaggaagtgctgcaggtccagtggatgagattatgctgctgtatccatcagaggcaggctgccctgtgggacagaccaggacgaacacattcgaacagggcacacagaccctcggcagcaggcgccactggagcagcactgacatctcctttgctcagcctgaagccagtgcagtatcagcctttgatctggcctcatggaccagcatgcacaatctgtctctccacctctcacagctcctgcacagtacctcagagctgcttgggagtctctcccagccagatgtggccagaagggagcagaacaccaagagggacatcccagataaagccccacaggccctgatgatggatggctctactcagaccactgtggatgagggcagccagactgacctcaccttacccaccctgtgcctccagacttcagaggctgaacctcagggagccaatgtgatccttgaagggctaggctcagatacctcgactgtgtctcaagaagagggagatgtgccaggggtacctcagaagagagaggcagaggaaacagcacagaaaatggctcagctcctctatcttcaggaagaaagcactccctacaagccccagagcccttcaataccctcatcccacttgaggtttcagaaagcccccgttgggcagcatcttccttctgtgagcccctcagtttctgatgctttcctgcctcccagctcccagccagaggagtcatattgcttagttgtcagcagtcccagtcccagctcccctcattccccagggctctttcccagtacttccgagtatcctggggactccagggtccagaagaagctgggccccacaagtgctttgttcgtggacagggcctcctccccaatcctcactcttagtgccagcacccaagagccgggtctttccccaggctctttgaccctctcagccccttcaactcaccctgttgaaggccaccagaagcttgactccagcccagaccctgttgatgccccaaggactccaatggataattattcccaaaccactgacgagttaggtggctcccagagaggtagaagttccttacaaaggagtaatgggagatccttccttgagttgcactccccacacagcccacagcagagtccaaaactccaatttagtttcttagggcagcaccctcagcagcttcagcccaggacaactatcggggtccaaagcagactgctgccaccaccactgaggcacaggagccaaaggctgggcaacagctttgtgcctgagaaggtggcttccccggagcattgcccactgagcggtagggagccaagtcagtggcagagcaggacagaaaatggaggtgagagttcagcatctccaggggaaccacaacgcactctggaccgaccttcttcatggggaggcctccagcacctcagcccctgccctgtctctgagttgactgatactgcagggctccgaggttctgccttgggcctccctcaggcctgccaacctgaggagttactgtgcttcagttgccagatgtgcatggcccctgagcaccagcaccacagtctgagggacctcccggtgcataacaaatttagtaactggtgtggggttcagaagggctcacctggggggttggacatgactgaggaggagctgggggccagcggtgatctcagctctgaaaagcaggaacagagtcccccacaacctcctaatgaccacagccaggattctgagtggtccaagagggagcagatccccctgcaagttggggcccagaacctctcactcagcgtggaactcacagaagcgaaactgcaccatggctttggggaggccgatgccctgctccaggtgctgcagagtgggacaggggaggcgcttgctgctgatgaacctgtgacatccacctggaaggagctctatgcacggcaaaaaaaggccattgagaccctcaggagagagcgggctgagcgacttgggaacttctgccggacgcgaagccttagccctcagaaacaactgagcctcctgcccaacaaagatctcttcatctgggatcttgacttgcccagcagacgccgagaatacctgcagcaactgaggaaggatgttgtggagaccaccaggagcccagagtcagtgtcaaggtcagctcacacaccctctgacatagagttgatgctgcaagactaccagcaggcccatgaggaggccaaggtggagattgcccgggcccgagaccaactgcgggagcggactgaacaagagaagctgagaatccaccagaagatcatttcccagctattgaaggaagaggataaactacataccttggccaattccagctccctgtgcaccagctctaatggaagcctctcgtctggcatgacctctggctataatagcagcccagccttgtcaggccagctccagttcccagagaatatggggcatacaaacttgcctgattccagggatgtatggataggggatgagcgaggaggccattctgcagtgaggaagaactctgcctacagccacagagcctccctgggcagttgctgctgttcaccatccagtctgtccagcttggggacctgcttttcctcctcctaccaggatttggccaagcatgtcgtggacacttctatggctgatgtaatggctgcttgttcggataatttgcacaacctcttcagctgccaggcaactgctggctggaactatcagggtgaggagcaggcggtgcagctttactacaaggtgttttctcccactcggcatggcttcctgggggcaggtgtggtgtcccagccgctgtctcgtgtgtgggcggctgtcagtgaccccactgtgtggcccctgtattacaagcccatccagacagcaaggctgcatcagcgagtgaccaacagcatcagcctggtgtacttggtgtgcaacaccaccctgtgcgcactgaagcagccacgggatttctgttgtgtctgcgtggaagccaaagagggtcacctgtctgtcatggcagcccagtctgtgtatgatacatccatgccaagacccagcagaaaaatggttcgcggggagatcctgcccagtgcctggatcttgcagcccatcactgtggaagggaaggaagtcaccagagtcatctacttggcccaggtggaacttggtgctccaggcttcccacctcagctcctgagctctttcatcaaacggcagccactggttatagccagactggcttccttccttggtaggtagcatctcaccgtcaagatggtgctgctgagatgcaggcccaggctgctcaagagagacactgtggcagctccttgttactttccataccacagtgcaggaaaagctgatgctacctgctgtggccgattggggcagacagcactggcccagggatgctagcaaagcccagtcagtacttggtcacagctggcaccagtgcagagcaaacggcctgagctcctggcccagactatccagagtgaatgcagctccgctcaccttttggatttctcacctttctttcctgtttctgggactctgcggcagacaggacacttaaggaccaggactgggcacagccagcagagccggggactgcagtgctttggcaaggtgcttccgcaggctggtagggaagcaggcagccactggccaagactctgttctgaatctacctcctctagcattcagctctactgtgtgatgggacgttaaaaataccaaaacagaaagagggtttaaaaaacagctgcacaaaccagaacaccgattcagaatcttttctccctcttgagtttttgcaaaatactttattattgatttttgctttttttctccctttccctcccaggagaagacatttgggtcttggcctgaggcaggggtgttgagcgatgatgctctgatatggagctgtcactctagagctcggtcagatggaagacactatagaaccaggttggacagatttggggtcagggttggaggctgagttcttttgaggactggttggagtggcagccagatggtggctgctgacaaggcaagaggaatttcagagattaaacattgtcctttgaggaagggagaggaggtgaatgaactcccagaggaggtgagtggcttgttgggaggaagctcagttccagaacttacctcagtgcacttgggaggggtggagtcctgagcattccatgatttctgccctggccccacctatcctaggatggggtgggatggagagtgggttcagttttcttgtactttagcctggctgaacatgaactttgtgtttacctggaagtggtaggggtgggagagattctcatctttagttctggtgcccaaaatctttggtagatggagggaactggggattcagaagatgtggtaaaggtctatttctgtagtgtggcagagatgtgtttttctaaagtgtttgcagggcatttttccctcttacctcagattaagttatttatatattgttgattgaaggttttttaaaattgcttttaaacttctatttctcgggtaaattttttggtgacatgatatatttaacaccctatttatatactcctacctcttttcatataaatctcttactaagactactgaccaaaaaagaacattttaaaattaaaa

SEQ ID NO: 186680 - DNA, 666 bp, Homo sapiens
  Payload ID: 16760
  Gene Symbol: STARD9
  Gene Name: StAR-related lipid transfer (START) domain containing 9
  ENST ID: ENST00000569419
  CDS Start-End: 1-666
gatgaaaacctgaaggagctggttctccaaaatgaattgaagatagaccagctgactaaagactggacccagaagtggaatgattggcaggccctcatggagcattacagtgtggacatcaacaggaggagggctggggtggtcatcgactccagcctgccacacttgatggccttggaggatgatgtgctcagcacaggtgttgtgctctatcatctcaagaatctggtgtctgttaaacttcatctgcggaccaagaaggaagggacaacaaaaataggaaggattgactcagaccaggaacaggacattggagctgtcataaccctggggaaggcacagaagttccgattcaaccacccagcagaggctgctgtcctgcggcagcgaaggcaggttggagaggctgctgctggtcgtggctcgttggagtggctggatttggatggagatctcgctgcctcccggctgggtctctcccctttgctttggaaggaaaggagagcgcttgaagagcaatgtgacgaggaccatcagacaccgagggatggagagacatcccacagggcccagattcagcagcagcagagctacgtagaggatttgaggcatcaaatcctagcagaagagattcgagctgcgaaggaactggaatttgaccaagct

SEQ ID NO: 186681 - DNA, 7237 bp, Homo sapiens
  Payload ID: 16760
  Gene Symbol: STARD9
  Gene Name: StAR-related lipid transfer (START) domain containing 9
  ENST ID: ENST00000562619
  CDS Start-End: 1-4761
caagacaggaaacgtcgtactggagaactgaggcagttcgcgggagcaagtgaaccatttatatgtcactctagttcttctgaaatcatagagaaaaagaaagatgcaaccagaacaccttcctcagctgatcctttggccccagacagtcctcgttcttcagcacctgtggaggaggtcaggagggtagtatcaaagaaggtagtggctgccttaccttctcaggccccttatgatgatcctagagtgactctgcatgagctaagtcagtcagttccgcaggagactgcagagggcataccccctggcagtcaggacagcagcccagagcatcaggaacccagaactctagacaccacatatggagaagtttcagataatttgttagtgactgcacagggagaaaaaacagcccattttgaaagtcagtctgtgacctgtgatgttcagaattctacaagtgcctcagggcctaagcaagaccatgtccaatgccctgaggcttctactggctttgaagaaggtagggcaagtcccaaacaagataccattctgcctggagctctgacaagggttgcactggaagctcccacacagcagtgtgtgcagtgtaaggagagtgttgggtctgggttgacagaagtctgcagggctggcagcaaacattccaggccaattccactgccagatcaaagaccaagcgcaaatcctgggggaattggggaggaagccccatgtagacacccaagggaagctttagatggccctgtcttctcaaggaaccctgaaggcagcaggactctcagcccgtctagagggaaagagagcagaactcttccttgccgacagccatgcagttctcaacctgttgctactcatgcttattcctcccattcctctactttactgtgttttagagatggtgacctagggaaggagcctttcaaggctgccccacatactatccacccaccctgtgtagtaccttccagggcctatgaaatggatgagacaggagagatctctaggggacctgatgtgcacttgacacatggccttgagcccaaagatgttaacagggaatttaggctaacagagagcagcacttgtgagccttctactgtggctgctgtcctatctcgagctcaaggctgcagatccccttctgctcctgacgtgaggacaggttccttcagccactcagctactgatggaagcgtggggttaataggggttcctgagaaaaaggttgctgagaagcaagcaagcacagaacttgaggctgcctctttccctgcaggcatgtactctgagcccctgaggcagtttagggacagctctgtaggtgaccagaatgcacaggtgtgtcaaaccaatccagaaccacctgcaacaactcagggaccacacaccctggatttaagtgaagggtctgctgagagcaagttggtggtagagccacagcatgaatgtttagaaaataccactagatgttttttggaaaagccacaattttccactgagttgagggatcacaatcgcttggattcccaagccaagtttgtagcaaggttaaaacatacctgcagcccccaggaagacagtccctggcaggaagaagagcagcacagagaccaggcttcaggtggtggagaaggcttcgcccagggtgtgaatccccttcctgatgaagatggcttagatggctgtcagattttagatgctgggagagaggaggtggctgtggccaagcctcctgtgtccaagattttatcacagggcttcaaagacccagccactgtgtccttgaggcaaaatgaaacaccgcagcctgctgctcagaggagtggccacctctacactggcagagagcagccagcacccaaccacaggggctcacttcctgtgactacaatcttctctggccccaaacactccaggtcctcccccacaccacagttctcagttgtcggctcttctcgttctcttcaggagctgaacttgagtgtggagcctccttcccctacagacgaagatacacaggggcctaacagattgtggaacccacatctcaggggctattcctcaggaaagtcagtggcaagaacatctctgcaggctgaggacagcaatcagaaagcctcatctcgcttggatgatgggactaccgatcacaggcacctgaagcctgccacccctccttatccaatgccttccactctctcacacatgccaacccctgatttcacgaccagctggatgtctggtactttggaacaagcccaacagggaaagcgagagaaactgggtgtccaggttaggccagaaaattggtgctctcagatggacaaaggaatgctgcactttggctccagtgacatcagtccctatgcgctgccgtggcgtccggaggagcctgcacgtatcagctggaagcagtatatgtctggcagtgcagtcgatgtttcctgcagccagaagccccaggggctgacactatcaaatgtggcccggtgctccagcatggacaatggcctagaagaccagaactcccctttccactcccacctcagcacttacgccaatatttgtgatctgtcaaccacacacagcagcactgagaatgcccagggttcaaatgaggcctgggaagtattccgagggagttcttcaattgccttaggagacccccacatcccgacgagccctgaaggagtagcccccacttcgggtcatgacagaaggcctcagttcaggggcccttctggtgaagcagactgtctgaggagtaagccccccttggccaaaggaagtgctgcaggtccagtggatgagattatgctgctgtatccatcagaggcaggctgccctgtgggacagaccaggacgaacacattcgaacagggcacacagaccctcggcagcaggcgccactggagcagcactgacatctcctttgctcagcctgaagccagtgcagtatcagcctttgatctggcctcatggaccagcatgcacaatctgtctctccacctctcacagctcctgcacagtacctcagagctgcttgggagtctctcccagccagatgtggccagaagggagcagaacaccaagagggacatcccagataaagccccacaggccctgatgatggatggctctactcagaccactgtggatgagggcagccagactgacctcaccttacccaccctgtgcctccagacttcagaggctgaacctcagggagccaatgtgatccttgaagggctaggctcagatacctcgactgtgtctcaagaagagggagatgtgccaggggtacctcagaagagagaggcagaggaaacagcacagaaaatggctcagctcctctatcttcaggaagaaagcactccctacaagccccagagcccttcaataccctcatcccacttgaggtttcagaaagcccccgttgggcagcatcttccttctgtgagcccctcagtttctgatgctttcctgcctcccagctcccagccagaggagtcatattgcttagttgtcagcagtcccagtcccagctcccctcattccccagggctctttcccagtacttccgagtatcctggggactccagggtccagaagaagctgggccccacaagtgctttgttcgtggacagggcctcctccccaatcctcactcttagtgccagcacccaagagccgggtctttccccaggctctttgaccctctcagccccttcaactcaccctgttgaaggccaccagaagcttgactccagcccagaccctgttgatgccccaaggactccaatggataattattcccaaaccactgacgagttaggtggctcccagagaggtagaagttccttacaaaggagtaatgggagatccttccttgagttgcactccccacacagcccacagcagagtccaaaactccaatttagtttcttagggcagcaccctcagcagcttcagcccaggacaactatcggggtccaaagcagactgctgccaccaccactgaggcacaggagccaaaggctgggcaacagctttgtgcctgagaaggtggcttccccggagcattgcccactgagcggtagggagccaagtcagtggcagagcaggacagaaaatggaggtgagagttcagcatctccaggggaaccacaacgcactctggaccgaccttcttcatggggaggcctccagcacctcagcccctgccctgtctctgagttgactgatactgcagggctccgaggttctgccttgggcctccctcaggcctgccaacctgaggagttactgtgcttcagttgccagatgtgcatggcccctgagcaccagcaccacagtctgagggacctcccggtgcataacaaatttagtaactggtgtggggttcagaagggctcacctggggggttggacatgactgaggaggagctgggggccagcggtgatctcagctctgaaaagcaggaacagagtcccccacaacctcctaatgaccacagccaggattctgagtggtccaagagggagcagatccccctgcaagttggggcccagaacctctcactcagcgtggaactcacagaagcgaaactgcaccatggctttggggaggccgatgccctgctccaggtgctgcagagtgggacaggggaggcgcttgctgctgatgaacctgtgacatccacctggaaggagctctatgcacggggtcagagatagatcttaaagtgaaggacattcagggccagcttcagcgaatcgtgttttgcctcaggcaaaaaaaggccattgagaccctcaggagagagcgggctgagcgacttgggaacttctgccggacgcgaagccttagccctcagaaacaactgagcctcctgcccaacaaagatctcttcatctgggatcttgacttgcccagcagacgccgagaatacctgcagcaactgaggaaggatgttgtggagaccaccaggagcccagagtcagtgtcaaggtcagctcacacaccctctgacatagagttgatgctgcaagactaccagcaggcccatgaggaggccaaggtggagattgcccgggcccgagaccaactgcgggagcggactgaacaagagaagctgagaatccaccagaagatcatttcccagctattgaaggaagaggataaactacataccttggccaattccagctccctgtgcaccagctctaatggaagcctctcgtctggcatgacctctggctataatagcagcccagccttgtcaggccagctccagttcccagagaatatggggcatacaaacttgcctgattccagggatgtatggataggggatgagcgaggaggccattctgcagtgaggaagaactctgcctacagccacagagcctccctgggcagttgctgctgttcaccatccagtctgtccagcttggggacctgcttttcctcctcctaccaggatttggccaagcatgtcgtggacacttctatggctgatgtaatggctgcttgttcggataatttgcacaacctcttcagctgccaggcaactgctggctggaatgtacttggtgtgcaacaccaccctgtgcgcactgaagcagccacgggatttctgttgtgtctgcgtggaagccaaagagggtcacctgtctgtcatggcagcccagtctgtgtatgatacatccatgccaagacccagcagaaaaatggttcgcggggagatcctgcccagtgcctggatcttgcagcccatcactgtggaagggaaggaagtcaccagagtcatctacttggcccaggtggaacttggtgctccaggcttcccacctcagctcctgagctctttcatcaaacggcagccactggttatagccagactggcttccttccttggtaggtagcatctcaccgtcaagatggtgctgctgagatgcaggcccaggctgctcaagagagacactgtggcagctccttgttactttccataccacagtgcaggaaaagctgatgctacctgctgtggccgattggggcagacagcactggcccagggatgctagcaaagcccagtcagtacttggtcacagctggcaccagtgcagagcaaacggcctgagctcctggcccagactatccagagtgaatgcagctccgctcaccttttggatttctcacctttctttcctgtttctgggactctgcggcagacaggacacttaaggaccaggactgggcacagccagcagagccggggactgcagtgctttggcaaggtgcttccgcaggctggtagggaagcaggcagccactggccaagactctgttctgaatctacctcctctagcattcagctctactgtgtgatgggacgttaaaaataccaaaacagaaagagggtttaaaaaacagctgcacaaaccagaacaccgattcagaatcttttctccctcttgagtttttgcaaaatactttattattgatttttgctttttttctccctttccctcccaggagaagacatttgggtcttggcctgaggcaggggtgttgagcgatgatgctctgatatggagctgtcactctagagctcggtcagatggaagacactatagaaccaggttggacagatttggggtcagggttggaggctgagttcttttgaggactggttggagtggcagccagatggtggctgctgacaaggcaagaggaatttcagagattaaacattgtcctttgaggaagggagaggaggtgaatgaactcccagaggaggtgagtggcttgttgggaggaagctcagttccagaacttacctcagtgcacttgggaggggtggagtcctgagcattccatgatttctgccctggccccacctatcctaggatggggtgggatggagagtgggttcagttttcttgtactttagcctggctgaacatgaactttgtgtttacctggaagtggtaggggtgggagagattctcatctttagttctggtgcccaaaatctttggtagatggagggaactggggattcagaagatgtggtaaaggtctatttctgtagtgtggcagagatgtgtttttctaaagtgtttgcagggcatttttccctcttacctcagattaagttatttatatattgttgattgaaggttttttaaaattgcttttaaacttcta

SEQ ID NO: 186682 - DNA, 598 bp, Homo sapiens
  Payload ID: 16761
  Gene Symbol: STATH
  Gene Name: statherin
  Uniprot ID: P02808
  ENST ID: ENST00000246895
  CDS Start-End: 112-300
agagtgtttaaatacattggccctctagggtagcacatcatctcttgaagcttcacttcaacttcactacttctgtagtctcatcttgagtaaaagagaacccagccaactatgaagttccttgtctttgccttcatcttggctctcatggtttccatgattggagctgattcatctgaagagaaatttttgcgtagaattggaagattcggttatgggtatggcccttatcagccagttccagaacaaccactatacccacaaccataccaaccacaataccaacaatataccttttaatatcatcagtaactgcaggacatgattattgaggcttgattggcaaatacgacttctacatccatattctcatctttcataccatatcacactactaccactttttgaagaatcatcaaagagcaatgcaaatgaaaaacactataatttactgtatactctttgtttcaggatacttgccttttcaattgtcacttgatgatataattgcaatttaaactgttaagctgtgttcagtactgtttctgaataatagaaatcacttctctaaaagcaataaatttcaagcacattttta

SEQ ID NO: 186683 - DNA, 534 bp, Homo sapiens
  Payload ID: 16761
  Gene Symbol: STATH
  Gene Name: statherin
  Uniprot ID: P02808
  ENST ID: ENST00000381060
  CDS Start-End: 76-234
atcatctcttgaagcttcacttcaacttcactacttctgtagtctcatcttgagtaaaagagaacccagccaactatgaagttccttgtctttgccttcatcttggctctcatggtttccatgattggagctgattcatctgaagagtatgggtatggcccttatcagccagttccagaacaaccactatacccacaaccataccaaccacaataccaacaatataccttttaatatcatcagtaactgcaggacatgattattgaggcttgattggcaaatacgacttctacatccatattctcatctttcataccatatcacactactaccactttttgaagaatcatcaaagagcaatgcaaatgaaaaacactataatttactgtatactctttgtttcaggatacttgccttttcaattgtcacttgatgatataattgcaatttaaactgttaagctgtgttcagtactgtttctgaataatagaaatcacttctctaaaagcaataaatttcaagcacatttttaca

SEQ ID NO: 186684 - DNA, 598 bp, Homo sapiens
  Payload ID: 16761
  Gene Symbol: STATH
  Gene Name: statherin
  Uniprot ID: P02808
  ENST ID: ENST00000615994
  CDS Start-End: 111-299
gagtgtttaaatacattggccctctagggtagcacatcatctcttgaagcttcacttcaacttcactacttctgtagtctcatcttgagtaaaagagaacccagccaactatgaagttccttgtctttgccttcatcttggctctcatggtttccatgattggagctgattcatctgaagagaaatttttgcgtagaattggaagattcggttatgggtatggcccttatcagccagttccagaacaaccactatacccacaaccataccaaccacaataccaacaatataccttttaatatcatcagtaactgcaggacatgattattgaggcttgattggcaaatacgacttctacatccatattctcatctttcataccatatcacactactaccactttttgaagaatcatcaaagagcaatgcaaatgaaaaacactataatttactgtatactctttgtttcaggatacttgccttttcaattgtcacttgatgatataattgcaatttaaactgttaagctgtgttcagtactgtttctgaataatagaaatcacttctctaaaagcaataaatttcaagcacatttttac

SEQ ID NO: 186685 - DNA, 534 bp, Homo sapiens; identical to SEQ ID NO: 186683
  Payload ID: 16761
  Gene Symbol: STATH
  Gene Name: statherin
  ENST ID: ENST00000634727
  CDS Start-End: 76-234

SEQ ID NO: 186686 - DNA, 598 bp, Homo sapiens; identical to SEQ ID NO: 186682
  Payload ID: 16761
  Gene Symbol: STATH
  Gene Name: statherin
  ENST ID: ENST00000635686
  CDS Start-End: 112-300

SEQ ID NO: 186687 - DNA, 598 bp, Homo sapiens; identical to SEQ ID NO: 186684
  Payload ID: 16761
  Gene Symbol: STATH
  Gene Name: statherin
  ENST ID: ENST00000635437
  CDS Start-End: 111-299

SEQ ID NO: 186688 - DNA, 1137 bp, Homo sapiens
  Payload ID: 16762
  Gene Symbol: STMN1
  Gene Name: stathmin 1
  Uniprot ID: P16949
  ENST ID: ENST00000357865
  CDS Start-End: 267-716
cgccggtgtcggtgtagggtgccgggggcagggggccctgcaggggcgtggagtggcattgtgctgtcacaggggctcgggcgtcttaggcacccatgtgggtggcgcactagaaggggcactgctctgtccgagtgctgcccttggggcgaggcgggcatgtggctctacaaggtggagtccaggcggccaaagtttggaaaggactttccttatcccagttgattgtgcagaatacactgcctgtcgcttgtcttctattcaccatggcttcttctgatatccaggtgaaagaactggagaagcgtgcctcaggccaggcttttgagctgattctcagccctcggtcaaaagaatctgttccagaattccccctttcccctccaaagaagaaggatctttccctggaggaaattcagaagaaattagaagctgcagaagaaagacgcaagtcccatgaagctgaggtcttgaagcagctggctgagaaacgagagcacgagaaagaagtgcttcagaaggcaatagaagagaacaacaacttcagtaaaatggcagaagagaaactgacccacaaaatggaagctaataaagagaaccgagaggcacaaatggctgccaaactggaacgtttgcgagagaaggataagcacattgaagaagtgcggaagaacaaagaatccaaagaccctgctgacgagactgaagctgactaatttgttctgagaactgactttctccccatccccttcctaaatatccaaagactgtactggccagtgtcattttattttttccctcctgacaaatattttagaagctaatgtaggactgtataggtagatccagatccagactgtaagatgttgttttaggggctaaaggggagaaactgaaagtgttttactctttttctaaagtgttggtctttctaatgtagctatttttcttgttgcatcttttctacttcagtacacttggtgtactgggttaatggctagtactgtattggctctgtgaaaacatatttgtgaaaagagtatgtagtggcttcttttgaactgttagatgctgaatatctgttcacttttcaatcccaattctgtcccaatcttaccagatgctactggacttgaa

SEQ ID NO: 186689 - DNA, 867 bp, Homo sapiens
  Payload ID: 16762
  Gene Symbol: STMN1
  Gene Name: stathmin 1
  Uniprot ID: P16949
  ENST ID: ENST00000374291
  CDS Start-End: 143-592
gcacaatgagttgtaggcagtattaagatggctccgggggcactgttgagttgaatctggaatatcttcttacagtttcggactttccttatcccagttgattgtgcagaatacactgcctgtcgcttgtcttctattcaccatggcttcttctgatatccaggtgaaagaactggagaagcgtgcctcaggccaggcttttgagctgattctcagccctcggtcaaaagaatctgttccagaattccccctttcccctccaaagaagaaggatctttccctggaggaaattcagaagaaattagaagctgcagaagaaagacgcaagtcccatgaagctgaggtcttgaagcagctggctgagaaacgagagcacgagaaagaagtgcttcagaaggcaatagaagagaacaacaacttcagtaaaatggcagaagagaaactgacccacaaaatggaagctaataaagagaaccgagaggcacaaatggctgccaaactggaacgtttgcgagagaaggataagcacattgaagaagtgcggaagaacaaagaatccaaagaccctgctgacgagactgaagctgactaatttgttctgagaactgactttctccccatccccttcctaaatatccaaagactgtactggccagtgtcattttattttttccctcctgacaaatattttagaagctaatgtaggactgtataggtagatccagatccagactgtaagatgttgttttaggggctaaaggggagaaactgaaagtgttttactctttttctaaagtgttggtctttctaatgtagctatttttcttgttgcatcttttctacttcagtacacttggtgtactgggt

SEQ ID NO: 186690 - DNA, 1712 bp, Homo sapiens
  Payload ID: 16762
  Gene Symbol: STMN1
  Gene Name: stathmin 1
  Uniprot ID: P16949
  ENST ID: ENST00000399728
  CDS Start-End: 365-814
atcaccgggcgtccgctccggggtgccgtcgaggagacaatagggggcgtgggccctcgtttacctccctccctccctcccttccctgcgggccccgccgggttccccattgtctgaagggacggggcggtgccccagggaccagcggctttaggaccaaactgcgggcagccagggccgcgaccctccctgcgaccgtcccctggcgaccgcagctggtgattgaggggcggcgctcccgggccccacgagggttcttctgtcttcgcggccggacgcgcggacagcgtgggtggcggcaggactttccttatcccagttgattgtgcagaatacactgcctgtcgcttgtcttctattcaccatggcttcttctgatatccaggtgaaagaactggagaagcgtgcctcaggccaggcttttgagctgattctcagccctcggtcaaaagaatctgttccagaattccccctttcccctccaaagaagaaggatctttccctggaggaaattcagaagaaattagaagctgcagaagaaagacgcaagtcccatgaagctgaggtcttgaagcagctggctgagaaacgagagcacgagaaagaagtgcttcagaaggcaatagaagagaacaacaacttcagtaaaatggcagaagagaaactgacccacaaaatggaagctaataaagagaaccgagaggcacaaatggctgccaaactggaacgtttgcgagagaaggataagcacattgaagaagtgcggaagaacaaagaatccaaagaccctgctgacgagactgaagctgactaatttgttctgagaactgactttctccccatccccttcctaaatatccaaagactgtactggccagtgtcattttattttttccctcctgacaaatattttagaagctaatgtaggactgtataggtagatccagatccagactgtaagatgttgttttaggggctaaaggggagaaactgaaagtgttttactctttttctaaagtgttggtctttctaatgtagctatttttcttgttgcatcttttctacttcagtacacttggtgtactgggttaatggctagtactgtattggctctgtgaaaacatatttgtgaaaagagtatgtagtggcttcttttgaactgttagatgctgaatatctgttcacttttcaatcccaattctgtcccaatcttaccagatgctactggacttgaatggttaataaaactgcacagtgctgttggtggcagtgacttcttttgagttaggttaataaatcaagccatagagcccctcctggttgatacttgttccagatggggcctttggggctggtagaaatacccaacgcacaaatgaccgcacgttctctgccccgtttcttgccccagtgtggtttgcattgtctccttccacaatgactgctttgtttggatgcctcagcccaggtcagctgttactttctttcagatgtttatttgcaaacaaccattttttgttctgtgtcccttttaaaaggcagattaaaagcacaagcgtgtttctagagaacagttgagagagaatctcaagattctacttggtggtttgcttgctctacgttacaggtggggcatgtcctcatcctttcctgccataaaagctatgacacgagaatcagaatattaataaaactttatgtactgctgtagc

SEQ ID NO: 186691 - DNA, 1504 bp, Homo sapiens
  Payload ID: 16762
  Gene Symbol: STMN1
  Gene Name: stathmin 1
  Uniprot ID: P16949
  ENST ID: ENST00000455785
  CDS Start-End: 141-590
gtgcctctgtttggcgcttttgtgcgcgcccgggtctgttggtgctcagagtgtggtcaggcggctcggactgagcaggactttccttatcccagttgattgtgcagaatacactgcctgtcgcttgtcttctattcaccatggcttcttctgatatccaggtgaaagaactggagaagcgtgcctcaggccaggcttttgagctgattctcagccctcggtcaaaagaatctgttccagaattccccctttcccctccaaagaagaaggatctttccctggaggaaattcagaagaaattagaagctgcagaagaaagacgcaagtcccatgaagctgaggtcttgaagcagctggctgagaaacgagagcacgagaaagaagtgcttcagaaggcaatagaagagaacaacaacttcagtaaaatggcagaagagaaactgacccacaaaatggaagctaataaagagaaccgagaggcacaaatggctgccaaactggaacgtttgcgagagaaggataagcacattgaagaagtgcggaagaacaaagaatccaaagaccctgctgacgagactgaagctgactaatttgttctgagaactgactttctccccatccccttcctaaatatccaaagactgtactggccagtgtcattttattttttccctcctgacaaatattttagaagctaatgtaggactgtataggtagatccagatccagactgtaagatgttgttttaggggctaaaggggagaaactgaaagtgttttactctttttctaaagtgttggtctttctaatgtagctatttttcttgttgcatcttttctacttcagtacacttggtgtactgggttaatggctagtactgtattggctctgtgaaaacatatttgtgaaaagagtatgtagtggcttcttttgaactgttagatgctgaatatctgttcacttttcaatcccaattctgtcccaatcttaccagatgctactggacttgaatggttaataaaactgcacagtgctgttggtggcagtgacttcttttgagttaggttaataaatcaagccatagagcccctcctggttgatacttgttccagatggggcctttggggctggtagaaatacccaacgcacaaatgaccgcacgttctctgccccgtttcttgccccagtgtggtttgcattgtctccttccacaatgactgctttgtttggatgcctcagcccaggtcagctgttactttctttcagatgtttatttgcaaacaaccattttttgttctgtgtcccttttaaaaggcagattaaaagcacaagcgtgtttctagagaacagttgagagagaatctcaagattctacttggtggtttgcttgctctacgttacaggtggggcatgtcctcatcctttcctgccataaaagctatgacacgagaatcagaatattaataaaactttatgtactgctgtagcaactcctgtgaaatga

SEQ ID NO: 186692 - DNA, 665 bp, Homo sapiens
  Payload ID: 16762
  Gene Symbol: STMN1
  Gene Name: stathmin 1
  ENST ID: ENST00000446334
  CDS Start-End: 409-665
ggccacgcccatcctgggtccggtgctgcgtctaattctctgcttttcttaaatcttgtcgctgcctctgattttaattcctagcttttgggaacctgtcatcctacgtttttggtactagctggcgtctacaaaagtcataatgttaaaaagatcaacaagagatacagcatttttcatgacataacggcagcaaatataagtcaaaatctagaggttcataaacattttgcttgctgttgggcaaggaagcttaaacctgagggacaataggagttcaacattattggttactattagcttgggcgttttcttatccaccacgtcagacacagacaaagcaggggactttccttatcccagttgattgtgcagaatacactgcctgtcgcttgtcttctattcaccatggcttcttctgatatccaggtgaaagaactggagaagcgtgcctcaggccaggcttttgagctgattctcagccctcggtcaaaagaatctgttccagaattccccctttcccctccaaagaagaaggatctttccctggaggaaattcagaagaaattagaagctgcagaagaaagacgcaagtcccatgaagctgaggtcttgaagcagctggctgagaaacgagagcacgagaaagaagtgcttcagaaggc

SEQ ID NO: 186693 - DNA, 948 bp, Homo sapiens
  Payload ID: 16762
  Gene Symbol: STMN1
  Gene Name: stathmin 1
  Uniprot ID: P16949
  ENST ID: ENST00000426559
  CDS Start-End: 141-665
gtgcctctgtttggcgcttttgtgcgcgcccgggtctgttggtgctcagagtgtggtcaggcggctcggactgagcaggactttccttatcccagttgattgtgcagaatacactgcctgtcgcttgtcttctattcaccatggcttcttctgatatccaggtgaaagaactggagaagcgtgcctcaggccaggcttttgagctgattctcagccctcggtcaaaagaatctgttccagaattccccctttcccctccaaagaagaaggatctttccctggaggaaattcagaagaaattagaagctgcagaagaaagacgcaagtcccatgaagctgaggtcttgaagcagctggctgagaaacgagagcacgagaaagaagtgcttcagaaggcaatagaagagaacaacaacttcagtaaaatggcagaagagaaactgacccacaaaatggaagctaataaagagaaccgagaggcacaaatggctgccaaactggaacgtttgcgagagaagatgtacttctggactcacgggcctggggcccacccagcacagatctctgctgagcaatcttgtctccactctgttcctgccctttgcccagccctgggcctccaatctgcattgattacctggtctgatctctctcaccatcactaggtacttaataaatatttgctgttgatgatagcaatgaccttgagactgatgaacagtctggccaagaggatccttgatgtggaagatagaaaaagcctttggggtcaggcagacttggattctaataccagccagttctgcttgctgtgtctgagcctcagtttactcatctgtgaagaggaggtagcaagaatgaaaatgcctgccttgtggtttgttgtaaggacagacactgccaacgtagagggcccagcagctcacagaccagttgctctgagagcag

SEQ ID NO: 186694 - DNA, 2223 bp, Homo sapiens
  Payload ID: 16763
  Gene Symbol: STMN2
  Gene Name: stathmin 2
  Uniprot ID: Q93045
  ENST ID: ENST00000220876
  CDS Start-End: 383-922
agctcctaggaagcttcagggcttaaagctccactctacttggactgtactatcaggcccccaaaatggggggagccgacagggaaggactgatttccatttcaaactgcattctggtactttgtactccagcaccattggccgatcaatatttaatgcttggagattctgactctgcgggagtcatgtcaggggaccttgggagccaatctgcttgagcttctgagtgataattattcatgggctcctgcctcttgctctttctctagcacggtcccactctgcagactcagtgccttattcagtcttctctctcgctctctccgctgctgtagccggaccctttgccttcgccactgctcagcgtctgcacatccctacaatggctaaaacagcaatggcctacaaggaaaaaatgaaggagctgtccatgctgtcactgatctgctcttgcttttacccggaacctcgcaacatcaacatctatacttacgatgatatggaagtgaagcaaatcaacaaacgtgcctctggccaggcttttgagctgatcttgaagccaccatctcctatctcagaagccccacgaactttagcttctccaaagaagaaagacctgtccctggaggagatccagaagaaactggaggctgcagaggaaagaagaaagtctcaggaggcccaggtgctgaaacaattggcagagaagagggaacacgagcgagaagtccttcagaaggctttggaggagaacaacaacttcagcaagatggcggaggaaaagctgatcctgaaaatggaacaaattaaggaaaaccgtgaggctaatctagctgctattattgaacgtctgcaggaaaaggagaggcatgctgcggaggtgcgcaggaacaaggaactccaggttgaactgtctggctgaagcaagggagggtctggcacgccccaccaatagtaaatccccctgcctatattataatggatcatgcgatatcaggatggggaatgtatgacatggtttaaaaagaactcattataaaaaaaaaaaaacaaaaaaaatcaaaaattaaaaaaaatcaatgcggtctctttgcagaatgttttgcttgatgtttaaaaaataccttggatcttattttgtaaatacttacatttttgttaaaaaatacaagtattgcattatgcaagttatttcataatcttacatgtcctgtaacaggcttttgatgttgtgtctttccactcaaatgaatttgctaggtctgttctttttgaagctccccatgtctaactccattccaaaagaaaaatgaggtcagtagacagtctatggtgctagaaacccaccattgcctaatgacctagaaggctttgttgtctctgagcttgactaagaccatacctagatcacaggtattatgactccacatgaaccttcacatttgttcgctcataatctacttactgcctaaaaactacaaaaccaggctaagaaataccaccagtcatagcatttacttctgcttctcctggattatgtgctacaaatgtgctttggctttagaaagggatggatgagaagacagacctgagaccaatctgggtagaagcaaaaagttgaaccttttaaagtgctgaacacaaatccaaattcgaatggttcaagcagccgtgaaatcgctcttcataaagtgggcttaattctctagtttaagttcttttgatggaatgaattaattaatgtgtcaggtggcttatttgtggatgccatgattgatgatgttcattttaagctcttacctatagtacaagtacatgatgctactgaatatttttccacttggaaactgtgagctggttgttgcattaaaacacacatacaaacaaaatcaaaaacactgcggactttcactcaagctggtctttcttccccagtgtaaggcaatcctgcctactaacaacaccaacaacaaaacactccatctgtgaagctgacgcagttaagggggctaggcagggcatttgtgccaactaagaatcaccagatacccaccataagtacctatcgcagttttgaagtcgtttctccccaactcccaactcctgaaggttgctgcctgcatatttactcttcattagtgctattttcctgtatgtcattgtgagcaagctgtgattaataaagaattggagttctgtgaactaataaaggtttggtctgtt

SEQ ID NO: 186695 - DNA, 799 bp, Homo sapiens
  Payload ID: 16763
  Gene Symbol: STMN2
  Gene Name: stathmin 2
  Uniprot ID: Q93045
  ENST ID: ENST00000518111
  CDS Start-End: 45-608
gaccctttgccttcgccactgctcagcgtctgcacatccctacaatggctaaaacagcaatggcctacaaggaaaaaatgaaggagctgtccatgctgtcactgatctgctcttgcttttacccggaacctcgcaacatcaacatctatacttacgatgatatggaagtgaagcaaatcaacaaacgtgcctctggccaggcttttgagctgatcttgaagccaccatctcctatctcagaagccccacgaactttagcttctccaaagaagaaagacctgtccctggaggagatccagaagaaactggaggctgcagaggaaagaagaaagtctcaggaggcccaggtgctgaaacaattggcagagaagagggaacacgagcgagaagtccttcagaaggctttggaggagaacaacaacttcagcaagatggcggaggaaaagctgatcctgaaaatggaacaaattaaggaaaaccgtgaggctaatctagctgctattattgaacgtctgcaggaaaagctggtcaagtttatttcttctgaactaaaagaatctatagagtctcaatttctggagcttcagagggaaggagagaagcaatgagaggcatgctgcggaggtgcgcaggaacaaggaactccaggttgaactgtctggctgaagcaagggagggtctggcacgccccaccaatagtaaatccccctgcctatattataatggatcatgcgatatcaggatggggaatgtatgacatggtttaaaaagaactcattataaaaaaaaaaaaacaaaa

SEQ ID NO: 186696 - DNA, 585 bp, Homo sapiens
  Payload ID: 16763
  Gene Symbol: STMN2
  Gene Name: stathmin 2
  ENST ID: ENST00000518491
  CDS Start-End: 72-578
attttacggtattgtctcgtcgaagaaaccgctagtcctggggtgcggtgcagggagcctacaaggaaaaaatgaaggagctgtccatgctgtcactgatctgctcttgcttttacccggaacctcgcaacatcaacatctatacttacgatgatatggaagtgaagcaaatcaacaaacgtgcctctggccaggcttttgagctgatcttgaagccaccatctcctatctcagaagccccacgaactttagcttctccaaagaagaaagacctgtccctggaggagatccagaagaaactggaggctgcagaggaaagaagaaagtctcaggaggcccaggtgctgaaacaattggcagagaagagggaacacgagcgagaagtccttcagaaggctttggaggagaacaacaacttcagcaagatggcggaggaaaagctgatcctgaaaatggaacaaattaaggaaaaccgtgaggctaatctagctgctattattgaacgtctgcaggaaaaggagaggcatgctgcggaggtgcgcaggaacaaggaactccaggttgaactgtctggctgaagcaagg

SEQ ID NO: 186697 - DNA, 930 bp, Homo sapiens
  Payload ID: 16764
  Gene Symbol: STMND1
  Gene Name: stathmin domain containing 1
  ENST ID: ENST00000354384
  CDS Start-End: 330-930
cgcggtggcgcacgtctgtaatcccaacactttgggaggccgaggtgggcagatcacgaggtcaagaattcgagaccagcctggccaacatggtgaaaccccgtctctactaaaaatacaaaaattagccgggcgtggtggtgcgctcctgtaacctcagctactcagaaggctgaggcaggagaatcacttgaacccgagaggcagaggttgcagtgagccgagatcgcaccactgcactcaagcctgggtgacagagcaagactctgtctcaaaaaaataaaaaatagacattaaaagaatcctgggaagacattaccgagtggaagatgcacgtgttctttgtgttcttatctcttctggagacactgaggagacttcctgtggctgatgtcagtgtgcctcatactggggaaaattgcagcccccggatggaagctgctctgaccaagaatactgtggacattgcagaaggcctggaacaagtccagatgggaagcttacctggaaccatttcagaaaattctccatctcctagtgaaagaaacagacgagtaaattcagacctagtgaccaatggattaatcaataaaccccaatccctagagagtcgagagcgacagaagtcatcagatatcctggaggaactaattgttcaaggaattatacaaagccacagcaaagtatttagaaatggagaatcatatgatgtcacgttgactacgactgagaagccattgagaaagccaccttccagactgaaaaaactcaagatcaaaaagcaagtgaaggatttcacaatgaaggacatcgaggagaagatggaggctgccgaggagcgcaggaagactaaagaagaagaaataagaaaaaggctacggagtgaccgacttttgccttcagccaatcactcagattcagctgaattag

SEQ ID NO: 186698 - DNA, 1322 bp, Homo sapiens
  Payload ID: 16764
  Gene Symbol: STMND1
  Gene Name: stathmin domain containing 1
  Uniprot ID: H3BQB6
  ENST ID: ENST00000536551
  CDS Start-End: 1-831
atgggctgtggaccttcccaacctgctgaagaccggagacgtgtacgcgcgcccaagaagggctggaaagaggaattcaaggctgatgtcagtgtgcctcatactggggaaaattgcagcccccggatggaagctgctctgaccaagaatactgtggacattgcagaaggcctggaacaagtccagatgggaagcttacctggaaccatttcagaaaattctccatctcctagtgaaagaaacagacgagtaaattcagacctagtgaccaatggattaatcaataaaccccaatccctagagagtcgagagcgacagaagtcatcagatatcctggaggaactaattgttcaaggaattatacaaagccacagcaaagtatttagaaatggagaatcatatgatgtcacgttgactacgactgagaagccattgagaaagccaccttccagactgaaaaaactcaagatcaaaaagcaagtgaaggatttcacaatgaaggacatcgaggagaagatggaggctgccgaggagcgcaggaagactaaagaagaagaaataagaaaaaggctacggagtgaccgacttttgccttcagccaatcactcagattcagctgaattagatggggccgaggttgcatttgccaaaggacttcaaagggtgaggtctgctggatttgaaccatctgacctgcagggaggaaaaccattgaagaggaagaagagtaaatgtgatgcaaccttgattgatagaaacgaaagtgatgaaagttttggggtcgtggagtcagacatgtcctacaaccaagcagatgacatagtctactaagccattttttgtgaatttcataagaaagcattcattctccccatttgtgacatttgtagtatgtctcatattctttgactgactgacctcattccactgggatttctgccttgggcttaaggatgattgtgtgggctgcacaggctgaaggttagttgagtaaattaagtagctatgctagcttttaaaaaaagagcgagggggagacttgaccagcatagatatttggcactctcctttgtgtggcttcaaacattatggagatgtctttaattcatttataagtgccttcagtttacattaataagttcgtgccaaatgaaatccttcctgtttactcctgccttgtggcggggtccatcctctgctgctcctttaaaacaaattgcatggatttgtattaagtattttaatggcttatatgttttttatgctgtatgtctatggttttataatttttttctctgtgttgtgaaggaataaagcaatgt

SEQ ID NO: 186699 - DNA, 2255 bp, Homo sapiens
  Payload ID: 16765
  Gene Symbol: STMN3
  Gene Name: stathmin-like 3
  Uniprot ID: Q9NZ72
  ENST ID: ENST00000370053
  CDS Start-End: 83-625
ggcactgcagcaccagccgtctgcagctccggccgccacttgcgcctctccagcctccgcaggcccaaccgccgccagcaccatggccagcaccatttccgcctacaaggagaagatgaaggagctgtcggtgctgtcgctcatctgctcctgcttctacacacagccgcaccccaataccgtctaccagtacggggacatggaggtgaagcagctggacaagcgggcctcaggccagagcttcgaggtcatcctcaagtccccttctgacctgtccccagagagccctatgctctcctccccacccaagaagaaggacacctccctggaggagctgcaaaagcggctggaggcagccgaggagcggaggaagacgcaggaggcgcaggtgctgaagcagctggcggagcggcgcgagcacgagcgcgaggtgctgcacaaggcgctggaggagaataacaacttcagccgccaggcggaggagaagctcaactacaagatggagctcagcaaggagatccgcgaggcacacctggccgcactgcgcgagcggctgcgcgagaaggagctgcacgcggccgaggtgcgcaggaacaaggagcagcgagaagagatgtcgggctaagggcccgggacgggcggcgcccatcctgcgacagaacacgttcgggttttggttttgtttcgttcacctctgtctagatgcaacttttgttcctcctcccccacccccgcccccagcttcatgcttctcttccgcactcagccgccctgccctgtcctcgtggtgagtcgctgaccacggcttcccctgcaggagccgccgggcgtgagacgcggtccctcggtgcagacaccaggccgggcgcggctgggtcccccgggggccctgtgagagaggtggcggtgaccgtggtaaacccagggcggtggcgtgggatcacgggtccttacgctgggctgtctggtcagcacgtgcaggtcagggcaggtcctctgagccggcgcccctggccagcaggcgaggctacagtacctgctgtctttccagggggaaggggctccccatgagggaggggcgacgggggaggggggtgatggtgcctgggagcctgcgtgtgcagccggtgcttgttgaactggcaggcgggtgggtgggggctgcagctttccttaatgtggttgcacaggggtcctctgagaccacctggcgtgaggtggacaccctgggccttcctggaagcctgcagttgggggcctgccctgagtctgctggggagtgggcattctctgccagggacccatgagcaggctgcatggtctagaggttgtgggcagcatggacagtcccccactcagaagtgcaagagttccaaagagcctctggcccaggcccctccccaccagggctttgcagatgtccttgaaagacccaccctagagccctttggagtgctggcccctcctgtgccctctgccctggtggaagcggcagccacaagtcctcctcagggagccccaagggggattttgtgggaccgctgcccacagatccaggtgttggaagggcagcgggtaaggttcccaagccagccccaacacccttcccacttggcacccagagggggctgtgggtggaggcctgactccaggcctctcctgcccacaccctctgggctgagttccttctttcccttggacgcccagtgctggccttggaggacggtcagctggaggatggcggtgggggaggctgtctttgtaccactgcagcatcccccacttctccacggaagccccatcccaaagctgctgcctggccccttgctgtaaagtgtgaagggggcggctgagttctcttaggacccagagccagggccctcaacttccatcctgcgggaggccttggccgggcactgccagtgtcttccagagtcacacccagggaccacgggaggatcctgacccctgcagggctcaggggtcagcagggacccactgccccatctccctctccccaccaagacagccccagaaggagcagccagctgggatgggaacccaaggctgtccacatctggcttttgtgggactcagaaagggaagcagaactgagggctgggatattcctcatggtggcagcgctcatagcgaaagcctactgtaatatgcacccatctcatccacgtagtaaagtgaacttaaaaattcaatcaaatgaacaattaaataaacacctgtgtgtttaagacatg

SEQ ID NO: 186700 - DNA, 2351 bp, Homo sapiens
  Payload ID: 16765
  Gene Symbol: STMN3
  Gene Name: stathmin-like 3
  Uniprot ID: Q9NZ72
  ENST ID: ENST00000540534
  CDS Start-End: 209-718
acaccgctgcggcctcggggaccaccctttgcgacgcccgcgccacctgctctggccagaaaagccactgccctttgcgccgcggggtctggatgggggaggggcgactgcgatccccaaaccctccggagaccagagggctccgcccctcccgcccctccacctcccgcggggcggacccaccgccttcgaagcctacaaggagaagatgaaggagctgtcggtgctgtcgctcatctgctcctgcttctacacacagccgcaccccaataccgtctaccagtacggggacatggaggtgaagcagctggacaagcgggcctcaggccagagcttcgaggtcatcctcaagtccccttctgacctgtccccagagagccctatgctctcctccccacccaagaagaaggacacctccctggaggagctgcaaaagcggctggaggcagccgaggagcggaggaagacgcaggaggcgcaggtgctgaagcagctggcggagcggcgcgagcacgagcgcgaggtgctgcacaaggcgctggaggagaataacaacttcagccgccaggcggaggagaagctcaactacaagatggagctcagcaaggagatccgcgaggcacacctggccgcactgcgcgagcggctgcgcgagaaggagctgcacgcggccgaggtgcgcaggaacaaggagcagcgagaagagatgtcgggctaagggcccgggacgggcggcgcccatcctgcgacagaacacgttcgggttttggttttgtttcgttcacctctgtctagatgcaacttttgttcctcctcccccacccccgcccccagcttcatgcttctcttccgcactcagccgccctgccctgtcctcgtggtgagtcgctgaccacggcttcccctgcaggagccgccgggcgtgagacgcggtccctcggtgcagacaccaggccgggcgcggctgggtcccccgggggccctgtgagagaggtggcggtgaccgtggtaaacccagggcggtggcgtgggatcacgggtccttacgctgggctgtctggtcagcacgtgcaggtcagggcaggtcctctgagccggcgcccctggccagcaggcgaggctacagtacctgctgtctttccagggggaaggggctccccatgagggaggggcgacgggggaggggggtgatggtgcctgggagcctgcgtgtgcagccggtgcttgttgaactggcaggcgggtgggtgggggctgcagctttccttaatgtggttgcacaggggtcctctgagaccacctggcgtgaggtggacaccctgggccttcctggaagcctgcagttgggggcctgccctgagtctgctggggagtgggcattctctgccagggacccatgagcaggctgcatggtctagaggttgtgggcagcatggacagtcccccactcagaagtgcaagagttccaaagagcctctggcccaggcccctccccaccagggctttgcagatgtccttgaaagacccaccctagagccctttggagtgctggcccctcctgtgccctctgccctggtggaagcggcagccacaagtcctcctcagggagccccaagggggattttgtgggaccgctgcccacagatccaggtgttggaagggcagcgggtaaggttcccaagccagccccaacacccttcccacttggcacccagagggggctgtgggtggaggcctgactccaggcctctcctgcccacaccctctgggctgagttccttctttcccttggacgcccagtgctggccttggaggacggtcagctggaggatggcggtgggggaggctgtctttgtaccactgcagcatcccccacttctccacggaagccccatcccaaagctgctgcctggccccttgctgtaaagtgtgaagggggcggctgagttctcttaggacccagagccagggccctcaacttccatcctgcgggaggccttggccgggcactgccagtgtcttccagagtcacacccagggaccacgggaggatcctgacccctgcagggctcaggggtcagcagggacccactgccccatctccctctccccaccaagacagccccagaaggagcagccagctgggatgggaacccaaggctgtccacatctggcttttgtgggactcagaaagggaagcagaactgagggctgggatattcctcatggtggcagcgctcatagcgaaagcctactgtaatatgcacccatctcatccacgtagtaaagtgaacttaaaaattcaatcaaatgaacaattaaataaacacctgtgtgtttaagacatggtt

SEQ ID NO: 186701 - DNA, 519 bp, Homo sapiens
  Payload ID: 16765
  Gene Symbol: STMN3
  Gene Name: stathmin-like 3
  ENST ID: ENST00000632676
  CDS Start-End: 262-519
gcttcgtttttcactcgacgtttgggaggacaggacgaagggccgcacctccttcccatcgccgcccccgttcacgagccgcactccctcccaccttttcttacgcccccgggacaggtcgccgcggtccctctcccgagctgactggttcaactcgggcgccttggcccggggcgcagaactccgcccacccacgcgtgcccgacctgaccccgcccctcaggccccacgggcttggaggctccagcctacaaggagaagatgaaggagctgtcggtgctgtcgctcatctgctcctgcttctacacacagccgcaccccaataccgtctaccagtacggggacatggaggtgaagcagctggacaagcgggcctcaggccagagcttcgaggtcatcctcaagtccccttctgacctgtccccagagagccctatgctctcctccccacccaagaagaaggacacctccctggaggagctgcaaaagcggctggaggcagccgaggagcggaggaag

SEQ ID NO: 186702 - DNA, 970 bp, Homo sapiens
  Payload ID: 16765
  Gene Symbol: STMN3
  Gene Name: stathmin-like 3
  ENST ID: ENST00000631920
  CDS Start-End: 1-718
acaccgctgcggcctcggggaccaccctttgcgacgcccgcgccacctgctctggccagaaaagccactgccctttgcgccgcggggtctggatgggggaggggcgactgcgatccccaaaccctccggagaccagagggctccgcccctcccgcccctccacctcccgcggggcggacccaccgccttcgaagcctacaaggagaagatgaaggagctgtcggtgctgtcgctcatctgctcctgcttctacacacagccgcaccccaataccgtctaccagtacggggacatggaggtgaagcagctggacaagcgggcctcaggccagagcttcgaggtcatcctcaagtccccttctgacctgtccccagagagccctatgctctcctccccacccaagaagaaggacacctccctggaggagctgcaaaagcggctggaggcagccgaggagcggaggaagacgcaggaggcgcaggtgctgaagcagctggcggagcggcgcgagcacgagcgcgaggtgctgcacaaggcgctggaggagaataacaacttcagccgccaggcggaggagaagctcaactacaagatggagctcagcaaggagatccgcgaggcacacctggccgcactgcgcgagcggctgcgcgagaaggagctgcacgcggccgaggtgcgcaggaacaaggagcagcgagaagagatgtcgggctaagggcccgggacgggcggcgcccatcctgcgacagaacacgttcgggttttggttttgtttcgttcacctctgtctagatgcaacttttgttcctcctcccccacccccgcccccagcttcatgcttctcttccgcactcagccgccctgccctgtcctcgtggtgagtcgctgaccacggcttcccctgcaggagccgccgggcgtgagacgcggtccctcggtgcagacaccaggccgggcgcggctgggt

SEQ ID NO: 186703 - DNA, 605 bp, Homo sapiens
  Payload ID: 16765
  Gene Symbol: STMN3
  Gene Name: stathmin-like 3
  ENST ID: ENST00000634126
  CDS Start-End: 348-605
cgcgcacggccggcaggcagcacttcttcgtggcttcttcatggctgtgtttaatgtccactgacggcacatgcgaatgccatgcgtgcccacgctcctgggtgtgagatagtgctcggagaagccccagcactcactggcacccagccccatgtgcctgttgtggtgaaggaactgcaggctgcctatctgagactcggcagggagttgaagatgaggagaccagccacacacactcgttgaatgaatgggcaccaagcacaagtttcagtgccccccatacatgctgatatggttcggctctgtgtctccacccaagtctcacctcgaattcctacaaggagaagatgaaggagctgtcggtgctgtcgctcatctgctcctgcttctacacacagccgcaccccaataccgtctaccagtacggggacatggaggtgaagcagctggacaagcgggcctcaggccagagcttcgaggtcatcctcaagtccccttctgacctgtccccagagagccctatgctctcctccccacccaagaagaaggacacctccctggaggagctgcaaaagcggctggaggcagccgaggagcggaggaag

SEQ ID NO: 186704 - DNA, 1250 bp, Homo sapiens
  Payload ID: 16766
  Gene Symbol: STMN4
  Gene Name: stathmin-like 4
  Uniprot ID: Q9H169
  ENST ID: ENST00000265770
  CDS Start-End: 138-707
agggtaccactaattgagggagtgaggaagagagcagctcgcttctaactggactgcacgttggtgacagcgtcccaagctggtgacagacccactctgtaactttcagctagattcagccaccagatcccagaaacatgacccttgctgcctacaaagagaagatgaaggagctcccgctggtgtccttgttctgctcctgcttcctggccgatcccctgaataagtcgtcctacaaatatgaagcagacacggtggacctgaattggtgcgtcatttccgacatggaagtcatcgagctgaacaaatgcacctcgggccaatcctttgaagtcatcctgaagccaccctcctttgatggggttcccgagttcaacgcctccctgccaaggcggcgagacccatccctggaagagatccagaagaaactagaagcggctgaggagcgaaggaagtaccaggaagcggagctcctgaaacacctagcagagaaacgggaacatgagagagaggtgatccaaaaggccattgaggaaaacaacaacttcatcaagatggctaaggaaaaactggcccagaagatggaatccaacaaggagaacagggaggcccacctcgccgccatgttggaacggctgcaagagaaggacaagcacgccgaggaggtgcggaaaaacaaggagctgaaggaagaggcctccaggtaaagcctagaggccaaagaactttccaggtcagccggacagctccagcagctccacgttccaggcagcctcgcccgccggctgcgctcccagcactggggtttggggggaggggggtggccaaggggcgtttcctctgcttttggtgtttgtacatgttaagaattgaccagtgaagccatcctatttgtttccggggaacaatgacggggtgggagaggggagaggagagagtttgggaaagggagatggagaagaactcaaggacattgcaaccctgcccggcgcagatctgattttcacatctctacctggacattgagcctccaggcaccatgttgaggagagatgaaaaccagggcggtagaacttcagggtgaaggacagagtcctgggtggggcagcggctgcagggcgcaccagagaacccagccagaggggttgtgagtaccagtggtgttgcttccaccctgcagcaggtgggatgaggtctgtgtgtgtgtgtgaaccatcattttttgatcatcatgaccaatgaaacattga

SEQ ID NO: 186705 - DNA, 2288 bp, Homo sapiens
  Payload ID: 16766
  Gene Symbol: STMN4
  Gene Name: stathmin-like 4
  Uniprot ID: Q9H169
  ENST ID: ENST00000350889
  CDS Start-End: 115-765
gaggaagagagcagctcgcttctaactggactgcacgttggtgacagcgtcccaagctggtgacagacccactctgtaactttcagctagattcagccaccagatcccagaaacatgacccttgctgcctacaaagagaagatgaaggagctcccgctggtgtccttgttctgctcctgcttcctggccgatcccctgaataagtcgtcctacaaatatgaaggctggtgtgggagacagtgtaggaggaaggatgaaagccagcggaaagacagtgctgactggagagaaagaagagctcaggcagacacggtggacctgaattggtgcgtcatttccgacatggaagtcatcgagctgaacaaatgcacctcgggccaatcctttgaagtcatcctgaagccaccctcctttgatggggttcccgagttcaacgcctccctgccaaggcggcgagacccatccctggaagagatccagaagaaactagaagcggctgaggagcgaaggaagtaccaggaagcggagctcctgaaacacctagcagagaaacgggaacatgagagagaggtgatccaaaaggccattgaggaaaacaacaacttcatcaagatggctaaggaaaaactggcccagaagatggaatccaacaaggagaacagggaggcccacctcgccgccatgttggaacggctgcaagagaaggacaagcacgccgaggaggtgcggaaaaacaaggagctgaaggaagaggcctccaggtaaagcctagaggccaaagaactttccaggtcagccggacagctccagcagctccacgttccaggcagcctcgcccgccggctgcgctcccagcactggggtttggggggaggggggtggccaaggggcgtttcctctgcttttggtgtttgtacatgttaagaattgaccagtgaagccatcctatttgtttccggggaacaatgacggggtgggagaggggagaggagagagtttgggaaagggagatggagaagaactcaaggacattgcaaccctgcccggcgcagatctgattttcacatctctacctggacattgagcctccaggcaccatgttgaggagagatgaaaaccagggcggtagaacttcagggtgaaggacagagtcctgggtggggcagcggctgcagggcgcaccagagaacccagccagaggggttgtgagtaccagtggtgttgcttccaccctgcagcaggtgggatgaggtctgtgtgtgtgtgtgaaccatcattttttgatcatcatgaccaatgaaacattgactccaagtgtccagttctttatttcccaaatgtgtcctttgggtaattgttaaaaagttctcgaaacctggctttcatccatctgatggcagatgcccctttgcttccttaattctgccattcaagcatctggagcctgggtgaggtgggttgaatcaggccagcctttggcataattgaaaggttttctcttctgttttttaaaatcccctctgtgggctaatctttattggatagcatgcactaaattgatgagaaaagaaactcaatcttcctttcaatgaactgacatcctaatatggtccccaagatgcactgtaagaaggaatttgtcttagtcacaaccgttcagactgctgtaacaaaataccttagactaagtaattgataacagaaattgattgctcacagttttggaggctgggaagtccaatatcaaggtgccagcagattcagtgtctggtgagggcttgccatctgcttcaaagatgatgcctttttgctgcatcctcacatggcagaagggaagggcaaaagggcttccttgagccttttctttaaggcactaatcccattcatgaaggtggagtcctcatgatctcacctcttaaggccctatctcttaattctgtagtgtcgggattaggattcaacctgtatattgggggagacagcaacattcacaccatagcagaagtcctccatgctttgggggtttgagattctaggtagattagaaaatacgagcaaggaaataaagtgtttgctagtagaaggcaaaggaggcatccagacccagcagtcttggtctccaggacactgaaccatggctggaaaagaagctctcctcctcccttcccctgcaaacatgagtgcaggggctgcctgtgttaaccgggtcccaggacctcttcccactctgctctgcacactgtgtagttttttacagctttgcaaataaaccctttggtatagccttt

SEQ ID NO: 186706 - DNA, 1224 bp, Homo sapiens
  Payload ID: 16766
  Gene Symbol: STMN4
  Gene Name: stathmin-like 4
  Uniprot ID: Q9H169
  ENST ID: ENST00000523048
  CDS Start-End: 149-760
gagagaagcccagggtaccactaattgagggagtgaggaagagagcagctcgcttctaactggactgcacgttggtgacagcgtcccaagctggtgacagacccactctgtaactttcagctagattcagccaccagatcccagaaacatgacccttgctgcctacaaagagaagatgaaggagctcccgctggtgtccttgttctgctcctgcttcctggccgatcccctgaataagtcgtcctacaaatatgaaggctggtgtgggagacagtgtaggaggaaggatgaaagccagcggaaagacagtgctgactggagagaaagaagagctcaggcagacacggtggacctgaattggtgcgtcatttccgacatggaagtcatcgagctgaacaaatgcacctcgggccaatcctttgaagtcatcctgaagccaccctcctttgatggggttcccgagttcaacgcctccctgccaaggcggcgagacccatccctggaagagatccagaagaaactagaagcggctgaggagcgaaggaagtaccaggaagcggagctcctgaaacacctagcagagaaacgggaacatgagagagaggtgatccaaaaggccattgaggaaaacaacaacttcatcaagatggctaaggaaaaactggcccagaagatggaatccaacaaggagaacagggaggcccacctcgccgccatgttggaacggctgcaagagaaggaaccgcctgctgcgcggtgactcccgggacctgatcggtggcctcgtcccatggacaagcacgccgaggaggtgcggaaaaacaaggagctgaaggaagaggcctccaggtaaagcctagaggccaaagaactttccaggtcagccggacagctccagcagctccacgttccaggcagcctcgcccgccggctgcgctcccagcactggggtttggggggaggggggtggccaaggggcgtttcctctgcttttggtgtttgtacatgttaagaattgaccagtgaagccatcctatttgtttccggggaacaatgacggggtgggagaggggagaggagagagtttgggaaagggagatggagaagaactcaaggacattgcaaccctgcccggcgcagatctgattttcacatctctacctggacattgagcctccaggcaccatgttgaggagagatgaaaaccagggcggtagaacttca

SEQ ID NO: 186707 - DNA, 1623 bp, Homo sapiens
  Payload ID: 16766
  Gene Symbol: STMN4
  Gene Name: stathmin-like 4
  Uniprot ID: Q9H169
  ENST ID: ENST00000519997
  CDS Start-End: 66-569
actaattgagggagtgaggaagagagcagctcgcttctaactggactgcaccctacaaagagaagatgaaggagctcccgctggtgtccttgttctgctcctgcttcctggccgatcccctgaataagtcgtcctacaaatatgaagcagacacggtggacctgaattggtgcgtcatttccgacatggaagtcatcgagctgaacaaatgcacctcgggccaatcctttgaagtcatcctgaagccaccctcctttgatggggttcccgagttcaacgcctccctgccaaggcggcgagacccatccctggaagagatccagaagaaactagaagcggctgaggagcgaaggaagtaccaggaagcggagctcctgaaacacctagcagagaaacgggaacatgagagagaggtgatccaaaaggccattgaggaaaacaacaacttcatcaagatggctaaggaaaaactggcccagaagatggaatccaacaaggagaacagggaggcccacctcgccgccatgttggaacggctgcaagagaaggaaccgcctgctgcgcggtgactcccgggacctgatcggtggcctcgtcccatggacaagcacgccgaggaggtgcggaaaaacaaggagctgaaggaagaggcctccaggtaaagcctagaggccaaagaactttccaggtcagccggacagctccagcagctccacgttccaggcagcctcgcccgccggctgcgctcccagcactggggtttggggggaggggggtggccaaggggcgtttcctctgcttttggtgtttgtacatgttaagaattgaccagtgaagccatcctatttgtttccggggaacaatgacggggtgggagaggggagaggagagagtttgggaaagggagatggagaagaactcaaggacattgcaaccctgcccggcgcagatctgattttcacatctctacctggacattgagcctccaggcaccatgttgaggagagatgaaaaccagggcggtagaacttcagggtgaaggacagagtcctgggtggggcagcggctgcagggcgcaccagagaacccagccagaggggttgtgagtaccagtggtgttgcttccaccctgcagcaggtgggatgaggtctgtgtgtgtgtgtgaaccatcattttttgatcatcatgaccaatgaaacattgactccaagtgtccagttctttatttcccaaatgtgtcctttgggtaattgttaaaaagttctcgaaacctggctttcatccatctgatggcagatgcccctttgcttccttaattctgccattcaagcatctggagcctgggtgaggtgggttgaatcaggccagcctttggcataattgaaaggttttctcttctgttttttaaaatcccctctgtgggctaatctttattggatagcatgcactaaattgatgagaaaagaaactcaatcttcctttcaatgaactgacatcctaatatggtccccaagatgcactgtaagaaggaatttgtcttagtcacaaccgttcagactgctgtaacaaaataccttagactaagtaattgataacagaaattgattgctcacagttttgga

SEQ ID NO: 186708 - DNA, 1004 bp, Homo sapiens
  Payload ID: 16766
  Gene Symbol: STMN4
  Gene Name: stathmin-like 4
  ENST ID: ENST00000522908
  CDS Start-End: 133-909
accactaattgagggagtgaggaagagagcagctcgcttctaactggactgcacgttggtgacagcgtcccaagctggtgacagacccactctgtaactttcagctagattcagccaccagatcccagaaacatgacccttgctgcctacaaagagaagatgaaggagctcccgctggtgtccttgttctgctcctgcttcctggccgatcccctgaataagtcgtcctacaaatatgaaggctggtgtgggagacagtgtaggaggaaggatgaaagccagcggaaagacagtgctgactggagagaaagaagagctcaggcagacacggtggacctgaattggtgcgtcatttccgacatggaagtcatcgagctgaacaaatgcacctcgggccaatcctttgaagtcatcctgaagccaccctcctttgatggggttcccgagttcaacgcctccctgccaaggcggcgagacccatccctggaagagatccagaagaaactagaagcggctgaggagcgaaggaagtaccaggaagcggagctcctgaaacacctagcagagaaacgggaacatgagagagaggtgatccaaaaggccattgaggaaaacaacaacttcatcaagatggctaaggaaaaactggcccagaagatggaatccaacaaggagaacagggaggcccacctcgccgccatgttggaacggctgcaagagaaggtgaggggtccctggctagagaggagtttcctgggacatgctgttttccttctgcagcaagtatgcggggacctgctgatcatctcagggaggaagcagcctcaggcaaaaatcaggatctttttcttaggcaggatctttagagagttccgaaggatgatcagggaagtcagaggcaagaaataggaaccagactcagggtttccttgggggatattctgcacagttacacaattaaaatccttcattgccttagggagcatatatgtctgattttctag

SEQ ID NO: 186709 - DNA, 1273 bp, Homo sapiens
  Payload ID: 16766
  Gene Symbol: STMN4
  Gene Name: stathmin-like 4
  ENST ID: ENST00000519614
  CDS Start-End: 133-828
accactaattgagggagtgaggaagagagcagctcgcttctaactggactgcacgttggtgacagcgtcccaagctggtgacagacccactctgtaactttcagctagattcagccaccagatcccagaaacatgacccttgctgcctacaaagagaagatgaaggagctcccgctggtgtccttgttctgctcctgcttcctggccgatcccctgaataagtcgtcctacaaatatgaagcagacacggtggacctgaattggtgcgtcatttccgacatggaagtcatcgagctgaacaaatgcacctcgggccaatcctttgaagtcatcctgaagccaccctcctttgatggggttcccgagttcaacgcctccctgccaaggcggcgagacccatccctggaagagatccagaagaaactagaagcggctgaggagcgaaggaagtaccaggaagcggagctcctgaaacacctagcagagaaacgggaacatgagagagaggtgatccaaaaggccattgaggaaaacaacaacttcatcaagatggctaaggaaaaactggcccagaagatggaatccaacaaggagaacagggaggcccacctcgccgccatgttggaacggctgcaagagaaggtgaggggtccctggctagagaggagtttcctgggacatgctgttttccttctgcagcaagtatgcggggacctgctgatcatctcagggaggaagcagcctcaggcaaaaatcaggatctttttcttaggcaggatctttagagagttccgaaggatgatcagggaagtcagaggcaagaaataggaaccagactcagggtttccttgggggatattctgcacagttacacaattaaaatccttcattgccttagggagcatatatgtctgattttctagaagaagcctgtctaatacaaaggagtagagatagacaagcaggtatgcattcctagcttcatccctgaatggattgatttgatggaaggaaagatgctttcttgagctcttggctctaagtcacgggtatgatgagctgagattcccactgagcaggaaacatgattctctctaaacctcttgacacagacccagtgagtcacaggtctttccaatatgttgccttttgtcaataaatggaacggtgtcacctaaatatgagaaacatgaggccggggttggttctgtgtgtcagcagaataccggcccgttctgctgagaacacgctggcctcatttcctgagtctcaa

SEQ ID NO: 186710 - DNA, 3136 bp, Homo sapiens
  Payload ID: 16767
  Gene Symbol: STAU1
  Gene Name: staufen double-stranded RNA binding protein 1
  Uniprot ID: O95793
  ENST ID: ENST00000347458
  CDS Start-End: 291-1781
acttcctgccgggctgcgggcgcctgagcggctcttcagcgtttgcgccggcggctgccgcgtctctctcggctcccgcttcctttgaccgcctcccccccccggcccggcggcgcccgcctcctccacggccactccgcctcttccctcccttcgtcccttcttcctctcccttttttccttcttccttcccctcctcgccgccaccgcccaggaccgccggccgggggacgagctcggagcagcagccagaaagcataacccctactgtagaactaaatgcactgtgcatgaaacttggaaaaaaaccaatgtataagcctgttgacccttactctcggatgcagtccacctataactacaacatgagaggaggtgcttatcccccgaggtacttttacccatttccagttccacctttactttatcaagtggaactttctgtgggaggacagcaatttaatggcaaaggaaagacaagacaggctgcgaaacacgatgctgctgccaaagcgttgaggatcctgcagaatgagcccctgccagagaggctggaggtgaatggaagagaatccgaagaagaaaatctcaataaatctgaaataagtcaagtgtttgagattgcacttaaacggaacttgcctgtgaatttcgaggtggcccgggagagtggcccaccccacatgaagaactttgtgaccaaggtttcggttggggagtttgtgggggaaggtgaagggaaaagcaagaagatttcaaagaaaaatgccgccatagctgttcttgaggagctgaagaagttaccgcccctgcctgcagttgaacgagtaaagcctagaatcaaaaagaaaacaaaacccatagtcaagccacagacaagcccagaatatggccaggggatcaatccgattagccgactggcccagatccagcaggcaaaaaaggagaaggagccagagtacacgctcctcacagagcgaggcctcccgcgccgcagggagtttgtgatgcaggtgaaggttggaaaccacactgcagaaggaacgggcaccaacaagaaggtggccaagcgcaatgcagccgagaacatgctggagatccttggtttcaaagtcccgcaggcgcagcccaccaaacccgcactcaagtcagaggagaagacacccataaagaaaccaggggatggaagaaaagtaaccttttttgaacctggctctggggatgaaaatgggactagtaataaagaggatgagttcaggatgccttatctaagtcatcagcagctgcctgctggaattcttcccatggtgcccgaggtcgcccaggctgtaggagttagtcaaggacatcacaccaaagattttaccagggcagctccgaatcctgccaaggccacggtaactgccatgatagcccgagagttgttgtatgggggcacctcgcccacagccgagaccattttaaagaataacatctcttcaggccacgtaccccatggacctctcacgagaccctctgagcaactggactatctttccagagtccagggattccaggttgaatacaaagacttccccaaaaacaacaagaacgaatttgtatctcttatcaattgctcctctcagccacctctgatcagccatggtatcggcaaggatgtggagtcctgccatgatatggctgcgctgaacatcttaaagttgctgtctgagttggaccaacaaagtacagagatgccaagaacaggaaacggaccaatgtctgtgtgtgggaggtgctgaaccttttctggccatgaaccattataaaatcccaacatatatactgaaaatactgaaactgctttgaaaatttggaatttctgatacctccagtgggccgagagacacggtgggtaaaggatgtgggcagcagcagggaagacaacagaaacacaaggaggcggctgtggccgggctggactgtgctggggtttgttgtgatggccactcggtgacctggcggtccctacgcaatagcagctgcctgtggggaagaagggctgcccagccagctggttctcccgggacaccagcagatccacaccctgggcacctccgtgtttggtcttttttttcccctgtgtgaaagaagaaacggcacgaccccttctcaagctggctcactcagacacattgggacaaaccctggacagccatgccagagagaggcctttgaccggccccagagctaaaagcaccagagaaaatcaaatgcttcctactcagcgtgacccaacttttctagtgtgccacggccccaccacctcctgcagtacccacaccatcaccactgctttctcttccaacagtgatctgtattcttagtttcattattttcttttgattgatatgacactatataaaattttcatttgagaatttctcaattgtatctagttaaatagcacagtttggaaacttgtctgagactgactttatcaataatctaaccgacaaagatcatatccatgtgtatgtggttagacatttttatttcattgactaacccaggacagtttcagtgatgcaaattgtgtgccctctggttcagctgaaacagtcctggactttcaaaaaccttgaataagtctcccacagttgtataaattggacaatttaggaattttaaactttagatgatcatttggttccatttttatttcatttttatttttgttaatgcaaacaggacttaaatgaactttgatctctgttttaaagattattaaaaaacattgtgtatctatacatatggctcttgaggacttagctttcactacactacaggatatgatctccatgtagtccatataaacctgcagagtgattttccagagtgctcgatactgttaattacatctccattagggctgaaaagaatgacctacgtttctgtatacagctgtgttgcttttgatgttgtgttactgtacacagaagtgtgtgcactgaggctctgcgtgtggtccgtatggaaagcctggtagccctgcgagttaagtactgcttccattcattgtttacgctggaatttttctccccatggaatgtaagtaaaacttaagtgtttgtcatcaataaatggtaatactaaa

SEQ ID NO: 186711 - DNA, 3334 bp, Homo sapiens
  Payload ID: 16767
  Gene Symbol: STAU1
  Gene Name: staufen double-stranded RNA binding protein 1
  Uniprot ID: O95793
  ENST ID: ENST00000340954
  CDS Start-End: 489-1979
acttcctgccgggctgcgggcgcctgagcggctcttcagcgtttgcgccggcggctgccgcgtctctctcggctcccgcttcctttgaccgcctcccccccccggcccggcggcgcccgcctcctccacggccactccgcctcttccctcccttcgtcccttcttcctctcccttttttccttcttccttcccctcctcgccgccaccgcccaggaccgccggccgggggacgagctcggagcagcagccaggtggagttttgctcttgtcgcccaggctggagtgcagtggcgtgatctcggctcactgcaacctccacctcccaggttcaagcgattttcccacttcagcctcccgataagctgagattacagagtttattaaccacttaacctctcagaactgaacaaagacaacattgttcctggaacgccctctttttaaaaaagaaagcataacccctactgtagaactaaatgcactgtgcatgaaacttggaaaaaaaccaatgtataagcctgttgacccttactctcggatgcagtccacctataactacaacatgagaggaggtgcttatcccccgaggtacttttacccatttccagttccacctttactttatcaagtggaactttctgtgggaggacagcaatttaatggcaaaggaaagacaagacaggctgcgaaacacgatgctgctgccaaagcgttgaggatcctgcagaatgagcccctgccagagaggctggaggtgaatggaagagaatccgaagaagaaaatctcaataaatctgaaataagtcaagtgtttgagattgcacttaaacggaacttgcctgtgaatttcgaggtggcccgggagagtggcccaccccacatgaagaactttgtgaccaaggtttcggttggggagtttgtgggggaaggtgaagggaaaagcaagaagatttcaaagaaaaatgccgccatagctgttcttgaggagctgaagaagttaccgcccctgcctgcagttgaacgagtaaagcctagaatcaaaaagaaaacaaaacccatagtcaagccacagacaagcccagaatatggccaggggatcaatccgattagccgactggcccagatccagcaggcaaaaaaggagaaggagccagagtacacgctcctcacagagcgaggcctcccgcgccgcagggagtttgtgatgcaggtgaaggttggaaaccacactgcagaaggaacgggcaccaacaagaaggtggccaagcgcaatgcagccgagaacatgctggagatccttggtttcaaagtcccgcaggcgcagcccaccaaacccgcactcaagtcagaggagaagacacccataaagaaaccaggggatggaagaaaagtaaccttttttgaacctggctctggggatgaaaatgggactagtaataaagaggatgagttcaggatgccttatctaagtcatcagcagctgcctgctggaattcttcccatggtgcccgaggtcgcccaggctgtaggagttagtcaaggacatcacaccaaagattttaccagggcagctccgaatcctgccaaggccacggtaactgccatgatagcccgagagttgttgtatgggggcacctcgcccacagccgagaccattttaaagaataacatctcttcaggccacgtaccccatggacctctcacgagaccctctgagcaactggactatctttccagagtccagggattccaggttgaatacaaagacttccccaaaaacaacaagaacgaatttgtatctcttatcaattgctcctctcagccacctctgatcagccatggtatcggcaaggatgtggagtcctgccatgatatggctgcgctgaacatcttaaagttgctgtctgagttggaccaacaaagtacagagatgccaagaacaggaaacggaccaatgtctgtgtgtgggaggtgctgaaccttttctggccatgaaccattataaaatcccaacatatatactgaaaatactgaaactgctttgaaaatttggaatttctgatacctccagtgggccgagagacacggtgggtaaaggatgtgggcagcagcagggaagacaacagaaacacaaggaggcggctgtggccgggctggactgtgctggggtttgttgtgatggccactcggtgacctggcggtccctacgcaatagcagctgcctgtggggaagaagggctgcccagccagctggttctcccgggacaccagcagatccacaccctgggcacctccgtgtttggtcttttttttcccctgtgtgaaagaagaaacggcacgaccccttctcaagctggctcactcagacacattgggacaaaccctggacagccatgccagagagaggcctttgaccggccccagagctaaaagcaccagagaaaatcaaatgcttcctactcagcgtgacccaacttttctagtgtgccacggccccaccacctcctgcagtacccacaccatcaccactgctttctcttccaacagtgatctgtattcttagtttcattattttcttttgattgatatgacactatataaaattttcatttgagaatttctcaattgtatctagttaaatagcacagtttggaaacttgtctgagactgactttatcaataatctaaccgacaaagatcatatccatgtgtatgtggttagacatttttatttcattgactaacccaggacagtttcagtgatgcaaattgtgtgccctctggttcagctgaaacagtcctggactttcaaaaaccttgaataagtctcccacagttgtataaattggacaatttaggaattttaaactttagatgatcatttggttccatttttatttcatttttatttttgttaatgcaaacaggacttaaatgaactttgatctctgttttaaagattattaaaaaacattgtgtatctatacatatggctcttgaggacttagctttcactacactacaggatatgatctccatgtagtccatataaacctgcagagtgattttccagagtgctcgatactgttaattacatctccattagggctgaaaagaatgacctacgtttctgtatacagctgtgttgcttttgatgttgtgttactgtacacagaagtgtgtgcactgaggctctgcgtgtggtccgtatggaaagcctggtagccctgcgagttaagtactgcttccattcattgtttacgctggaatttttctccccatggaatgtaagtaaaacttaagtgtttgtcatcaataaatggtaatactaaa

SEQ ID NO: 186712 - DNA, 3211 bp, Homo sapiens
  Payload ID: 16767
  Gene Symbol: STAU1
  Gene Name: staufen double-stranded RNA binding protein 1
  Uniprot ID: O95793
  ENST ID: ENST00000360426
  CDS Start-End: 366-1856
acttcctgccgggctgcgggcgcctgagcggctcttcagcgtttgcgccggcggctgccgcgtctctctcggctcccgcttcctttgaccgcctcccccccccggcccggcggcgcccgcctcctccacggccactccgcctcttccctcccttcgtcccttcttcctctcccttttttccttcttccttcccctcctcgccgccaccgcccaggaccgccggccgggggacgagctcggagcagcagccagagtttattaaccacttaacctctcagaactgaacaaagacaacattgttcctggaacgccctctttttaaaaaagaaagcataacccctactgtagaactaaatgcactgtgcatgaaacttggaaaaaaaccaatgtataagcctgttgacccttactctcggatgcagtccacctataactacaacatgagaggaggtgcttatcccccgaggtacttttacccatttccagttccacctttactttatcaagtggaactttctgtgggaggacagcaatttaatggcaaaggaaagacaagacaggctgcgaaacacgatgctgctgccaaagcgttgaggatcctgcagaatgagcccctgccagagaggctggaggtgaatggaagagaatccgaagaagaaaatctcaataaatctgaaataagtcaagtgtttgagattgcacttaaacggaacttgcctgtgaatttcgaggtggcccgggagagtggcccaccccacatgaagaactttgtgaccaaggtttcggttggggagtttgtgggggaaggtgaagggaaaagcaagaagatttcaaagaaaaatgccgccatagctgttcttgaggagctgaagaagttaccgcccctgcctgcagttgaacgagtaaagcctagaatcaaaaagaaaacaaaacccatagtcaagccacagacaagcccagaatatggccaggggatcaatccgattagccgactggcccagatccagcaggcaaaaaaggagaaggagccagagtacacgctcctcacagagcgaggcctcccgcgccgcagggagtttgtgatgcaggtgaaggttggaaaccacactgcagaaggaacgggcaccaacaagaaggtggccaagcgcaatgcagccgagaacatgctggagatccttggtttcaaagtcccgcaggcgcagcccaccaaacccgcactcaagtcagaggagaagacacccataaagaaaccaggggatggaagaaaagtaaccttttttgaacctggctctggggatgaaaatgggactagtaataaagaggatgagttcaggatgccttatctaagtcatcagcagctgcctgctggaattcttcccatggtgcccgaggtcgcccaggctgtaggagttagtcaaggacatcacaccaaagattttaccagggcagctccgaatcctgccaaggccacggtaactgccatgatagcccgagagttgttgtatgggggcacctcgcccacagccgagaccattttaaagaataacatctcttcaggccacgtaccccatggacctctcacgagaccctctgagcaactggactatctttccagagtccagggattccaggttgaatacaaagacttccccaaaaacaacaagaacgaatttgtatctcttatcaattgctcctctcagccacctctgatcagccatggtatcggcaaggatgtggagtcctgccatgatatggctgcgctgaacatcttaaagttgctgtctgagttggaccaacaaagtacagagatgccaagaacaggaaacggaccaatgtctgtgtgtgggaggtgctgaaccttttctggccatgaaccattataaaatcccaacatatatactgaaaatactgaaactgctttgaaaatttggaatttctgatacctccagtgggccgagagacacggtgggtaaaggatgtgggcagcagcagggaagacaacagaaacacaaggaggcggctgtggccgggctggactgtgctggggtttgttgtgatggccactcggtgacctggcggtccctacgcaatagcagctgcctgtggggaagaagggctgcccagccagctggttctcccgggacaccagcagatccacaccctgggcacctccgtgtttggtcttttttttcccctgtgtgaaagaagaaacggcacgaccccttctcaagctggctcactcagacacattgggacaaaccctggacagccatgccagagagaggcctttgaccggccccagagctaaaagcaccagagaaaatcaaatgcttcctactcagcgtgacccaacttttctagtgtgccacggccccaccacctcctgcagtacccacaccatcaccactgctttctcttccaacagtgatctgtattcttagtttcattattttcttttgattgatatgacactatataaaattttcatttgagaatttctcaattgtatctagttaaatagcacagtttggaaacttgtctgagactgactttatcaataatctaaccgacaaagatcatatccatgtgtatgtggttagacatttttatttcattgactaacccaggacagtttcagtgatgcaaattgtgtgccctctggttcagctgaaacagtcctggactttcaaaaaccttgaataagtctcccacagttgtataaattggacaatttaggaattttaaactttagatgatcatttggttccatttttatttcatttttatttttgttaatgcaaacaggacttaaatgaactttgatctctgttttaaagattattaaaaaacattgtgtatctatacatatggctcttgaggacttagctttcactacactacaggatatgatctccatgtagtccatataaacctgcagagtgattttccagagtgctcgatactgttaattacatctccattagggctgaaaagaatgacctacgtttctgtatacagctgtgttgcttttgatgttgtgttactgtacacagaagtgtgtgcactgaggctctgcgtgtggtccgtatggaaagcctggtagccctgcgagttaagtactgcttccattcattgtttacgctggaatttttctccccatggaatgtaagtaaaacttaagtgtttgtcatcaataaatggtaatactaaa

SEQ ID NO: 186713 - DNA, 3130 bp, Homo sapiens
  Payload ID: 16767
  Gene Symbol: STAU1
  Gene Name: staufen double-stranded RNA binding protein 1
  ENST ID: ENST00000371792
  CDS Start-End: 291-1775
acttcctgccgggctgcgggcgcctgagcggctcttcagcgtttgcgccggcggctgccgcgtctctctcggctcccgcttcctttgaccgcctcccccccccggcccggcggcgcccgcctcctccacggccactccgcctcttccctcccttcgtcccttcttcctctcccttttttccttcttccttcccctcctcgccgccaccgcccaggaccgccggccgggggacgagctcggagcagcagccagaaagcataacccctactgtagaactaaatgcactgtgcatgaaacttggaaaaaaaccaatgtataagcctgttgacccttactctcggatgcagtccacctataactacaacatgagaggaggtgcttatcccccgaggtacttttacccatttccagttccacctttactttatcaagtggaactttctgtgggaggacagcaatttaatggcaaaggaaagacaagacaggctgcgaaacacgatgctgctgccaaagcgttgaggatcctgcagaatgagcccctgccagagaggctggaggtgaatggaagagaatccgaagaagaaaatctcaataaatctgaaataagtcaagtgtttgagattgcacttaaacggaacttgcctgtgaatttcgaggtggcccgggagagtggcccaccccacatgaagaactttgtgaccaaggtttcggttggggagtttgtgggggaaggtgaagggaaaagcaagaagatttcaaagaaaaatgccgccatagctgttcttgaggagctgaagaagttaccgcccctgcctgcagttgaacgagtaaagcctagaatcaaaaagaaaacaaaacccatagtcaagacaagcccagaatatggccaggggatcaatccgattagccgactggcccagatccagcaggcaaaaaaggagaaggagccagagtacacgctcctcacagagcgaggcctcccgcgccgcagggagtttgtgatgcaggtgaaggttggaaaccacactgcagaaggaacgggcaccaacaagaaggtggccaagcgcaatgcagccgagaacatgctggagatccttggtttcaaagtcccgcaggcgcagcccaccaaacccgcactcaagtcagaggagaagacacccataaagaaaccaggggatggaagaaaagtaaccttttttgaacctggctctggggatgaaaatgggactagtaataaagaggatgagttcaggatgccttatctaagtcatcagcagctgcctgctggaattcttcccatggtgcccgaggtcgcccaggctgtaggagttagtcaaggacatcacaccaaagattttaccagggcagctccgaatcctgccaaggccacggtaactgccatgatagcccgagagttgttgtatgggggcacctcgcccacagccgagaccattttaaagaataacatctcttcaggccacgtaccccatggacctctcacgagaccctctgagcaactggactatctttccagagtccagggattccaggttgaatacaaagacttccccaaaaacaacaagaacgaatttgtatctcttatcaattgctcctctcagccacctctgatcagccatggtatcggcaaggatgtggagtcctgccatgatatggctgcgctgaacatcttaaagttgctgtctgagttggaccaacaaagtacagagatgccaagaacaggaaacggaccaatgtctgtgtgtgggaggtgctgaaccttttctggccatgaaccattataaaatcccaacatatatactgaaaatactgaaactgctttgaaaatttggaatttctgatacctccagtgggccgagagacacggtgggtaaaggatgtgggcagcagcagggaagacaacagaaacacaaggaggcggctgtggccgggctggactgtgctggggtttgttgtgatggccactcggtgacctggcggtccctacgcaatagcagctgcctgtggggaagaagggctgcccagccagctggttctcccgggacaccagcagatccacaccctgggcacctccgtgtttggtcttttttttcccctgtgtgaaagaagaaacggcacgaccccttctcaagctggctcactcagacacattgggacaaaccctggacagccatgccagagagaggcctttgaccggccccagagctaaaagcaccagagaaaatcaaatgcttcctactcagcgtgacccaacttttctagtgtgccacggccccaccacctcctgcagtacccacaccatcaccactgctttctcttccaacagtgatctgtattcttagtttcattattttcttttgattgatatgacactatataaaattttcatttgagaatttctcaattgtatctagttaaatagcacagtttggaaacttgtctgagactgactttatcaataatctaaccgacaaagatcatatccatgtgtatgtggttagacatttttatttcattgactaacccaggacagtttcagtgatgcaaattgtgtgccctctggttcagctgaaacagtcctggactttcaaaaaccttgaataagtctcccacagttgtataaattggacaatttaggaattttaaactttagatgatcatttggttccatttttatttcatttttatttttgttaatgcaaacaggacttaaatgaactttgatctctgttttaaagattattaaaaaacattgtgtatctatacatatggctcttgaggacttagctttcactacactacaggatatgatctccatgtagtccatataaacctgcagagtgattttccagagtgctcgatactgttaattacatctccattagggctgaaaagaatgacctacgtttctgtatacagctgtgttgcttttgatgttgtgttactgtacacagaagtgtgtgcactgaggctctgcgtgtggtccgtatggaaagcctggtagccctgcgagttaagtactgcttccattcattgtttacgctggaatttttctccccatggaatgtaagtaaaacttaagtgtttgtcatcaataaatggtaatactaaa

SEQ ID NO: 186714 - DNA, 3154 bp, Homo sapiens
  Payload ID: 16767
  Gene Symbol: STAU1
  Gene Name: staufen double-stranded RNA binding protein 1
  Uniprot ID: O95793
  ENST ID: ENST00000371802
  CDS Start-End: 291-1799
acttcctgccgggctgcgggcgcctgagcggctcttcagcgtttgcgccggcggctgccgcgtctctctcggctcccgcttcctttgaccgcctcccccccccggcccggcggcgcccgcctcctccacggccactccgcctcttccctcccttcgtcccttcttcctctcccttttttccttcttccttcccctcctcgccgccaccgcccaggaccgccggccgggggacgagctcggagcagcagccagaaagcataacccctactgtagaactaaatgcactgtgcatgaaacttggaaaaaaaccaatgtataagcctgttgacccttactctcggatgcagtccacctataactacaacatgagaggaggtgcttatcccccgaggtacttttacccatttccagttccacctttactttatcaagtggaactttctgtgggaggacagcaatttaatggcaaaggaaagacaagacaggctgcgaaacacgatgctgctgccaaagcgttgaggatcctgcagaatgagcccctgccagagaggctggaggtgaatggaagagaatccgaagaagaaaatctcaataaatctgaaataagtcaagtgtttgagattgcacttaaacggaacttgcctgtgaatttcgagtctttccctctgaaacaggtggcccgggagagtggcccaccccacatgaagaactttgtgaccaaggtttcggttggggagtttgtgggggaaggtgaagggaaaagcaagaagatttcaaagaaaaatgccgccatagctgttcttgaggagctgaagaagttaccgcccctgcctgcagttgaacgagtaaagcctagaatcaaaaagaaaacaaaacccatagtcaagccacagacaagcccagaatatggccaggggatcaatccgattagccgactggcccagatccagcaggcaaaaaaggagaaggagccagagtacacgctcctcacagagcgaggcctcccgcgccgcagggagtttgtgatgcaggtgaaggttggaaaccacactgcagaaggaacgggcaccaacaagaaggtggccaagcgcaatgcagccgagaacatgctggagatccttggtttcaaagtcccgcaggcgcagcccaccaaacccgcactcaagtcagaggagaagacacccataaagaaaccaggggatggaagaaaagtaaccttttttgaacctggctctggggatgaaaatgggactagtaataaagaggatgagttcaggatgccttatctaagtcatcagcagctgcctgctggaattcttcccatggtgcccgaggtcgcccaggctgtaggagttagtcaaggacatcacaccaaagattttaccagggcagctccgaatcctgccaaggccacggtaactgccatgatagcccgagagttgttgtatgggggcacctcgcccacagccgagaccattttaaagaataacatctcttcaggccacgtaccccatggacctctcacgagaccctctgagcaactggactatctttccagagtccagggattccaggttgaatacaaagacttccccaaaaacaacaagaacgaatttgtatctcttatcaattgctcctctcagccacctctgatcagccatggtatcggcaaggatgtggagtcctgccatgatatggctgcgctgaacatcttaaagttgctgtctgagttggaccaacaaagtacagagatgccaagaacaggaaacggaccaatgtctgtgtgtgggaggtgctgaaccttttctggccatgaaccattataaaatcccaacatatatactgaaaatactgaaactgctttgaaaatttggaatttctgatacctccagtgggccgagagacacggtgggtaaaggatgtgggcagcagcagggaagacaacagaaacacaaggaggcggctgtggccgggctggactgtgctggggtttgttgtgatggccactcggtgacctggcggtccctacgcaatagcagctgcctgtggggaagaagggctgcccagccagctggttctcccgggacaccagcagatccacaccctgggcacctccgtgtttggtcttttttttcccctgtgtgaaagaagaaacggcacgaccccttctcaagctggctcactcagacacattgggacaaaccctggacagccatgccagagagaggcctttgaccggccccagagctaaaagcaccagagaaaatcaaatgcttcctactcagcgtgacccaacttttctagtgtgccacggccccaccacctcctgcagtacccacaccatcaccactgctttctcttccaacagtgatctgtattcttagtttcattattttcttttgattgatatgacactatataaaattttcatttgagaatttctcaattgtatctagttaaatagcacagtttggaaacttgtctgagactgactttatcaataatctaaccgacaaagatcatatccatgtgtatgtggttagacatttttatttcattgactaacccaggacagtttcagtgatgcaaattgtgtgccctctggttcagctgaaacagtcctggactttcaaaaaccttgaataagtctcccacagttgtataaattggacaatttaggaattttaaactttagatgatcatttggttccatttttatttcatttttatttttgttaatgcaaacaggacttaaatgaactttgatctctgttttaaagattattaaaaaacattgtgtatctatacatatggctcttgaggacttagctttcactacactacaggatatgatctccatgtagtccatataaacctgcagagtgattttccagagtgctcgatactgttaattacatctccattagggctgaaaagaatgacctacgtttctgtatacagctgtgttgcttttgatgttgtgttactgtacacagaagtgtgtgcactgaggctctgcgtgtggtccgtatggaaagcctggtagccctgcgagttaagtactgcttccattcattgtttacgctggaatttttctccccatggaatgtaagtaaaacttaagtgtttgtcatcaataaatggtaatactaaa

SEQ ID NO: 186715 - DNA, 3411 bp, Homo sapiens
  Payload ID: 16767
  Gene Symbol: STAU1
  Gene Name: staufen double-stranded RNA binding protein 1
  Uniprot ID: O95793
  ENST ID: ENST00000371828
  CDS Start-End: 366-1874
acttcctgccgggctgcgggcgcctgagcggctcttcagcgtttgcgccggcggctgccgcgtctctctcggctcccgcttcctttgaccgcctcccccccccggcccggcggcgcccgcctcctccacggccactccgcctcttccctcccttcgtcccttcttcctctcccttttttccttcttccttcccctcctcgccgccaccgcccaggaccgccggccgggggacgagctcggagcagcagccagagtttattaaccacttaacctctcagaactgaacaaagacaacattgttcctggaacgccctctttttaaaaaagaaagcataacccctactgtagaactaaatgcactgtgcatgaaacttggaaaaaaaccaatgtataagcctgttgacccttactctcggatgcagtccacctataactacaacatgagaggaggtgcttatcccccgaggtacttttacccatttccagttccacctttactttatcaagtggaactttctgtgggaggacagcaatttaatggcaaaggaaagacaagacaggctgcgaaacacgatgctgctgccaaagcgttgaggatcctgcagaatgagcccctgccagagaggctggaggtgaatggaagagaatccgaagaagaaaatctcaataaatctgaaataagtcaagtgtttgagattgcacttaaacggaacttgcctgtgaatttcgagtctttccctctgaaacaggtggcccgggagagtggcccaccccacatgaagaactttgtgaccaaggtttcggttggggagtttgtgggggaaggtgaagggaaaagcaagaagatttcaaagaaaaatgccgccatagctgttcttgaggagctgaagaagttaccgcccctgcctgcagttgaacgagtaaagcctagaatcaaaaagaaaacaaaacccatagtcaagccacagacaagcccagaatatggccaggggatcaatccgattagccgactggcccagatccagcaggcaaaaaaggagaaggagccagagtacacgctcctcacagagcgaggcctcccgcgccgcagggagtttgtgatgcaggtgaaggttggaaaccacactgcagaaggaacgggcaccaacaagaaggtggccaagcgcaatgcagccgagaacatgctggagatccttggtttcaaagtcccgcaggcgcagcccaccaaacccgcactcaagtcagaggagaagacacccataaagaaaccaggggatggaagaaaagtaaccttttttgaacctggctctggggatgaaaatgggactagtaataaagaggatgagttcaggatgccttatctaagtcatcagcagctgcctgctggaattcttcccatggtgcccgaggtcgcccaggctgtaggagttagtcaaggacatcacaccaaagattttaccagggcagctccgaatcctgccaaggccacggtaactgccatgatagcccgagagttgttgtatgggggcacctcgcccacagccgagaccattttaaagaataacatctcttcaggccacgtaccccatggacctctcacgagaccctctgagcaactggactatctttccagagtccagggattccaggttgaatacaaagacttccccaaaaacaacaagaacgaatttgtatctcttatcaattgctcctctcagccacctctgatcagccatggtatcggcaaggatgtggagtcctgccatgatatggctgcgctgaacatcttaaagttgctgtctgagttggaccaacaaagtacagagatgccaagaacaggaaacggaccaatgtctgtgtgtgggaggtgctgaaccttttctggccatgaaccattataaaatcccaacatatatactgaaaatactgaaactgctttgaaaatttggaatttctgatacctccagtgggccgagagacacggtgggtaaaggatgtgggcagcagcagggaagacaacagaaacacaaggaggcggctgtggccgggctggactgtgctggggtttgttgtgatggccactcggtgacctggcggtccctacgcaatagcagctgcctgtggggaagaagggctgcccagccagctggttctcccgggacaccagcagatccacaccctgggcacctccgtgtttggtcttttttttcccctgtgtgaaagaagaaacggcacgaccccttctcaagctggctcactcagacacattgggacaaaccctggacagccatgccagagagaggcctttgaccggccccagagctaaaagcaccagagaaaatcaaatgcttcctactcagcgtgacccaacttttctagtgtgccacggccccaccacctcctgcagtacccacaccatcaccactgctttctcttccaacagtgatctgtattcttagtttcattattttcttttgattgatatgacactatataaaattttcatttgagaatttctcaattgtatctagttaaatagcacagtttggaaacttgtctgagactgactttatcaataatctaaccgacaaagatcatatccatgtgtatgtggttagacatttttatttcattgactaacccaggacagtttcagtgatgcaaattgtgtgccctctggttcagctgaaacagtcctggactttcaaaaaccttgaataagtctcccacagttgtataaattggacaatttaggaattttaaactttagatgatcatttggttccatttttatttcatttttatttttgttaatgcaaacaggacttaaatgaactttgatctctgttttaaagattattaaaaaacattgtgtatctatacatatggctcttgaggacttagctttcactacactacaggatatgatctccatgtagtccatataaacctgcagagtgattttccagagtgctcgatactgttaattacatctccattagggctgaaaagaatgacctacgtttctgtatacagctgtgttgcttttgatgttgtgttactgtacacagaagtgtgtgcactgaggctctgcgtgtggtccgtatggaaagcctggtagccctgcgagttaagtactgcttccattcattgtttacgctggaatttttctccccatggaatgtaagtaaaacttaagtgtttgtcatcaataaatggtaatactaaatttttttgttaatttattctcaaatgccactactgctaggttggtcccctcccaacttgcccctatcctttttttatttttaagaaaaaaactttgtaatgcttgtgattccatctgggcaaaagtctgaagatctgaaataactttatatcaaaccattgatcaataaacagctactaatg

SEQ ID NO: 186716 - DNA, 3684 bp, Homo sapiens
  Payload ID: 16767
  Gene Symbol: STAU1
  Gene Name: staufen double-stranded RNA binding protein 1
  Uniprot ID: O95793
  ENST ID: ENST00000371856
  CDS Start-End: 412-2145
acttcctgccgggctgcgggcgcctgagcggctcttcagcgtttgcgccggcggctgccgcgtctctctcggctcccgcttcctttgaccgcctcccccccccggcccggcggcgcccgcctcctccacggccactccgcctcttccctcccttcgtcccttcttcctctcccttttttccttcttccttcccctcctcgccgccaccgcccaggaccgccggccgggggacgagctcggagcagcagccagagtttattaaccacttaacctctcagaactgaacaaagacaacattgttcctggaacgccctctttttaaaaaaggtagaactttagacttcatagcactgaattaacctgcactgaaagctgtttacctgcatttgttcacttttgttgaaagtgaccatgtctcaagttcaagtgcaagttcagaacccatctgctgctctctcagggagccaaatactgaacaagaaccagtctcttctctcacagcctttgatgagtattccttctactactagctctctgccctctgaaaatgcaggtagacccattcaaaactctgctttaccctctgcatctattacatccaccagtgcagctgcagaaagcataacccctactgtagaactaaatgcactgtgcatgaaacttggaaaaaaaccaatgtataagcctgttgacccttactctcggatgcagtccacctataactacaacatgagaggaggtgcttatcccccgaggtacttttacccatttccagttccacctttactttatcaagtggaactttctgtgggaggacagcaatttaatggcaaaggaaagacaagacaggctgcgaaacacgatgctgctgccaaagcgttgaggatcctgcagaatgagcccctgccagagaggctggaggtgaatggaagagaatccgaagaagaaaatctcaataaatctgaaataagtcaagtgtttgagattgcacttaaacggaacttgcctgtgaatttcgaggtggcccgggagagtggcccaccccacatgaagaactttgtgaccaaggtttcggttggggagtttgtgggggaaggtgaagggaaaagcaagaagatttcaaagaaaaatgccgccatagctgttcttgaggagctgaagaagttaccgcccctgcctgcagttgaacgagtaaagcctagaatcaaaaagaaaacaaaacccatagtcaagccacagacaagcccagaatatggccaggggatcaatccgattagccgactggcccagatccagcaggcaaaaaaggagaaggagccagagtacacgctcctcacagagcgaggcctcccgcgccgcagggagtttgtgatgcaggtgaaggttggaaaccacactgcagaaggaacgggcaccaacaagaaggtggccaagcgcaatgcagccgagaacatgctggagatccttggtttcaaagtcccgcaggcgcagcccaccaaacccgcactcaagtcagaggagaagacacccataaagaaaccaggggatggaagaaaagtaaccttttttgaacctggctctggggatgaaaatgggactagtaataaagaggatgagttcaggatgccttatctaagtcatcagcagctgcctgctggaattcttcccatggtgcccgaggtcgcccaggctgtaggagttagtcaaggacatcacaccaaagattttaccagggcagctccgaatcctgccaaggccacggtaactgccatgatagcccgagagttgttgtatgggggcacctcgcccacagccgagaccattttaaagaataacatctcttcaggccacgtaccccatggacctctcacgagaccctctgagcaactggactatctttccagagtccagggattccaggttgaatacaaagacttccccaaaaacaacaagaacgaatttgtatctcttatcaattgctcctctcagccacctctgatcagccatggtatcggcaaggatgtggagtcctgccatgatatggctgcgctgaacatcttaaagttgctgtctgagttggaccaacaaagtacagagatgccaagaacaggaaacggaccaatgtctgtgtgtgggaggtgctgaaccttttctggccatgaaccattataaaatcccaacatatatactgaaaatactgaaactgctttgaaaatttggaatttctgatacctccagtgggccgagagacacggtgggtaaaggatgtgggcagcagcagggaagacaacagaaacacaaggaggcggctgtggccgggctggactgtgctggggtttgttgtgatggccactcggtgacctggcggtccctacgcaatagcagctgcctgtggggaagaagggctgcccagccagctggttctcccgggacaccagcagatccacaccctgggcacctccgtgtttggtcttttttttcccctgtgtgaaagaagaaacggcacgaccccttctcaagctggctcactcagacacattgggacaaaccctggacagccatgccagagagaggcctttgaccggccccagagctaaaagcaccagagaaaatcaaatgcttcctactcagcgtgacccaacttttctagtgtgccacggccccaccacctcctgcagtacccacaccatcaccactgctttctcttccaacagtgatctgtattcttagtttcattattttcttttgattgatatgacactatataaaattttcatttgagaatttctcaattgtatctagttaaatagcacagtttggaaacttgtctgagactgactttatcaataatctaaccgacaaagatcatatccatgtgtatgtggttagacatttttatttcattgactaacccaggacagtttcagtgatgcaaattgtgtgccctctggttcagctgaaacagtcctggactttcaaaaaccttgaataagtctcccacagttgtataaattggacaatttaggaattttaaactttagatgatcatttggttccatttttatttcatttttatttttgttaatgcaaacaggacttaaatgaactttgatctctgttttaaagattattaaaaaacattgtgtatctatacatatggctcttgaggacttagctttcactacactacaggatatgatctccatgtagtccatataaacctgcagagtgattttccagagtgctcgatactgttaattacatctccattagggctgaaaagaatgacctacgtttctgtatacagctgtgttgcttttgatgttgtgttactgtacacagaagtgtgtgcactgaggctctgcgtgtggtccgtatggaaagcctggtagccctgcgagttaagtactgcttccattcattgtttacgctggaatttttctccccatggaatgtaagtaaaacttaagtgtttgtcatcaataaatggtaatactaaatttttttgttaatttattctcaaatgccactactgctaggttggtcccctcccaacttgcccctatcctttttttatttttaagaaaaaaactttgtaatgcttgtgattccatctgggcaaaagtctgaagatctgaaataactttatatcaaaccattgatcaataaacagctactaatgaa

SEQ ID NO: 186717 - DNA, 643 bp, Homo sapiens
  Payload ID: 16767
  Gene Symbol: STAU1
  Gene Name: staufen double-stranded RNA binding protein 1
  ENST ID: ENST00000456866
  CDS Start-End: 257-643
ttaaccacttaacctctcagaactgaacaaagacaacattgttcctggaacgccctctttttaaaaaagctttttccccttcagcatttatccatgagacaatcaccaagatgacccagggattgtactgcgttgcaggcttctgccatttgaccttcctgcctgccagggttttgagttcatgctgttgtttgtacttaaatgagtagcctgatggactgcagaacatataataaaggagacccctgatgtcctgatgtgtgaagtgtcaagggggtggaagccgtgcactgagggaatcctaaaagtaagacctacaagaaaaatcagctatgaagaaagcataacccctactgtagaactaaatgcactgtgcatgaaacttggaaaaaaaccaatgtataagcctgttgacccttactctcggatgcagtccacctataactacaacatgagaggaggtgcttatcccccgaggtacttttacccatttccagttccacctttactttatcaagtggaactttctgtgggaggacagcaatttaatggcaaaggaaagacaagacaggctgcgaaacacgatgctgctgccaaagcgttgaggatcctgcagaatgagcccctgccagagaggctggag

SEQ ID NO: 186718 - DNA, 1085 bp, Homo sapiens
  Payload ID: 16767
  Gene Symbol: STAU1
  Gene Name: staufen double-stranded RNA binding protein 1
  ENST ID: ENST00000437404
  CDS Start-End: 489-1085
acttcctgccgggctgcgggcgcctgagcggctcttcagcgtttgcgccggcggctgccgcgtctctctcggctcccgcttcctttgaccgcctcccccccccggcccggcggcgcccgcctcctccacggccactccgcctcttccctcccttcgtcccttcttcctctcccttttttccttcttccttcccctcctcgccgccaccgcccaggaccgccggccgggggacgagctcggagcagcagccaggtggagttttgctcttgtcgcccaggctggagtgcagtggcgtgatctcggctcactgcaacctccacctcccaggttcaagcgattttcccacttcagcctcccgataagctgagattacagagtttattaaccacttaacctctcagaactgaacaaagacaacattgttcctggaacgccctctttttaaaaaagaaagcataacccctactgtagaactaaatgcactgtgcatgaaacttggaaaaaaaccaatgtataagcctgttgacccttactctcggatgcagtccacctataactacaacatgagaggaggtgcttatcccccgaggtacttttacccatttccagttccacctttactttatcaagtggaactttctgtgggaggacagcaatttaatggcaaaggaaagacaagacaggctgcgaaacacgatgctgctgccaaagcgttgaggatcctgcagaatgagcccctgccagagaggctggaggtgaatggaagagaatccgaagaagaaaatctcaataaatctgaaataagtcaagtgtttgagattgcacttaaacggaacttgcctgtgaatttcgagtctttccctctgaaacaggtggcccgggagagtggcccaccccacatgaagaactttgtgaccaaggtttcggttggggagtttgtgggggaaggtgaagggaaaagcaagaagatttcaaagaaaaatgccgccatagctgttcttgaggagctgaagaagttaccgcccctgcctgcagttgaacgagtaaagcctagaatcaaaaagaaaacaaaacccatagtcaag

SEQ ID NO: 186719 - DNA, 3054 bp, Homo sapiens
  Payload ID: 16767
  Gene Symbol: STAU1
  Gene Name: staufen double-stranded RNA binding protein 1
  ENST ID: ENST00000614381
  CDS Start-End: 36-1517
gcataacccctactgtagaactaaatgcactgtgcatgaaacttggaaaaaaaccaatgtataagcctgttgacccttactctcggatgcagtccacctataactacaacatgagaggaggtgcttatcccccgaggtacttttacccatttccagttccacctttactttatcaagtggaactttctgtgggaggacagcaatttaatggcaaaggaaagacaagacaggctgcgaaacacgatgctgctgccaaagcgttgaggatcctgcagaatgagcccctgccagagaggctggaggtgaatggaagagaatccgaagaagaaaatctcaataaatctgaaataagtcaagtgtttgagattgcacttaaacggaacttgcctgtgaatttcgaggtggcccgggagagtggcccaccccacatgaagaactttgtgaccaaggtttcggttggggagtttgtgggggaaggtgaagggaaaagcaagaagatttcaaagaaaaatgccgccatagctgttcttgaggagctgaagaagttaccgcccctgcctgcagttgaacgagtaaagcctagaatcaaaaagaaaacaaaacccatagtcaagccacagacaagcccagaatatggccaggggatcaatccgattagccgactggcccagatccagcaggcaaaaaaggagaaggagccagagtacacgctcctcacagagcgaggcctcccgcgccgcagggagtttgtgatgcaggtgaaggttggaaaccacactgcagaaggaacgggcaccaacaagaaggtggccaagcgcaatgcagccgagaacatgctggagatccttggtttcaaagtcccgcagcgcagccaccaaacccgcactcaagtcagaggagaagacacccataaagaaaccaggggatggaagaaaagtaacctttttctggctctggggatgaaagggactagtaataaagaggatgagttcaggatgccttatctaagtcatcagcagctgcctgctggaattcttcccatggtgcccgaggtcgcccaggctgtaggagttagtcaaggacatcacaccaaagattttaccagggcagctccgaatcctgccaaggccacggtaactgccatgatagcccgagagttgttgtatgggggcacctcgcccacagccgagaccattttaaagaataacatctcttcaggccacgtaccccatggacctctcacgagaccctctgagcaactggactatctttccagagtccagggattccaggttgaatacaaagacttccccaaaaacaacaagaacgaatttgtatctcttatcaattgctcctctcagccacctctgatcagccatggtatcggcaaggatgtggagtcctgccatgatatggctgcgctgaacatcttaaagttgctgtctgagttggaccaacaaagtacagagatgccaagaacaggaaacggaccaatgtctgtgtgtgggaggtgctgaaccttttctggccatgaaccattataaaatcccaacatatatactgaaaatactgaaactgctttgaaaatttggaatttctgatacctccagtgggccgagagacacggtgggtaaaggatgtgggcagcagcagggaagacaacagaaacacaaggaggcggctgtggccgggctggactgtgctggggtttgttgtgatggccactcggtgacctggcggtccctacgcaatagcagctgcctgtggggaagaagggctgcccagccagctggttctcccgggacaccagcagatccacaccctgggcacctccgtgtttggtcttttttttcccctgtgtgaaagaagaaacggcacgaccccttctcaagctggctcactcagacacattgggacaaaccctggacagccatgccagagagaggcctttgaccggccccagagctaaaagcaccagagaaaatcaaatgcttcctactcagcgtgacccaacttttctagtgtgccacggccccaccacctcctgcagtacccacaccatcaccactgctttctcttccaacagtgatctgtattcttagtttcattattttcttttgattgatatgacactatataaaattttcatttgagaatttctcaattgtatctagttaaatagcacagtttggaaacttgtctgagactgactttatcaataatctaaccgacaaagatcatatccatgtgtatgtggttagacatttttatttcattgactaacccaggacagtttcagtgatgcaaattgtgtgccctctggttcagctgaaacagtcctggactttcaaaaaccttgaataagtctcccacagttgtataaattggacaatttaggaattttaaactttagatgatcatttggttccatttttatttcatttttatttttgttaatgcaaacaggacttaaatgaactttgatctctgttttaaagattattaaaaaacattgtgtatctatacatatggctcttgaggacttagctttcactacactacaggatatgatctccatgtagtccatataaacctgcagagtgattttccagagtgctcgatactgttaattacatctccattagggctgaaaagaatgacctacgtttctgtatacagctgtgttgcttttgatgttgtgttactgtacacagaagtgtgtgcactgaggctctgcgtgtggtccgtatggaaagcctggtagccctgcgagttaagtactgcttccattcattgtttacgctggaatttttctccccatggaatgtaagtaaaacttaagtgtttgtcatcaataaatggtaatactaaatttttttgttaatttattctcaaatgccactactgctaggttggtcccctcccaacttgcccctatcctttttttatttttaagaaaaaaactttgtaatgcttgtgattccatctgggcaaaagtctgaagatctgaaataactttatatcaaaccattgatcaataaacagctactaatg

SEQ ID NO: 186720 - DNA, 4061 bp, Homo sapiens
  Payload ID: 16768
  Gene Symbol: STAU2
  Gene Name: staufen double-stranded RNA binding protein 2
  ENST ID: ENST00000355780
  CDS Start-End: 220-1659
agttctctgtagtgtttgccaatgttggagccgtctgcaaagtgtccccggcaagaagaggctgcctaccacaaggactttagcttactttttaaagattgaagaaaaaaaagaagacagaaaaagaagaactcaaagatacacaaagtaatttgaaccaaggctcagaagtttttggagccgtgagggatacagcagtttggtcaatattgtcttaacatgcttcaaataaatcagatgttctcagtgcagctgagtcttggtgagcagacatgggaatccgaaggcagcagtataaagaaggctcagcaggctgttgccaataaagctttgactgaatctacgcttcccaaaccagttcagaagccacccaaaagtaatgttaacaataacccaggcagtataactccaactgtggaactgaatgggcttgctatgaaaaggggagagcctgccatctacaggccattagatccaaagccattcccaaattatagagctaattacaactttcggggcatgtacaatcagaggtatcattgcccagtgcctaagatcttttatgttcagctcactgtaggaaataatgaattttttggggaaggaaagactcgacaagctgctagacacaatgctgcaatgaaagccctccaagcactgcagaatgaacctattccagaaagatctcctcagaatggtgaatcaggaaaggatgtggatgatgacaaagatgcaaataagtctgagatcagcttagtgtttgaaattgctctgaagcgaaatatgcctgtcagttttgaggttattaaagaaagtggaccaccacatatgaaaagctttgttactcgagtgtcagtaggagagttctctgcagaaggagaaggaaatagcaaaaaactctccaagaagcgcgctgcgaccaccgtcttacaggagcttaaaaaacttccacctcttcctgtggtggaaaagccaaaactattttttaaaaaacgccctaaaacaatagtaaaggccggaccagaatatggccaagggatgaaccctattagccgcctggcgcaaattcaacaggccaaaaaggaaaaggagccggattatgttttgctttcagaaagaggaatgcctcgacgtcgagaatttgtgatgcaggtgaaggtaggcaatgaagttgctacaggaacaggacctaataaaaagatagccaaaaaaaatgctgcagaagcaatgctgttacaacttggttataaagcatccactaatcttcaggatcaacttgagaagacaggggaaaacaaaggatggagtggtccaaagcctgggtttcctgaaccaacaaataatactccaaaaggaattcttcatttgtctcctgatgtttatcaagagatggaagccagccgccacaaagtaatctctggcactactctaggctatttgtcacccaaagatatgaaccaaccttcaagctctttcttcagtatatctcccacatcgaatagttcagctacaattgccagggaactccttatgaatggaacatcttctacagctgaagccataggtttaaaaggaagttctcctactcccccttgttctccagtacaaccttcaaaacaactggaatatttagcaaggattcaaggctttcaggtatgaattaaaagcaaaaacaaaaaacaaaacaattcattagcctcagattcttcatctgtatacatcacaaggctcattcttgcctgctagtatggcctacatgccacttacgttttaagttatttaggaacacaaaggacagacaaaaaagccatatgcacatgcctcattttctcttatttttgatctatctagtaattcttttgctgcctgtctcttctccattttccttcttcttttttaagcatttttcatattcttcactgtcttctatttggtcttgattaggtgcatctatctcttcgctctgtcttccacaaacaaaaattctgccttcagacatttggtgttagtatttcacactcagttctccctttttttacataaggattgagtttctttttatgatgattttacctttatagcaattttgaattttgcattctattgctagtattgattcaggtacaccattaagatacaacattctagaagtctattaccttaggagttaattaaacatgatatttgaagaataatgaaatgctttatagttgtttgaggcataacaatgtgtatttgttttactggatcatgttttgaactgactagggagggtagcacctgcctcagatagtaccaacaattctgtttcactgggtagtctaaaactagcttatagtttaacttaacttgttgtgtatgtgaatttagggatggaaactttttttcccctatttattctttgtttccttctgggaaaaaaccccacaaaaatcagcactcctttatggatacattggagcttttgaaagaattgtaaactctaggaaggggaaatatctgtgtcttgatttcttagttgccttgaaaatcatgtactgaactgtaaccgctaacttgactggatgaactagtttgcttgtgtgtagagagtgtattgcttcctcagatttcactgttttcatctccttttccatcttagtctttattccttaagaccaaaaactgtaatatcctttagaaatgctctagaagatctgtattgtgtagaatgatcatgtatttataaatattttacaagtttagattataaaatgaaaaagaaggtcatgtgttttggggggtattttgcatgttcggatttttttttcacttcaccgaacccttctgattctttcaaactattgccaggtagttgttagtgtttctaattggactcttaatatgaacttcaagaagctgttaccagttatcggctctgtcatctgaaattttaaccacttaatttaaagttacaattttagaatttgtttttgttgttttaccttaagaaacacaataaatcactgtttaaaaaagatctcaatttatataaagtactggaaaaaagctaagtaatttttagttctatctataatctccgtaggatgaattagaaataaattgtgatgaaaagaaattaactgcttatttatgaatctaatcatttagaaatgtctgagagtaacactgcattcttatagaaacaaagcacaaattgcattcaagctctgaattgattttttgcttggagctgttgttacagtagctgtaattttgctaccagaatgtcttaattttttaaatttgtttttatttctaagctcttggcaatgacaataattataattttaacatatcttcactgtagtcaacatgtagagtctgcttccctcattattgcattgctaaggcctttttaaaaagcttatgcttacataatatactcttttttatggacacgttatatgtttccaaatctgtgtattgtgatttttacatactaatgaatataaacaggtgattttaaaatattactgtgcttctttggttgaatgagctggtattgatgtaaaatactctgtcattgatggaccactacctgcagctaagcagtgagcagaatctccgggaaatgacttagtctggccacatgcatagcccatcttcataatgtcgcagcagaaggttctttgtggttaaaagttttaaagcctatttctttataggtaaccctctcaggtatatttacctggtagaaaaacatgtagattgtttctattacttaaatgttttaattggactgtagtttagaaattacaggaccagcttgttacagattatacactattctgttacttttatttctgaaacttaaaaacaataaattctttttctgtgtttctaggttagaacttttttattttattgcacactgaacagatactgttgcttattgaatattgtgtaaacccttctttggctttccttgcccattgcaatttgatttaagcctactagagccattgtatgtgacagctatattgtattacaaagtaaaaatatatgagtgtattgaaaac

SEQ ID NO: 186721 - DNA, 2173 bp, Homo sapiens
  Payload ID: 16768
  Gene Symbol: STAU2
  Gene Name: staufen double-stranded RNA binding protein 2
  ENST ID: ENST00000522509
  CDS Start-End: 371-1810
actcttgcctcataaatctaggattcagggcattgttttcaatggttctcatttttggctccaaggattctttttcatgtgactaatattttcggtagaagaggaggtctggccacgccgcgggtcttggcgagcaggtgatcacggatccctggtgtttgctgggcgagacggtgaagcaacctcctccccgccccctcccccgtctagaaaggtgcaagatccgctaaaccgtgcgttgcacagcggcggccggagcagacgcgggatggtcgcgcgtcccctgcacagcacagaggggcagccggagagcctgggaaagtttttggagccgtgagggatacagcagtttggtcaatattgtcttaacatgcttcaaataaatcagatgttctcagtgcagctgagtcttggtgagcagacatgggaatccgaaggcagcagtataaagaaggctcagcaggctgttgccaataaagctttgactgaatctacgcttcccaaaccagttcagaagccacccaaaagtaatgttaacaataacccaggcagtataactccaactgtggaactgaatgggcttgctatgaaaaggggagagcctgccatctacaggccattagatccaaagccattcccaaattatagagctaattacaactttcggggcatgtacaatcagaggtatcattgcccagtgcctaagatcttttatgttcagctcactgtaggaaataatgaattttttggggaaggaaagactcgacaagctgctagacacaatgctgcaatgaaagccctccaagcactgcagaatgaacctattccagaaagatctcctcagaatggtgaatcaggaaaggatgtggatgatgacaaagatgcaaataagtctgagatcagcttagtgtttgaaattgctctgaagcgaaatatgcctgtcagttttgaggttattaaagaaagtggaccaccacatatgaaaagctttgttactcgagtgtcagtaggagagttctctgcagaaggagaaggaaatagcaaaaaactctccaagaagcgcgctgcgaccaccgtcttacaggagcttaaaaaacttccacctcttcctgtggtggaaaagccaaaactattttttaaaaaacgccctaaaacaatagtaaaggccggaccagaatatggccaagggatgaaccctattagccgcctggcgcaaattcaacaggccaaaaaggaaaaggagccggattatgttttgctttcagaaagaggaatgcctcgacgtcgagaatttgtgatgcaggtgaaggtaggcaatgaagttgctacaggaacaggacctaataaaaagatagccaaaaaaaatgctgcagaagcaatgctgttacaacttggttataaagcatccactaatcttcaggatcaacttgagaagacaggggaaaacaaaggatggagtggtccaaagcctgggtttcctgaaccaacaaataatactccaaaaggaattcttcatttgtctcctgatgtttatcaagagatggaagccagccgccacaaagtaatctctggcactactctaggctatttgtcacccaaagatatgaaccaaccttcaagctctttcttcagtatatctcccacatcgaatagttcagctacaattgccagggaactccttatgaatggaacatcttctacagctgaagccataggtttaaaaggaagttctcctactcccccttgttctccagtacaaccttcaaaacaactggaatatttagcaaggattcaaggctttcaggtatgaattaaaagcaaaaacaaaaaacaaaacaattcattagcctcagattcttcatctgtatacatcacaaggctcattcttgcctgctagtatggcctacatgccacttacgttttaagttatttaggaacacaaaggacagacaaaaaagccatatgcacatgcctcattttctcttatttttgatctatctagtaattcttttgctgcctgtctcttctccattttccttcttcttttttaagcatttttcatattcttcactgtcttctatttggtcttgattaggtgcatctatctcttcgctctgtcttccacaaacaaaaattctgccttcagacatttggtgttagtatttcacactca

SEQ ID NO: 186722 - DNA, 687 bp, Homo sapiens
  Payload ID: 16768
  Gene Symbol: STAU2
  Gene Name: staufen double-stranded RNA binding protein 2
  ENST ID: ENST00000518502
  CDS Start-End: 283-687
ggcgggcggaggcggggggcggggagcccgaggggtggaagccggcggcggccgagcggggtcagttctctgtagtgtttgccaatgttggagccgtctgcaaagtgtccccggcaagaagaggctgcctaccacaaggactttagcttactttttaaagattgaagaaaaaaaagaagacagaaaaagaagaactcaaagatacacaaagtaatttgaaccaaggctcagaagtttttggagccgtgagggatacagcagtttggtcaatattgtcttaacatgcttcaaataaatcaggtgaaggtaggcaatgaagttgctacaggaacaggacctaataaaaagatagccaaaaaaaatgctgcagaagcaatgctgttacaacttggttataaagcatccactaatcttcaggatcaacttgagaagacaggggaaaacaaaggatggagtggtccaaagcctgggtttcctgaaccaacaaataatactccaaaaggaattcttcatttgtctcctgatgtttatcaagagatggaagccagccgccacaaagtaatctctggcactactctaggctatttgtcacccaaagatatgaaccaaccttcaagctctttcttcagtatatctcccacatcgaatagttcagctacaattgccagggaactccttatgaatgga

SEQ ID NO: 186723 - DNA, 2646 bp, Homo sapiens
  Payload ID: 16768
  Gene Symbol: STAU2
  Gene Name: staufen double-stranded RNA binding protein 2
  ENST ID: ENST00000522695
  CDS Start-End: 27-1643
agcagtttggtcaatattgtcttaacatgcttcaaataaatcagatgttctcagtgcagctgagtcttggtgagcagacatgggaatccgaaggcagcagtataaagaaggctcagcaggctgttgccaataaagctttgactgaatctacgcttcccaaaccagttcagaagccacccaaaagtaatgttaacaataacccaggcagtataactccaactgtggaactgaatgggcttgctatgaaaaggggagagcctgccatctacaggccattagatccaaagccattcccaaattatagagctaattacaactttcggggcatgtacaatcagaggtatcattgcccagtgcctaagatcttttatgttcagctcactgtaggaaataatgaattttttggggaaggaaagactcgacaagctgctagacacaatgctgcaatgaaagccctccaagcactgcagaatgaacctattccagaaagatctcctcagaatggtgaatcaggaaaggatgtggatgatgacaaagatgcaaataagtctgagatcagcttagtgtttgaaattgctctgaagcgaaatatgcctgtcagttttgaggttattaaagaaagtggaccaccacatatgaaaagctttgttactcgagtgtcagtaggagagttctctgcagaaggagaaggaaatagcaaaaaactctccaagaagcgcgctgcgaccaccgtcttacaggagcttaaaaaacttccacctcttcctgtggtggaaaagccaaaactattttttaaaaaacgccctaaaacaatagtaaaggccggaccagaatatggccaagggatgaaccctattagccgcctggcgcaaattcaacaggccaaaaaggaaaaggagccggattatgttttgctttcagaaagaggaatgcctcgacgtcgagaatttgtgatgcaggtgaaggtaggcaatgaagttgctacaggaacaggacctaataaaaagatagccaaaaaaaatgctgcagaagcaatgctgttacaacttggttataaagcatccactaatcttcaggatcaacttgagaagacaggggaaaacaaaggatggagtggtccaaagcctgggtttcctgaaccaacaaataatactccaaaaggaattcttcatttgtctcctgatgtttatcaagagatggaagccagccgccacaaagtaatctctggcactactctaggctatttgtcacccaaagatatgaaccaaccttcaagctctttcttcagtatatctcccacatcgaatagttcagctacaattgccagggaactccttatgaatggaacatcttctacagctgaagccataggtttaaaaggaagttctcctactcccccttgttctccagtacaaccttcaaaacaactggaatatttagcaaggattcaaggctttcaggcagccttaagtgccttgaaacaattttctgaacaaggactggatccaatcgatggagcaatgaatatcgaaaaaggttctcttgaaaaacaagccaagcatctgagagagaaagcggacaataaccaggcacccccgggctccatcgctcaggactgcaagaaatcaaactcggccgtctagcagctcccagaacccgcggctgccaccgcatccttataaacctgtcagcacgcatgagggtgtctgtgttcagggaaatgaatgactaataccattatttgagtcttatgtgaagacaacactattctaacacgagagataatatacatggtactgtttattcaactggggaaaaataaaactttgagcatttcccttggaactcgagatcagatcataactcatttgcctagaggcagcagaaatctgatcctgctactggagcttaaaataacaagtaaagaaaagtgttagaaacaaagctaaaattttaacatgattaataatagagaagttgggtttggttctgttgttatgattgttttgtcgtggtgcttgtgttcagttatattctctctctctctcatttcaaatactgcttgacaattcgaaaatgaaccaatgatgtgctgtggaatgtgatggttgtcttcatatagagtcacatggtttctctttttatgcagatatttataatcttcatcctatatcagtaggaataactataaggtgcactacaaaaagatgtatgcaaacaaacatgttttaaatcaggtcagatatctgatgaaaaatacgaactaatgttaagagcaagtagtttcaacatactccaggaactgagaaacaaaacaaagcaattgtgggttttgagctccatatactcttagcaagtaagggggcgtcttgcccctatatatcatcttcccggattccactccctgttgtgggaatcgcgcccacccccatccgtgtgttgtagccactcacggtttgcatcaagagtgttttttgtaactgcctctggacttgggacagtgagtaggatcaaaaataaataatgtacatgacggggaagggaaaaacctgttggagttgcttccagccagccacgctccgggccagcatgttggaatccagcgtggagcagatgcagtaaaaatgtggttggtttctgtgtgaa

SEQ ID NO: 186724 - DNA, 2712 bp, Homo sapiens
  Payload ID: 16768
  Gene Symbol: STAU2
  Gene Name: staufen double-stranded RNA binding protein 2
  ENST ID: ENST00000521451
  CDS Start-End: 378-1253
cggggagcccgaggggtggaagccggcggcggccgagcggggtcagttctctgtagtgtttgccaatgttggagccgtctgcaaagtgtccccggcaagaaggtatcattgcccagtgcctaagatcttttatgttcagctcactgtaggaaataatgaattttttggggaaggaaagactcgacaagctgctagacacaatgctgcaatgaaagccctccaagcactgcagaatgaacctattccagaaagatctcctcagtgttatcctattttttgtgatttagaatggtgaatcaggaaaggatgtggatgatgacaaagatgcaaataagtctgagatcagcttagtgtttgaaattgctctgaagcgaaatatgcctgtcagttttgaggttattaaagaaagtggaccaccacatatgaaaagctttgttactcgagtgtcagtaggagagttctctgcagaaggagaaggaaatagcaaaaaactctccaagaagcgcgctgcgaccaccgtcttacaggagcttaaaaaacttccacctcttcctgtggtggaaaagccaaaactattttttaaaaaacgccctaaaacaatagtaaaggccggaccagaatatggccaagggatgaaccctattagccgcctggcgcaaattcaacaggccaaaaaggaaaaggagccggattatgttttgctttcagaaagaggaatgcctcgacgtcgagaatttgtgatgcaggtgaaggtaggcaatgaagttgctacaggaacaggacctaataaaaagatagccaaaaaaaatgctgcagaagcaatgctgttacaacttggttataaagcatccactaatcttcaggatcaacttgagaagacaggggaaaacaaaggatggagtggtccaaagcctgggtttcctgaaccaacaaataatactccaaaaggaattcttcatttgtctcctgatgtttatcaagagatggaagccagccgccacaaagtaatctctggcactactctaggctatttgtcacccaaagatatgaaccaaccttcaagctctttcttcagtatatctcccacatcgaatagttcagctacaattgccagggaactccttatgaatggaacatcttctacagctgaagccataggtttaaaaggaagttctcctactcccccttgttctccagtacaaccttcaaaacaactggaatatttagcaaggattcaaggctttcaggtatgaattaaaagcaaaaacaaaaaacaaaacaattcattagcctcagattcttcatctgtatacatcacaaggctcattcttgcctgctagtatggcctacatgccacttacgttttaagttatttaggaacacaaaggacagacaaaaaagccatatgcacatgcctcattttctcttatttttgatctatctagtaattcttttgctgcctgtctcttctccattttccttcttcttttttaagcatttttcatattcttcactgtcttctatttggtcttgattaggtgcatctatctcttcgctctgtcttccacaaacaaaaattctgccttcagacatttggtgttagtatttcacactcagttctccctttttttacataaggattgagtttctttttatgatgattttacctttatagcaattttgaattttgcattctattgctagtattgattcaggtacaccattaagatacaacattctagaagtctattaccttaggagttaattaaacatgatatttgaagaataatgaaatgctttatagttgtttgaggcataacaatgtgtatttgttttactggatcatgttttgaactgactagggagggtagcacctgcctcagatagtaccaacaattctgtttcactgggtagtctaaaactagcttatagtttaacttaacttgttgtgtatgtgaatttagggatggaaactttttttcccctatttattctttgtttccttctgggaaaaaaccccacaaaaatcagcactcctttatggatacattggagcttttgaaagaattgtaaactctaggaaggggaaatatctgtgtcttgatttcttagttgccttgaaaatcatgtactgaactgtaaccgctaacttgactggatgaactagtttgcttgtgtgtagagagtgtattgcttcctcagatttcactgttttcatctccttttccatcttagtctttattccttaagaccaaaaactgtaatatcctttagaaatgctctagaagatctgtattgtgtagaatgatcatgtatttataaatattttacaagtttagattataaaatgaaaaagaaggtcatgtgttttggggggtattttgcatgttcggatttttttttcacttcaccgaacccttctgattctttcaaactattgccaggtagttgttagtgtttctaattggactcttaatatgaacttcaagaagctgttaccagttatcggctctgtcatctgaaattttaaccacttaatttaaagttacaattttagaatttgtttttgttgttttaccttaagaaacacaataaatcactgtttaaaaaagatctcaatttatataaagtactggaaaaaagctaagtaatttttagttctatctataatctccgtaggatgaattagaaataaattgtgatgaaaagaaa

SEQ ID NO: 186725 - DNA, 1746 bp, Homo sapiens
  Payload ID: 16768
  Gene Symbol: STAU2
  Gene Name: staufen double-stranded RNA binding protein 2
  ENST ID: ENST00000518981
  CDS Start-End: 32-1204
gttgcacagcggcggccggagcagacgcgggatggtcgcgcgtcccctgcacagcacagaggggcagccggagagcctgggaaagatgttctcagtgcagctgagtcttggtgagcagacatgggaatccgaaggcagcagtataaagaaggctcagcaggctgttgccaataaagctttgactgaatctacgcttcccaaaccagttcagaagccacccaaaagtaatgttaacaataacccaggcagtataactccaactgtggaactgaatgggcttgctatgaaaaggggagagcctgccatctacaggccattagatccaaagccattcccaaattatagagctaattacaactttcggggcatgtacaatcagaggtatcattgcccagtgcctaagatcttttatgttcagctcactgtaggaaataatgaattttttggggaaggaaagactcgacaagctgctagacacaatgctgcaatgaaagccctccaagcactgcagaatgaacctattccagaaagatctcctcagaatggtgaatcaggaaaggatgtggatgatgacaaagatgcaaataagtctgagatcagcttagtgtttgaaattgctctgaagcgaaatatgcctgtcagttttgaggttattaaagaaagtggaccaccacatatgaaaagctttgttactcgagtgtcagtaggagagttctctgcagaaggagaaggaaatagcaaaaaactctccaagaagcgcgctgcgaccaccgtcttacaggagcttaaaaaacttccacctcttcctgtggtggaaaagccaaaactattttttaaaaaacgccctaaaacaatagtaaaggccggaccagaatatggccaagggatgaaccctattagccgcctggcgcaaattcaacaggccaaaaaggaaaaggagccggattatgttttgctttcagaaagaggaatgcctcgacgtcgagaatttgtgatgcaggtgaaggtaggcaatgaagttgctacaggaacaggacctaataaaaagatagccaaaaaaaatgctgcagaagcaatgctgttacaacttggttataaagcatccactaatcttcaggatcaacttgagaagacaggggaaaacaaaggatggagtggtccaaagcctgggtttcctgaaccaacaaataataggaaatcataactaatggagtttttctgagaagaatcataaccaagaagaacgatctttattttacgagcaacattttaaccccacttaaataaactaaaaattgaagatgactcattatcctcacaagctccaaaaggaattcttcatttgtctcctgatgtttatcaagagatggaagccagccgccacaaagtaatctctggcactactctaggctatttgtcacccaaagatatgaaccaaccttcaagctctttcttcagtatatctcccacatcgaatagttcagctacaattgccagggaactccttatgaatggaacatcttctacagctgaagccataggtttaaaaggaagttctcctactcccccttgttctccagtacaaccttcaaaacaactggaatatttagcaaggattcaaggctttcaggtatgaattaaaagcaaaaacaaaaaacaaaacaattcattagcctcagattcttcatctgtatacatcacaaggctcattcttgcctgctagtatggcctacatgccacttacgt

SEQ ID NO: 186726 - DNA, 972 bp, Homo sapiens
  Payload ID: 16768
  Gene Symbol: STAU2
  Gene Name: staufen double-stranded RNA binding protein 2
  ENST ID: ENST00000521419
  CDS Start-End: 308-685
ggggcggggagcccgaggggtggaagccggcggcggccgagcggggtcagttctctgtagtgtttgccaatgttggagccgtctgcaaagtgtccccggcaagaagtttttggagccgtgagggatacagcagtttggtcaatattgtcttaacatgcttcaaataaatcagattgaagaactcccttcaggatttcttgtagaacaagtctggtgttgatgaaatccttcggcttttgtttgtctgggaaagactttatctctccttcataattaaaggatattttcaccagatatactattctagatgttctcagtgcagctgagtcttggtgagcagacatgggaatccgaaggcagcagtataaagaaggctcagcaggctgttgccaataaagctttgactgaatctacgcttcccaaaccagttcagaagccacccaaaagtaatgttaacaataacccaggcagtataactccaactgtggaactgaatgggcttgctatgaaaaggggagagcctgccatctacaggccattagatccaaagccattcccaaattatagagctaattacaactttcggggcatgtacaatcagagatggcaacacttgaatggattacagggactctggagccaaagatccaaggagatgtcttttccttgtcagaacccagattaatcattagcttcttaaggcagggaatgaaaggtgaagtccaagaaacagatgaagagttacctaagtcagtgttataagatgttccatggtaaaagggatttgaagacaaattttggaaatgctgcatactgtatctctcttgaagactcctaaaggtgtcatgaagaaaactgtttacctaagtggttcctaacactgactgaacatcaggctttcctgggcagctttaaaaattctgatgcccagactttatgtggactaattaaatcagaatttctggttgcaga

SEQ ID NO: 186727 - DNA, 550 bp, Homo sapiens
  Payload ID: 16768
  Gene Symbol: STAU2
  Gene Name: staufen double-stranded RNA binding protein 2
  ENST ID: ENST00000521736
  CDS Start-End: 360-550
agttctctgtagtgtttgccaatgttggagccgtctgcaaagtgtccccggcaagaagagacgattttgccgtgttcgccaggctagtctcgaactcctgacctcaggtgatccgtccgcctcagactccaaaagtgctgggattacaggcgtgagccaccacacccagctgaggaggtggattttatgaaaccaaagaggctgcctaccacaaggactttagcttactttttaaagattgaagaaaaaaaagaagacagaaaaagaagaactcaaagatacacaaagtaatttgaaccaaggctcagaagtttttggagccgtgagggatacagcagtttggtcaatattgtcttaacatgcttcaaataaatcagatgttctcagtgcagctgagtcttggtgagcagacatgggaatccgaaggcagcagtataaagaaggctcagcaggctgttgccaataaagctttgactgaatctacgcttcccaaaccagttcagaagccacccaaaagtaatgttaacaataacccaggcagtataactcc

SEQ ID NO: 186728 - DNA, 1603 bp, Homo sapiens
  Payload ID: 16768
  Gene Symbol: STAU2
  Gene Name: staufen double-stranded RNA binding protein 2
  ENST ID: ENST00000523558
  CDS Start-End: 165-1361
agttctctgtagtgtttgccaatgttggagccgtctgcaaagtgtccccggcaagaaggtatcattgcccagtgcctaagatcttttatgttcagctcactgtaggaaataatgaattttttggggaaggaaagactcgacaagctgctagacacaatgctgcaatgaaagccctccaagcactgcagaatgaacctattccagaaagatctcctcagaatggtgaatcaggaaaggatgtggatgatgacaaagatgcaaataagtctgagatcagcttagtgtttgaaattgctctgaagcgaaatatgcctgtcagttttgaggttattaaagaaagtggaccaccacatatgaaaagctttgttactcgagtgtcagtaggagagttctctgcagaaggagaaggaaatagcaaaaaactctccaagaagcgcgctgcgaccaccgtcttacaggagcttaaaaaacttccacctcttcctgtggtggaaaagccaaaactattttttaaaaaacgccctaaaacaatagtaaaggccggaccagaatatggccaagggatgaaccctattagccgcctggcgcaaattcaacaggccaaaaaggaaaaggagccggattatgttttgctttcagaaagaggaatgcctcgacgtcgagaatttgtgatgcaggtgaaggtaggcaatgaagttgctacaggaacaggacctaataaaaagatagccaaaaaaaatgctgcagaagcaatgctgttacaacttggttataaagcatccactaatcttcaggatcaacttgagaagacaggggaaaacaaaggatggagtggtccaaagcctgggtttcctgaaccaacaaataatactccaaaaggaattcttcatttgtctcctgatgtttatcaagagatggaagccagccgccacaaagtaatctctggcactactctaggctatttgtcacccaaagatatgaaccaaccttcaagctctttcttcagtatatctcccacatcgaatagttcagctacaattgccagggaactccttatgaatggaacatcttctacagctgaagccataggtttaaaaggaagttctcctactcccccttgttctccagtacaaccttcaaaacaactggaatatttagcaaggattcaaggctttcaggcagccttaagtgccttgaaacaattttctgaacaaggactggatccaatcgatggagcaatgaatatcgaaaaaggttctcttgaaaaacaagccaagcatctgagagagaaagcggacaataaccaggcacccccgggctccatcgctcaggactgcaagaaatcaaactcggccgtctagcagctcccagaacccgcggctgccaccgcatccttataaacctgtcagcacgcatgagggtgtctgtgttcagggaaatgaatgactaataccattatttgagtcttatgtgaagacaacactattctaacacgagagataatatacatggtactgtttattcaactggggaaaaataaaactttgagcatttcccttggaactcgagatcagatcataactcatttgcctagaggcagcag

SEQ ID NO: 186729 - DNA, 3065 bp, Homo sapiens
  Payload ID: 16768
  Gene Symbol: STAU2
  Gene Name: staufen double-stranded RNA binding protein 2
  ENST ID: ENST00000524300
  CDS Start-End: 352-2064
agggcgcggcgggagcgccggggaggcgggcggaggcgggcggaggcggggggcggggagcccgaggggtggaagccggcggcggccgagcggggtcagttctctgtagtgtttgccaatgttggagccgtctgcaaagtgtccccggcaagaagaggctgcctaccacaaggactttagcttactttttaaagattgaagaaaaaaaagaagacagaaaaagaagaactcaaagatacacaaagtaatttgaaccaaggctcagaagtttttggagccgtgagggatacagcagtttggtcaatattgtcttaacatgcttcaaataaatcagcttctctccaagataaaatggcaaacccaaaagagaaaactgcaatgtgtctggtaaatgagttagcccgtttcaatagagtccaaccccagtataaacttctgaatgaaagagggcctgctcattcaaagatgttctcagtgcagctgagtcttggtgagcagacatgggaatccgaaggcagcagtataaagaaggctcagcaggctgttgccaataaagctttgactgaatctacgcttcccaaaccagttcagaagccacccaaaagtaatgttaacaataacccaggcagtataactccaactgtggaactgaatgggcttgctatgaaaaggggagagcctgccatctacaggccattagatccaaagccattcccaaattatagagctaattacaactttcggggcatgtacaatcagaggtatcattgcccagtgcctaagatcttttatgttcagctcactgtaggaaataatgaattttttggggaaggaaagactcgacaagctgctagacacaatgctgcaatgaaagccctccaagcactgcagaatgaacctattccagaaagatctcctcagaatggtgaatcaggaaaggatgtggatgatgacaaagatgcaaataagtctgagatcagcttagtgtttgaaattgctctgaagcgaaatatgcctgtcagttttgaggttattaaagaaagtggaccaccacatatgaaaagctttgttactcgagtgtcagtaggagagttctctgcagaaggagaaggaaatagcaaaaaactctccaagaagcgcgctgcgaccaccgtcttacaggagcttaaaaaacttccacctcttcctgtggtggaaaagccaaaactattttttaaaaaacgccctaaaacaatagtaaaggccggaccagaatatggccaagggatgaaccctattagccgcctggcgcaaattcaacaggccaaaaaggaaaaggagccggattatgttttgctttcagaaagaggaatgcctcgacgtcgagaatttgtgatgcaggtgaaggtaggcaatgaagttgctacaggaacaggacctaataaaaagatagccaaaaaaaatgctgcagaagcaatgctgttacaacttggttataaagcatccactaatcttcaggatcaacttgagaagacaggggaaaacaaaggatggagtggtccaaagcctgggtttcctgaaccaacaaataatactccaaaaggaattcttcatttgtctcctgatgtttatcaagagatggaagccagccgccacaaagtaatctctggcactactctaggctatttgtcacccaaagatatgaaccaaccttcaagctctttcttcagtatatctcccacatcgaatagttcagctacaattgccagggaactccttatgaatggaacatcttctacagctgaagccataggtttaaaaggaagttctcctactcccccttgttctccagtacaaccttcaaaacaactggaatatttagcaaggattcaaggctttcaggcagccttaagtgccttgaaacaattttctgaacaaggactggatccaatcgatggagcaatgaatatcgaaaaaggttctcttgaaaaacaagccaagcatctgagagagaaagcggacaataaccaggcacccccgggctccatcgctcaggactgcaagaaatcaaactcggccgtctagcagctcccagaacccgcggctgccaccgcatccttataaacctgtcagcacgcatgagggtgtctgtgttcagggaaatgaatgactaataccattatttgagtcttatgtgaagacaacactattctaacacgagagataatatacatggtactgtttattcaactggggaaaaataaaactttgagcatttcccttggaactcgagatcagatcataactcatttgcctagaggcagcagaaatctgatcctgctactggagcttaaaataacaagtaaagaaaagtgttagaaacaaagctaaaattttaacatgattaataatagagaagttgggtttggttctgttgttatgattgttttgtcgtggtgcttgtgttcagttatattctctctctctctcatttcaaatactgcttgacaattcgaaaatgaaccaatgatgtgctgtggaatgtgatggttgtcttcatatagagtcacatggtttctctttttatgcagatatttataatcttcatcctatatcagtaggaataactataaggtgcactacaaaaagatgtatgcaaacaaacatgttttaaatcaggtcagatatctgatgaaaaatacgaactaatgttaagagcaagtagtttcaacatactccaggaactgagaaacaaaacaaagcaattgtgggttttgagctccatatactcttagcaagtaagggggcgtcttgcccctatatatcatcttcccggattccactccctgttgtgggaatcgcgcccacccccatccgtgtgttgtagccactcacggtttgcatcaagagtgttttttgtaactgcctctggacttgggacagtgagtaggatcaaaaataaataatgtacatgacggggaagggaaaaacctgttggagttgcttccagccagccacgctccgggccagcatgttggaatccagcgtggagcagatgcagtaaaaatgtggttggtttctgtgtg

SEQ ID NO: 186730 - DNA, 727 bp, Homo sapiens
  Payload ID: 16768
  Gene Symbol: STAU2
  Gene Name: staufen double-stranded RNA binding protein 2
  ENST ID: ENST00000521447
  CDS Start-End: 116-727
agcggggtcagttctctgtagtgtttgccaatgttggagccgtctgcaaagtgtccccggcaagaagtttttggagccgtgagggatacagcagtttggtcaatattgtcttaacatgcttcaaataaatcagatgttctcagtgcagctgagtcttggtgagcagacatgggaatccgaaggcagcagtataaagaaggctcagcaggctgttgccaataaagctttgactgaatctacgcttcccaaaccagttcagaagccacccaaaagtaatgttaacaataacccaggcagtataactccaactgtggaactgaatgggcttgctatgaaaaggggagagcctgccatctacaggccattagatccaaagccattcccaaattatagagctaattacaactttcggggcatgtacaatcagaggtatcattgcccagtgcctaagatcttttatgttcagctcactgtaggaaataatgaattttttggggaaggaaagactcgacaagctgctagacacaatgctgcaatgaaagccctccaagcactgcagaatgaacctattccagaaagatctcctcagaatggtgaatcaggaaaggatgtggatgatgacaaagatgcaaataagtctgagatcagcttagtgtttgaaattgctctgaagcgaaatatgcctgtcagttttgaggttattaaagaaagtggaccaccacatatg

SEQ ID NO: 186731 - DNA, 1146 bp, Homo sapiens
  Payload ID: 16768
  Gene Symbol: STAU2
  Gene Name: staufen double-stranded RNA binding protein 2
  ENST ID: ENST00000518767
  CDS Start-End: 187-1146
acagcggcggccggagcagacgcgggatggtcgcgcgtcccctgcacagcacagaggggcagccggagagcctgggaaaggtatcattgcccagtgcctaagatcttttatgttcagctcactgtaggaaataatgaattttttggggaaggaaagactcgacaagctgctagacacaatgctgcaatgaaagccctccaagcactgcagaatgaacctattccagaaagatctcctcagaatggtgaatcaggaaaggatgtggatgatgacaaagatgcaaataagtctgagatcagcttagtgtttgaaattgctctgaagcgaaatatgcctgtcagttttgaggttattaaagaaagtggaccaccacatatgaaaagctttgttactcgagtgtcagtaggagagttctctgcagaaggagaaggaaatagcaaaaaactctccaagaagcgcgctgcgaccaccgtcttacaggagcttaaaaaacttccacctcttcctgtggtggaaaagccaaaactattttttaaaaaacgccctaaaacaatagtaaaggccggaccagaatatggccaagggatgaaccctattagccgcctggcgcaaattcaacaggccaaaaaggaaaaggagccggattatgttttgctttcagaaagaggaatgcctcgacgtcgagaatttgtgatgcaggtgaaggtaggcaatgaagttgctacaggaacaggacctaataaaaagatagccaaaaaaaatgctgcagaagcaatgctgttacaacttggttataaagcatccactaatcttcaggatcaacttgagaagacaggggaaaacaaaggatggagtggtccaaagcctgggtttcctgaaccaacaaataatactccaaaaggaattcttcatttgtctcctgatgtttatcaagagatggaagccagccgccacaaagtaatctctggcactactctaggctatttgtcacccaaagatatgaaccaaccttcaagctctttcttcagtatatctcccacatcgaatagttcagctacaattgccagggaactccttatgaatggaacatcttctacagctgaagccataggtttaaaaggaagttctcctactcccccttgttct

SEQ ID NO: 186732 - DNA, 1950 bp, Homo sapiens
  Payload ID: 16768
  Gene Symbol: STAU2
  Gene Name: staufen double-stranded RNA binding protein 2
  ENST ID: ENST00000521210
  CDS Start-End: 276-1790
agttctctgtagtgtttgccaatgttggagccgtctgcaaagtgtccccggcaagaagaggctgcctaccacaaggactttagcttactttttaaagattgaagaaaaaaaagaagacagaaaaagaagaactcaaagatacacaaagtaatttgaaccaaggctcagaagtttttggagccgtgagggatacagcagtttggtcaatattgtcttaacatgcttcaaataaatcaggcagtataactccaactgtggaactgaatgggcttgctatgaaaaggggagagcctgccatctacaggccattagatccaaagccattcccaaattatagagctaattacaactttcggggcatgtacaatcagaggtatcattgcccagtgcctaagatcttttatgttcagctcactgtaggaaataatgaattttttggggaaggaaagactcgacaagctgctagacacaatgctgcaatgaaagccctccaagcactgcagaatgaacctattccagaaagatctcctcagaatggtgaatcaggaaaggatgtggatgatgacaaagatgcaaataagtctgagatcagcttagtgtttgaaattgctctgaagcgaaatatgcctgtcagttttgaggttattaaagaaagtggaccaccacatatgaaaagctttgttactcgagtgtcagtaggagagttctctgcagaaggagaaggaaatagcaaaaaactctccaagaagcgcgctgcgaccaccgtcttacaggagcttaaaaaacttccacctcttcctgtggtggaaaagccaaaactattttttaaaaaacgccctaaaacaatagtaaaggccggaccagaatatggccaagggatgaaccctattagccgcctggcgcaaattcaacaggccaaaaaggaaaaggagccggattatgttttgctttcagaaagaggaatgcctcgacgtcgagaatttgtgatgcaggtgaaggtaggcaatgaagttgctacaggaacaggacctaataaaaagatagccaaaaaaaatgctgcagaagcaatgctgttacaacttggttataaagcatccactaatcttcaggatcaacttgagaagacaggggaaaacaaaggatggagtggtccaaagcctgggtttcctgaaccaacaaataatactccaaaaggaattcttcatttgtctcctgatgtttatcaagagatggaagccagccgccacaaagtaatctctggcactactctaggctatttgtcacccaaagatatgaaccaaccttcaagctctttcttcagtatatctcccacatcgaatagttcagctacaattgccagggaactccttatgaatggaacatcttctacagctgaagccataggtttaaaaggaagttctcctactcccccttgttctccagtacaaccttcaaaacaactggaatatttagcaaggattcaaggctttcaggttcactactgtgatagacaaagtggcaaagagtgtgtgacctgtctgacattagcccctgtgcagatgactttccatgctattggaagctccattgaagccagccatgatcaggcagccttaagtgccttgaaacaattttctgaacaaggactggatccaatcgatggagcaatgaatatcgaaaaaggttctcttgaaaaacaagccaagcatctgagagagaaagcggacaataaccaggcacccccgggctccatcgctcaggactgcaagaaatcaaactcggccgtctagcagctcccagaacccgcggctgccaccgcatccttataaacctgtcagcacgcatgagggtgtctgtgttcagggaaatgaatgactaataccattatttgagtcttatgtgaagacaacactattctaacacgagagataatatacatggtactgttta

SEQ ID NO: 186733 - DNA, 3953 bp, Homo sapiens
  Payload ID: 16768
  Gene Symbol: STAU2
  Gene Name: staufen double-stranded RNA binding protein 2
  ENST ID: ENST00000521727
  CDS Start-End: 258-1733
ataaatctaggattcagggcattgttttcaatggttctcatttttggctccaaggattctttttcatgtgactaatattttcggtagaagaggaggtctggccacgccgcgggtcttggcgagcaggtgatcacggatccctggtgtttgctgggcgagacggtgaagcaacctcctccccgccccctcccccgtctagaaaggtgcaagatccgctaaaccgtgcgttgcacagcggcggccggagcagacgcgggatggtcgcgcgtcccctgcacagcacagaggggcagccggagagcctgggaaagatgttctcagtgcagctgagtcttggtgagcagacatgggaatccgaaggcagcagtataaagaaggctcagcaggctgttgccaataaagctttgactgaatctacgcttcccaaaccagttcagaagccacccaaaagtaatgttaacaataacccaggcagtataactccaactgtggaactgaatgggcttgctatgaaaaggggagagcctgccatctacaggccattagatccaaagccattcccaaattatagagctaattacaactttcggggcatgtacaatcagaggtatcattgcccagtgcctaagatcttttatgttcagctcactgtaggaaataatgaattttttggggaaggaaagactcgacaagctgctagacacaatgctgcaatgaaagccctccaagcactgcagaatgaacctattccagaaagatctcctcagaatggtgaatcaggaaaggatgtggatgatgacaaagatgcaaataagtctgagatcagcttagtgtttgaaattgctctgaagcgaaatatgcctgtcagttttgaggttattaaagaaagtggaccaccacatatgaaaagctttgttactcgagtgtcagtaggagagttctctgcagaaggagaaggaaatagcaaaaaactctccaagaagcgcgctgcgaccaccgtcttacaggagcttaaaaaacttccacctcttcctgtggtggaaaagccaaaactattttttaaaaaacgccctaaaacaatagtaaaggccggaccagaatatggccaagggatgaaccctattagccgcctggcgcaaattcaacaggccaaaaaggaaaaggagccggattatgttttgctttcagaaagaggaatgcctcgacgtcgagaatttgtgatgcaggtgaaggtaggcaatgaagttgctacaggaacaggacctaataaaaagatagccaaaaaaaatgctgcagaagcaatgctgttacaacttggttataaagcatccactaatcttcaggatcaacttgagaagacaggggaaaacaaaggatggagtggtccaaagcctgggtttcctgaaccaacaaataatactccaaaaggaattcttcatttgtctcctgatgtttatcaagagatggaagccagccgccacaaagtaatctctggcactactctaggctatttgtcacccaaagatatgaaccaaccttcaagctctttcttcagtatatctcccacatcgaatagttcagctacaattgccagggaactccttatgaatggaacatcttctacagctgaagccataggtttaaaaggaagttctcctactcccccttgttctccagtacaaccttcaaaacaactggaatatttagcaaggattcaaggctttcaggtatgaattaaaagcaaaaacaaaaaacaaaacaattcattagcctcagattcttcatctgtatacatcacaaggctcattcttgcctgctagtatggcctacatgccacttacgttttaagttatttaggaacacaaaggacagacaaaaaagccatatgcacatgcctcattttctcttatttttgatctatctagtaattcttttgctgcctgtctcttctccattttccttcttcttttttaagcatttttcatattcttcactgtcttctatttggtcttgattaggtgcatctatctcttcgctctgtcttccacaaacaaaaattctgccttcagacatttggtgttagtatttcacactcagttctccctttttttacataaggattgagtttctttttatgatgattttacctttatagcaattttgaattttgcattctattgctagtattgattcaggtacaccattaagatacaacattctagaagtctattaccttaggagttaattaaacatgatatttgaagaataatgaaatgctttatagttgtttgaggcataacaatgtgtatttgttttactggatcatgttttgaactgactagggagggtagcacctgcctcagatagtaccaacaattctgtttcactgggtagtctaaaactagcttatagtttaacttaacttgttgtgtatgtgaatttagggatggaaactttttttcccctatttattctttgtttccttctgggaaaaaaccccacaaaaatcagcactcctttatggatacattggagcttttgaaagaattgtaaactctaggaaggggaaatatctgtgtcttgatttcttagttgccttgaaaatcatgtactgaactgtaaccgctaacttgactggatgaactagtttgcttgtgtgtagagagtgtattgcttcctcagatttcactgttttcatctccttttccatcttagtctttattccttaagaccaaaaactgtaatatcctttagaaatgctctagaagatctgtattgtgtagaatgatcatgtatttataaatattttacaagtttagattataaaatgaaaaagaaggtcatgtgttttggggggtattttgcatgttcggatttttttttcacttcaccgaacccttctgattctttcaaactattgccaggtagttgttagtgtttctaattggactcttaatatgaacttcaagaagctgttaccagttatcggctctgtcatctgaaattttaaccacttaatttaaagttacaattttagaatttgtttttgttgttttaccttaagaaacacaataaatcactgtttaaaaaagatctcaatttatataaagtactggaaaaaagctaagtaatttttagttctatctataatctccgtaggatgaattagaaataaattgtgatgaaaagaaattaactgcttatttatgaatctaatcatttagaaatgtctgagagtaacactgcattcttatagaaacaaagcacaaattgcattcaagctctgaattgattttttgcttggagctgttgttacagtagctgtaattttgctaccagaatgtcttaattttttaaatttgtttttatttctaagctcttggcaatgacaataattataattttaacatatcttcactgtagtcaacatgtagagtctgcttccctcattattgcattgctaaggcctttttaaaaagcttatgcttacataatatactcttttttatggacacgttatatgtttccaaatctgtgtattgtgatttttacatactaatgaatataaacaggtgattttaaaatattactgtgcttctttggttgaatgagctggtattgatgtaaaatactctgtcattgatggaccactacctgcagctaagcagtgagcagaatctccgggaaatgacttagtctggccacatgcatagcccatcttcataatgtcgcagcagaaggttctttgtggttaaaagttttaaagcctatttctttataggtaaccctctcaggtatatttacctggtagaaaaacatgtagattgtttctattacttaaatgttttaattggactgtagtttagaaattacaggaccagcttgttacagattatacactattctgttacttttatttctgaaacttaaaaacaataaattctttttctgtg

SEQ ID NO: 186734 - DNA, 805 bp, Homo sapiens
  Payload ID: 16768
  Gene Symbol: STAU2
  Gene Name: staufen double-stranded RNA binding protein 2
  ENST ID: ENST00000523533
  CDS Start-End: 1-489
acaggggaaaacaaaggatggagtggtccaaagcctgggtttcctgaaccaacaaataatactccaaaaggaattcttcatttgtctcctgatgtttatcaagagatggaagccagccgccacaaagtaatctctggcactactctaggctatttgtcacccaaagatatgaaccaaccttcaagctctttcttcagtatatctcccacatcgaatagttcagctacaattgccagggaactccttatgaatggaacatcttctacagctgaagccataggtttaaaaggaagttctcctactcccccttgttctccagtacaaccttcaaaacaactggaatatttagcaaggattcaaggctttcaggttcactactgtgatagacaaagtggcaaagagtgtgtgacctgtctgacattagcccctgtgcagatgactttccatgctattggaagctccattgaagccagccatgatcaggtataatatgccactgccattttgctgtgttatggcccagctcggaaatggaaggccatcaaaatggaagctatgtgcgcacatgcagctttgctttccttaatacattatctgctagcaccatctgctagacttgaaaaatcaaaattgtttgtgttgggaaattgatatcatagtagatttaaattattttagacttcttgtttgcagttcattattattttaaatatggaattattttatatgaaaaatagttgtcccacaggttatttttatctttaatagttatatatgagaggaagggtcaacaaaacaatataga

SEQ ID NO: 186735 - DNA, 2173 bp, Homo sapiens
  Payload ID: 16768
  Gene Symbol: STAU2
  Gene Name: staufen double-stranded RNA binding protein 2
  Uniprot ID: Q9NUL3
  ENST ID: ENST00000524104
  CDS Start-End: 220-537
agttctctgtagtgtttgccaatgttggagccgtctgcaaagtgtccccggcaagaagaggctgcctaccacaaggactttagcttactttttaaagattgaagaaaaaaaagaagacagaaaaagaagaactcaaagatacacaaagtaatttgaaccaaggctcagaagtttttggagccgtgagggatacagcagtttggtcaatattgtcttaacatgcttcaaataaatcagatgttctcagtgcagctgagtcttggtgagcagacatgggaatccgaaggcagcagtataaagaaggctcagcaggctgttgccaataaagctttgactgaatctacgcttcccaaaccagttcagaagccacccaaaagtaatgttaacaataacccaggcagtataactccaactgtggaactgaatgggcttgctatgaaaaggggagagcctgccatctacaggccattagatccaaagccattcccaaattatagagctaattacaactttcggggcatgtacaatcagagatgaagagttacctaagtcagtgttataagatgttccatggtaaaagggatttgaagacaaattttggaaatgctgcatactgtatctctcttgaagactcctaaaggtgtcatgaagaaaactgtttacctaagtggttcctaacactgactgaacatcaggctttcctgggcagctttaaaaattctgatgcccagactttatgtggactaattaaatcagaatttctggttgcagagcttgaaccgcactgttttttaaaacttccccaagtaattctatgtccagtcatttaaatactggtccccacaacccaaaacacattaccctctattaacatcaaagattatgagatggtttgaatagtcatagaacttttgaaagaagtaaagaagaagggaagaattacagttaaccacactccttaaggataattgttctggacagctagcttccccacattgctgagggttcacttttttttggaacctaaaactttacttagttcagtaattttggatagaaatatttctaaaagttatggcatatattttttatatccttaaatagaaaatgccacaattcttagcatgaagaatccttgctgttgactcattatcaaccttataaacaataagtattacaagcctcatgagatatgtacatggtttgtccttataccagataatcctagacatctgtttctagagtacccaagtgtgcttttagttactttccaaatcattgttgtcagtcagattgtcatcttatttcttgtttttgtcagtgcacctttgcatattgcttgctcctttctttgatgcttttcaattgctattatcttgaaaaccgatattattgtttgaatttggggcaaagtaagagtagcagggctttaattacgccctaagatgtccccttaactgtggaaaacatcgagttttatctagttggtgaatttttttacttcagaatttatttttttctgtcataaattttgctaaggatctgcattttgagtagaatgaagtggccagatagttgaataatggtttggtgaatatctatatgtatatatgtatgtgtatgtgtgttacacatacatatttaatgacatgaagtactttggttgcttggaattggacagaaataacagtttttttttttttttgggacagagtcttgctctgtcacctaggctggagtgcaatggcgcgatctctgctcactgcaacttccacctcccaggttcaagtgattctcctgccgcagcctcccgagtagctgggattgcaggcgcctgccagcatgcccgccagcacgcctggctaatttttttttttgtatttttagtagagatggggtttcactatgttggccaggctggtcttggaactcctgatctcgtgatctgtgtgccttggcctcccaaagtgctgggattacaggcgtgagccaccgcgcctggccagaaataacagttttaataaatttcatgaaatcactttcttgtatgttaaaggaaacagaaagggttcatttgtgcatggtttagtctttcttttgaatgtggaagtttttcttcttatttgtgtgtctaaaaaaattaaaaagtgaaacattttccaaaatgagaaga

SEQ ID NO: 186736 - DNA, 3928 bp, Homo sapiens
  Payload ID: 16768
  Gene Symbol: STAU2
  Gene Name: staufen double-stranded RNA binding protein 2
  ENST ID: ENST00000519961
  CDS Start-End: 79-1614
ggagccgtgagggatacagcagtttggtcaatattgtcttaacatgcttcaaataaatcagcttctctccaagataaaatggcaaacccaaaagagaaaactgcaatgtgtctggtaaatgagttagcccgtttcaatagagtccaaccccagtataaacttctgaatgaaagagggcctgctcattcaaagatgttctcagtgcagctgagtcttggtgagcagacatgggaatccgaaggcagcagtataaagaaggctcagcaggctgttgccaataaagctttgactgaatctacgcttcccaaaccagttcagaagccacccaaaagtaatgttaacaataacccaggcagtataactccaactgtggaactgaatgggcttgctatgaaaaggggagagcctgccatctacaggccattagatccaaagccattcccaaattatagagctaattacaactttcggggcatgtacaatcagaggtatcattgcccagtgcctaagatcttttatgttcagctcactgtaggaaataatgaattttttggggaaggaaagactcgacaagctgctagacacaatgctgcaatgaaagccctccaagcactgcagaatgaacctattccagaaagatctcctcagaatggtgaatcaggaaaggatgtggatgatgacaaagatgcaaataagtctgagatcagcttagtgtttgaaattgctctgaagcgaaatatgcctgtcagttttgaggttattaaagaaagtggaccaccacatatgaaaagctttgttactcgagtgtcagtaggagagttctctgcagaaggagaaggaaatagcaaaaaactctccaagaagcgcgctgcgaccaccgtcttacaggagcttaaaaaacttccacctcttcctgtggtggaaaagccaaaactattttttaaaaaacgccctaaaacaatagtaaaggccggaccagaatatggccaagggatgaaccctattagccgcctggcgcaaattcaacaggccaaaaaggaaaaggagccggattatgttttgctttcagaaagaggaatgcctcgacgtcgagaatttgtgatgcaggtgaaggtaggcaatgaagttgctacaggaacaggacctaataaaaagatagccaaaaaaaatgctgcagaagcaatgctgttacaacttggttataaagcatccactaatcttcaggatcaacttgagaagacaggggaaaacaaaggatggagtggtccaaagcctgggtttcctgaaccaacaaataatactccaaaaggaattcttcatttgtctcctgatgtttatcaagagatggaagccagccgccacaaagtaatctctggcactactctaggctatttgtcacccaaagatatgaaccaaccttcaagctctttcttcagtatatctcccacatcgaatagttcagctacaattgccagggaactccttatgaatggaacatcttctacagctgaagccataggtttaaaaggaagttctcctactcccccttgttctccagtacaaccttcaaaacaactggaatatttagcaaggattcaaggctttcaggtatgaattaaaagcaaaaacaaaaaacaaaacaattcattagcctcagattcttcatctgtatacatcacaaggctcattcttgcctgctagtatggcctacatgccacttacgttttaagttatttaggaacacaaaggacagacaaaaaagccatatgcacatgcctcattttctcttatttttgatctatctagtaattcttttgctgcctgtctcttctccattttccttcttcttttttaagcatttttcatattcttcactgtcttctatttggtcttgattaggtgcatctatctcttcgctctgtcttccacaaacaaaaattctgccttcagacatttggtgttagtatttcacactcagttctccctttttttacataaggattgagtttctttttatgatgattttacctttatagcaattttgaattttgcattctattgctagtattgattcaggtacaccattaagatacaacattctagaagtctattaccttaggagttaattaaacatgatatttgaagaataatgaaatgctttatagttgtttgaggcataacaatgtgtatttgttttactggatcatgttttgaactgactagggagggtagcacctgcctcagatagtaccaacaattctgtttcactgggtagtctaaaactagcttatagtttaacttaacttgttgtgtatgtgaatttagggatggaaactttttttcccctatttattctttgtttccttctgggaaaaaaccccacaaaaatcagcactcctttatggatacattggagcttttgaaagaattgtaaactctaggaaggggaaatatctgtgtcttgatttcttagttgccttgaaaatcatgtactgaactgtaaccgctaacttgactggatgaactagtttgcttgtgtgtagagagtgtattgcttcctcagatttcactgttttcatctccttttccatcttagtctttattccttaagaccaaaaactgtaatatcctttagaaatgctctagaagatctgtattgtgtagaatgatcatgtatttataaatattttacaagtttagattataaaatgaaaaagaaggtcatgtgttttggggggtattttgcatgttcggatttttttttcacttcaccgaacccttctgattctttcaaactattgccaggtagttgttagtgtttctaattggactcttaatatgaacttcaagaagctgttaccagttatcggctctgtcatctgaaattttaaccacttaatttaaagttacaattttagaatttgtttttgttgttttaccttaagaaacacaataaatcactgtttaaaaaagatctcaatttatataaagtactggaaaaaagctaagtaatttttagttctatctataatctccgtaggatgaattagaaataaattgtgatgaaaagaaattaactgcttatttatgaatctaatcatttagaaatgtctgagagtaacactgcattcttatagaaacaaagcacaaattgcattcaagctctgaattgattttttgcttggagctgttgttacagtagctgtaattttgctaccagaatgtcttaattttttaaatttgtttttatttctaagctcttggcaatgacaataattataattttaacatatcttcactgtagtcaacatgtagagtctgcttccctcattattgcattgctaaggcctttttaaaaagcttatgcttacataatatactcttttttatggacacgttatatgtttccaaatctgtgtattgtgatttttacatactaatgaatataaacaggtgattttaaaatattactgtgcttctttggttgaatgagctggtattgatgtaaaatactctgtcattgatggaccactacctgcagctaagcagtgagcagaatctccgggaaatgacttagtctggccacatgcatagcccatcttcataatgtcgcagcagaaggttctttgtggttaaaagttttaaagcctatttctttataggtaaccctctcaggtatatttacctggtagaaaaacatgtagattgtttctattacttaaatgttttaattggactgtagtttagaaattacaggaccagcttgttacagattatacactattctgttacttttatttctgaaacttaaaaacaataaattctttttctgtgtttctaggttagaacttttttattttattgcacactgaacagatactgttgcttattgaatattgtgtaaacccttctttggctttccttgccc

SEQ ID NO: 186737 - DNA, 1695 bp, Homo sapiens
  Payload ID: 16768
  Gene Symbol: STAU2
  Gene Name: staufen double-stranded RNA binding protein 2
  ENST ID: ENST00000517542
  CDS Start-End: 98-1519
agcccgaggggtggaagccggcggcggccgagcggggtcagttctctgtagtgtttgccaatgttggagccgtctgcaaagtgtccccggcaagaagatgttctcagtgcagctgagtcttggtgagcagacatgggaatccgaaggcagcagtataaagaaggctcagcaggctgttgccaataaagctttgactgaatctacgcttcccaaaccagttcagaagccacccaaaagtaatgttaacaataacccaggcagtataactccaactgtggaactgaatgggcttgctatgaaaaggggagagcctgccatctacaggccattagatccaaagccattcccaaattatagagctaattacaactttcggggcatgtacaatcagaggtatcattgcccagtgcctaagatcttttatgttcagctcactgtaggaaataatgaattttttggggaaggaaagactcgacaagctgctagacacaatgctgcaatgaaagccctccaagcactgcagaatgaacctattccagaaagatctcctcagaatggtgaatcaggaaaggatgtggatgatgacaaagatgcaaataagtctgagatcagcttagtgtttgaaattgctctgaagcgaaatatgcctgtcagttttgaggttattaaagaaagtggaccaccacatatgaaaagctttgttactcgagtgtcagtaggagagttctctgcagaaggagaaggaaatagcaaaaaactctccaagaagcgcgctgcgaccaccgtcttacaggagcttaaaaaacttccacctcttcctgtggtggaaaagccaaaactattttttaaaaaacgccctaaaacaatagtaaaggccggaccagaatatggccaagggatgaaccctattagccgcctggcgcaaattcaacaggccaaaaaggaaaaggagccggattatgttttgctttcagaaagaggaatgcctcgacgtcgagaatttgtgatgcaggtgaaggtaggcaatgaagttgctacaggaacaggacctaataaaaagatagccaaaaaaaatgctgcagaagcaatgctgttacaacttggttataaagcatccactaatcttcaggatcaacttgagaagacaggggaaaacaaaggatggagtggtccaaagcctgggtttcctgaaccaacaaataatactccaaaaggaattcttcatttgtctcctgatgtttatcaagagatggaagccagccgccacaaagtaatctctggcactactctaggctatttgtcacccaaagatatgaaccaaccttcaagctctttcttcagtatatctcccacatcgaatagttcagctacaattgccagggaactccttatgaatggaacatcttctacagctgaagccataggtttaaaaggaagttctcctactcccccttgttctccagtacaaccttcaaaacaactggaatatttagcaaggattcaaggctttcaggtatgaattaaaagcaaaaacaaaaaacaaaacaattcattagcctcagattcttcatctgtatacatcacaaggctcattcttgcctgctagtatggcctacatgccacttacgttttaagttatttaggaacacaaaggacagacaaaaaagccatatgcacatgcctcattttctctta

SEQ ID NO: 186738 - DNA, 7673 bp, Homo sapiens
  Payload ID: 16769
  Gene Symbol: SLK
  Gene Name: STE20-like kinase
  Uniprot ID: Q9H2G2
  ENST ID: ENST00000335753
  CDS Start-End: 546-4160
gcggcggcggcgccccagacccgaggggacgcgcgggccttgcgccgcgggagcggacggcggcggaggagaccctaggctcgcggcccgaggcgggagggctcggcttctcgactgcccgcctccgaggccgccggccgcttctctctcccagagtggccgccgcccctggagactcgccgtgacacgggcctaagccgccgccgcgggagtcctgaccgctcggacccgtcggatcaggccgggtgggagcgagcttgcgggcaggtgccgctcccggagggtgggccggaggcgaggcgcccaccgcgcggctcgcgggccgggctcggcggaggggccgctcgcgcagcacccccaccgcgggccggagcccgggtcgccgccccgccttctcccgggaccgcccggccggagctgcgggggccgagggacgccgcgcccgccgccgccagccgggctcgcgcgggagagcagggaagagaaactttgccttttattgtttttagtccttaagtgcaaggaactctgtgttgggaggaaaaatgtccttcttcaatttccgtaagatcttcaagttggggagcgagaagaagaagaagcagtacgaacacgtgaagagggacctgaaccccgaagacttttgggagattataggagaactgggcgacggagcctttgggaaagtgtacaaggcccagaataaagagaccagtgttttagctgctgcaaaagtgattgacactaaatctgaagaagaacttgaagattacatggtagagattgacatattagcatcttgtgatcacccaaatatagtcaagcttctagatgccttctattatgagaacaatctttggatcctcattgaattttgtgcaggtggagcagtagatgctgtgatgcttgaacttgagagaccattaactgagtcccaaatacaagtagtttgcaagcagactttagatgcattgaactacttacatgataataagatcatccacagagatctgaaggctggcaacattctctttaccttagatggagatatcaaattggcggattttggagtatcagctaaaaacacgaggacaattcaaagaagagattcctttattggtacaccatattggatggctcctgaagtagtcatgtgtgaaacatctaaggacagaccctatgactacaaagctgatgtttggtccctgggtatcactttaatagaaatggctgagatagaaccacctcatcatgaattaaatccaatgcgagtgctgctaaaaatagcaaaatctgagccacctacattagcacagccatccagatggtcttcaaattttaaggactttctaaagaaatgcttagaaaagaatgtggatgccaggtggactacatctcagctgctgcagcatccctttgttactgttgattccaacaaacccatccgagaattgattgcagaggcgaaggctgaagtaacagaagaagttgaagatggcaaagaggaagatgaagaggaggaaacagaaaattctctgccaatacctgcaagtaagcgtgcatcttctgaccttagtatcgccagctctgaagaagataaactttcacaaaatgcttgtattttggagtctgtctcagaaaaaacagaacgtagtaactctgaagataaactcaacagcaaaattcttaatgaaaaacccaccactgatgaacctgaaaaggctgtggaggatattaatgaacatattaccgatgctcagttagaagcaatgactgaactccatgacagaacagcagtaatcaaggagaatgaaagagagaagaggcccaagcttgaaaatctgcctgacacagaagaccaagaaactgtggacattaattcagtcagtgaaggaaaagagaataatataatgataaccttagaaacaaatattgaacataatctaaaatctgaggaagaaaaggatcaggaaaagcaacagatgtttgaaaataagcttataaaatctgaagaaattaaagatactattttgcaaacagtagatttagtttctcaagagactggagaaaaagaggcaaatattcaggcagttgatagtgaagttgggcttacaaaggaagacacccaagagaaattgggggaagacgacaaaactcaaaaagatgtgatcagcaatacaagtgatgtgataggaacatgtgaggcagcagatgtggctcagaaagtggatgaagacagtgctgaggatacgcagagtaatgatgggaaagaagtggtcgaagtaggccagaaattaattaataagcccatggtgggtcctgaggctggtggtactaaggaagttcctattaaagaaatagttgaaatgaatgaaatagaagaaggtaaaaataaggaacaagcaataaacagttcagagaacataatggacatcaatgaggaaccaggaacaactgaaggtgaagaaatcactgagtcaagtagcactgaagaaatggaggtcagaagtgtggtggctgatactgaccaaaaggctttaggaagtgaagttcaggatgcttctaaagtcactactcagatagataaagagaaaaaagaaattccagtgtcaattaaaaaagagcctgaagttactgtagtttcacagcccactgaacctcagcctgttctaatacccagtattaatatcaactctgacagtggagaaaataaagaagaaataggttctttatcaaaaactgaaactattctgccaccagaatctgagaatccaaaggaaaatgataatgattcaggcactggttccactgctgatactagcagtattgacttgaatttatccatctctagctttctaagtaaaactaaagacagtggatcgatatctttacaagaaacaagaagacaaaagaaaacattgaagaaaacacgcaaatttattgttgatggtgtagaagtgagtgtaacaacatcaaagatagttacagatagtgattccaaaactgaagaattgcggtttcttagacgtcaggaacttcgggaattaagatttcttcagaaagaagagcaaagagcccaacaacagctcaatagcaaactacagcaacaacgagaacaaattttccggcgctttgagcaggaaatgatgagtaaaaagcgacaatatgaccaggaaattgagaatctagaaaaacagcagaaacagactatcgaacgcctggaacaagagcacacaaatcgcttgcgagatgaagccaaacgcatcaaaggagaacaagagaaagagttgtccaaatttcagaatatgctgaagaaccgaaagaaggaggaacaagagtttgttcagaaacaacagcaagaattagatggctctctgaaaaagatcatccagcagcagaaggcagagttagctaatattgagagagagtgcctgaataacaagcaacagctcatgagagctcgagaagctgcaatttgggagctcgaagaacgacacttacaagaaaaacaccagctgctcaaacagcagcttaaagatcagtatttcatgcaaagacatcagctacttaagcgccacgagaaggaaacagagcaaatgcagcgttacaatcaaagacttattgaggaattgaaaaacagacagactcaagaaagagcaagactgcccaagattcagcgcagtgaagccaagactcgaatggccatgtttaagaagagtttgagaattaactcaacagccacaccagatcaggaccgtgataaaattaaacagtttgctgcacaagaagaaaagaggcagaaaaatgagagaatggctcagcatcagaaacatgagaatcaaatgcgagatcttcagttgcagtgtgaagccaatgtccgcgaactgcatcagctgcagaatgaaaaatgccacttgttggttgagcatgagactcagaaactgaaggagttagatgaggaacatagccaagaattaaaggagtggagagagaaattgagacctaggaaaaagacactggaagaagagtttgccaggaaactacaggaacaggaagtattctttaaaatgactggggagtctgaatgccttaacccatcaacacagagccggatttccaaattttatcctattcccagcttgcattccaccggatcataacaaagggaagcattctgtgcgtgggtttggctctttcagtatgtcattctgttctcatcttctgccacagtctctcagatagctcatgaagacaatcacctgcctcaccttctaggtgttttccttttttgttttttttgttttgttttgtttttaagcaaagatgaagggaaaacgaactaagacagacgctaggccatgttggcaaagtagcatcttggtgactaaggtgactttgtatattcatcttaaaaattatgttctttagacactgctacctgaaaactgttggagaaataatgtttaaagttatttaagaaaaactgttacatcactaagtattaataaattcttcttacctgacgtaacttctcaatgcctaaattctgtagttgaagctctgctgcagagagttgggataattttcttttggtggatcagctctcataaaaaagctatgatttgctcaaatatgctgttgactcagtaaatgaatatatttttttctttaaataggaacaacctcttttaaaagagaaaaattatttcagtgatttgtcaaaacgaattacctcttttggcatgagctaataattgagggtgctaattttcttaagatagtgcctaaaacactaaatttcagtcaagtcgtaagtaggattttctttttgatcaacagggacaaaaacatctttagaattaaaaacatggttgttttggaatttttgcttctcttaccgtttgatagaaattttcatcctaaaatacatgtacaaagtttggaaagatgaaaaaaagaggtagcttttagattgcaaactggaaatgtaaaactcatgaaatttaagcaatataggtttagctatctgtgtttattttctaaaataatacctgagctggttaaatgatttctctccatcttagctaattctgtttaaaactctgtcagaggcctgcaggctgtgagttatatttataaatatatcttcagaaattaatcttaaaagaggcattagttcagaatacttttttaaaagtttaaattaaatatttaggcacgtcaggaattacttttccttattttgaaatgaggctacttatgtcttggttttattttgttccatgtttaaatcattcactttgatttgagtgggaaaagcctgaagcctttatcatgtggttgctggtgtgtgtaattattaatgaaatgttcactcctagtcccttatgaggcttagaatttcaaccacgtgtcaggtcagacagtattataaactgtactttgctgtctgagacagcacatttgtgaatgatgcttgctgcctgccattttcaacctattctctcttaagagtgctaggtaccaaattgtgaaagtttgttttcagttatattacttttgaggctggtgaaaaatttaaatgtaactttgtgggaacactgattcatatttagaaaatgtaaatgtctgtagcactttcttgcagttaatttgaaaactttggatgctgaaccttgtttgtcagtgatttagatgatttaaaaatgcatgtgtgatttgaattttataattgttttgacaagcataatttacttggacaacttcgtaggtagccttaacttctggccaagtttgttttttatataaatatatatacatatatacatattatgtatggttgtaaattcatacacttatcacatgaatgtgttactgtatacaaaactcttaatgctttattctcaaatgctgggttgaaaaatgttttgaaagccttttaaaatatatatctttataaagtaatattcaggatgatgataaaaattgtttatattgttatgataaaaatgacagtataatgttgcccagtgtatttaatgatttatttgaagagggattgggaaggaacgtcttcataccactttctcctttgaaattttcagtttattgacttttaaaaaatgaatacctcaggcagtagacattttttttctagtatcatttaattgataccctgtgcgctaaatagtgtgtggtgcctgattaatttggtctgaatatttgattctttctgttcctttcaacttgacattcagattattgactcaaggagagaggctcagagtggaatggttggcgctgtgggtaaggttggatctcccttaaaactgccttttggattcagtgtttgtgcttgagttcgctttcaaatatgaccataatcgtgtgggtgcaagactgtacagtgatacatatgtagaggtaaagcattcattttaatacttaaagttatataaatcttttcaaaaagtgttttgttataaaatacgctgtttgtacccataccagcccacctcttctgaggccctgtattcaaatagatgatagtgatctatctttcctgcatgaagtgtaggtggcgagtgggcgaggggcgcagacttctttgaaatcgaagggtacagtcaaatctactgctgatttggttgttttgttgctgtggcagaatatgccatgaaacacatacagacttctccgaacgtgcaccctcatcagccacctcctcccctctttccctgagtgctgtgaacacagcagacctgcacacttctgcagatccagctcctacagcttggggcactaggctgcctttcctagtcctgtcaacaaccatacagtgcgaattgctgaattagctgctattctatgtggagtcacattaagctttttcttatctttttctatggggaagctatagggtgggtaaggaaaaaatgttgaatgcttttactttgctgaaaatattagaactctcttgtgacaggatacagcaaattataattaaatataaattaccagaaccagagctacctctaagtcatacttcctcaagcacaaagctctcaggcatatgagacccaccttaatgaagggtctctgatttcttgagcatcagcgagtttcagaagtgactatttttttgtactcttctagtttccttgtaactatacactttttcccattccacactgtgcttaaatgacaaagactcttctgagaagccaaattctgtccaagtattaactagagatattgttgattaaagaaaatctagaactgaagtgaaagaagagagttccagttctaatagtcttttgattaacaattcttttctgagaaatgatttttataagaaatggggtgattctttaaatgcttttcttaagttgaaggcacaacagttaatggctgtattgttgctattccgttgctgacatgtttttgataaagctttaacattcctgctactaattttggcggagagtgtttgccaggtttcaatgtgggctgcagctttttgtgctccttctctggtttgcagtgtaatgagttcataagctaaattttcagaaagaattttgtttaagattatgcctcttatctacttgagagcaacatgtcttttcaatcatgggattgacacatgaaaaataaagttatttcttaatcaa

SEQ ID NO: 186739 - DNA, 7766 bp, Homo sapiens
  Payload ID: 16769
  Gene Symbol: SLK
  Gene Name: STE20-like kinase
  Uniprot ID: Q9H2G2
  ENST ID: ENST00000369755
  CDS Start-End: 546-4253
gcggcggcggcgccccagacccgaggggacgcgcgggccttgcgccgcgggagcggacggcggcggaggagaccctaggctcgcggcccgaggcgggagggctcggcttctcgactgcccgcctccgaggccgccggccgcttctctctcccagagtggccgccgcccctggagactcgccgtgacacgggcctaagccgccgccgcgggagtcctgaccgctcggacccgtcggatcaggccgggtgggagcgagcttgcgggcaggtgccgctcccggagggtgggccggaggcgaggcgcccaccgcgcggctcgcgggccgggctcggcggaggggccgctcgcgcagcacccccaccgcgggccggagcccgggtcgccgccccgccttctcccgggaccgcccggccggagctgcgggggccgagggacgccgcgcccgccgccgccagccgggctcgcgcgggagagcagggaagagaaactttgccttttattgtttttagtccttaagtgcaaggaactctgtgttgggaggaaaaatgtccttcttcaatttccgtaagatcttcaagttggggagcgagaagaagaagaagcagtacgaacacgtgaagagggacctgaaccccgaagacttttgggagattataggagaactgggcgacggagcctttgggaaagtgtacaaggcccagaataaagagaccagtgttttagctgctgcaaaagtgattgacactaaatctgaagaagaacttgaagattacatggtagagattgacatattagcatcttgtgatcacccaaatatagtcaagcttctagatgccttctattatgagaacaatctttggatcctcattgaattttgtgcaggtggagcagtagatgctgtgatgcttgaacttgagagaccattaactgagtcccaaatacaagtagtttgcaagcagactttagatgcattgaactacttacatgataataagatcatccacagagatctgaaggctggcaacattctctttaccttagatggagatatcaaattggcggattttggagtatcagctaaaaacacgaggacaattcaaagaagagattcctttattggtacaccatattggatggctcctgaagtagtcatgtgtgaaacatctaaggacagaccctatgactacaaagctgatgtttggtccctgggtatcactttaatagaaatggctgagatagaaccacctcatcatgaattaaatccaatgcgagtgctgctaaaaatagcaaaatctgagccacctacattagcacagccatccagatggtcttcaaattttaaggactttctaaagaaatgcttagaaaagaatgtggatgccaggtggactacatctcagctgctgcagcatccctttgttactgttgattccaacaaacccatccgagaattgattgcagaggcgaaggctgaagtaacagaagaagttgaagatggcaaagaggaagatgaagaggaggaaacagaaaattctctgccaatacctgcaagtaagcgtgcatcttctgaccttagtatcgccagctctgaagaagataaactttcacaaaatgcttgtattttggagtctgtctcagaaaaaacagaacgtagtaactctgaagataaactcaacagcaaaattcttaatgaaaaacccaccactgatgaacctgaaaaggctgtggaggatattaatgaacatattaccgatgctcagttagaagcaatgactgaactccatgacagaacagcagtaatcaaggagaatgaaagagagaagaggcccaagcttgaaaatctgcctgacacagaagaccaagaaactgtggacattaattcagtcagtgaaggaaaagagaataatataatgataaccttagaaacaaatattgaacataatctaaaatctgaggaagaaaaggatcaggaaaagcaacagatgtttgaaaataagcttataaaatctgaagaaattaaagatactattttgcaaacagtagatttagtttctcaagagactggagaaaaagaggcaaatattcaggcagttgatagtgaagttgggcttacaaaggaagacacccaagagaaattgggggaagacgacaaaactcaaaaagatgtgatcagcaatacaagtgatgtgataggaacatgtgaggcagcagatgtggctcagaaagtggatgaagacagtgctgaggatacgcagagtaatgatgggaaagaagtggtcgaagtaggccagaaattaattaataagcccatggtgggtcctgaggctggtggtactaaggaagttcctattaaagaaatagttgaaatgaatgaaatagaagaaggtaaaaataaggaacaagcaataaacagttcagagaacataatggacatcaatgaggaaccaggaacaactgaaggtgaagaaatcactgagtcaagtagcactgaagaaatggaggtcagaagtgtggtggctgatactgaccaaaaggctttaggaagtgaagttcaggatgcttctaaagtcactactcagatagataaagagaaaaaagaaattccagtgtcaattaaaaaagagcctgaagttactgtagtttcacagcccactgaacctcagcctgttctaatacccagtattaatatcaactctgacagtggagaaaataaagaagaaataggttctttatcaaaaactgaaactattctgccaccagaatctgagaatccaaaggaaaatgataatgattcaggcactggttccactgctgatactagcagtattgacttgaatttatccatctctagctttctaagtaaaactaaagacagtggatcgatatctttacaagaaacaagaagacaaaagaaaacattgaagaaaacacgcaaatttattgttgatggtgtagaagtgagtgtaacaacatcaaagatagttacagatagtgattccaaaactgaagaattgcggtttcttagacgtcaggaacttcgggaattaagatttcttcagaaagaagagcaaagagcccaacaacagctcaatagcaaactacagcaacaacgagaacaaattttccggcgctttgagcaggaaatgatgagtaaaaagcgacaatatgaccaggaaattgagaatctagaaaaacagcagaaacagactatcgaacgcctggaacaagagcacacaaatcgcttgcgagatgaagccaaacgcatcaaaggagaacaagagaaagagttgtccaaatttcagaatatgctgaagaaccgaaagaaggaggttataaatgaagtggagaaagcacccaaagagctgagaaaagagctcatgaaacgcaggaaagaggagcttgcacaaagccagcatgctcaggaacaagagtttgttcagaaacaacagcaagaattagatggctctctgaaaaagatcatccagcagcagaaggcagagttagctaatattgagagagagtgcctgaataacaagcaacagctcatgagagctcgagaagctgcaatttgggagctcgaagaacgacacttacaagaaaaacaccagctgctcaaacagcagcttaaagatcagtatttcatgcaaagacatcagctacttaagcgccacgagaaggaaacagagcaaatgcagcgttacaatcaaagacttattgaggaattgaaaaacagacagactcaagaaagagcaagactgcccaagattcagcgcagtgaagccaagactcgaatggccatgtttaagaagagtttgagaattaactcaacagccacaccagatcaggaccgtgataaaattaaacagtttgctgcacaagaagaaaagaggcagaaaaatgagagaatggctcagcatcagaaacatgagaatcaaatgcgagatcttcagttgcagtgtgaagccaatgtccgcgaactgcatcagctgcagaatgaaaaatgccacttgttggttgagcatgagactcagaaactgaaggagttagatgaggaacatagccaagaattaaaggagtggagagagaaattgagacctaggaaaaagacactggaagaagagtttgccaggaaactacaggaacaggaagtattctttaaaatgactggggagtctgaatgccttaacccatcaacacagagccggatttccaaattttatcctattcccagcttgcattccaccggatcataacaaagggaagcattctgtgcgtgggtttggctctttcagtatgtcattctgttctcatcttctgccacagtctctcagatagctcatgaagacaatcacctgcctcaccttctaggtgttttccttttttgttttttttgttttgttttgtttttaagcaaagatgaagggaaaacgaactaagacagacgctaggccatgttggcaaagtagcatcttggtgactaaggtgactttgtatattcatcttaaaaattatgttctttagacactgctacctgaaaactgttggagaaataatgtttaaagttatttaagaaaaactgttacatcactaagtattaataaattcttcttacctgacgtaacttctcaatgcctaaattctgtagttgaagctctgctgcagagagttgggataattttcttttggtggatcagctctcataaaaaagctatgatttgctcaaatatgctgttgactcagtaaatgaatatatttttttctttaaataggaacaacctcttttaaaagagaaaaattatttcagtgatttgtcaaaacgaattacctcttttggcatgagctaataattgagggtgctaattttcttaagatagtgcctaaaacactaaatttcagtcaagtcgtaagtaggattttctttttgatcaacagggacaaaaacatctttagaattaaaaacatggttgttttggaatttttgcttctcttaccgtttgatagaaattttcatcctaaaatacatgtacaaagtttggaaagatgaaaaaaagaggtagcttttagattgcaaactggaaatgtaaaactcatgaaatttaagcaatataggtttagctatctgtgtttattttctaaaataatacctgagctggttaaatgatttctctccatcttagctaattctgtttaaaactctgtcagaggcctgcaggctgtgagttatatttataaatatatcttcagaaattaatcttaaaagaggcattagttcagaatacttttttaaaagtttaaattaaatatttaggcacgtcaggaattacttttccttattttgaaatgaggctacttatgtcttggttttattttgttccatgtttaaatcattcactttgatttgagtgggaaaagcctgaagcctttatcatgtggttgctggtgtgtgtaattattaatgaaatgttcactcctagtcccttatgaggcttagaatttcaaccacgtgtcaggtcagacagtattataaactgtactttgctgtctgagacagcacatttgtgaatgatgcttgctgcctgccattttcaacctattctctcttaagagtgctaggtaccaaattgtgaaagtttgttttcagttatattacttttgaggctggtgaaaaatttaaatgtaactttgtgggaacactgattcatatttagaaaatgtaaatgtctgtagcactttcttgcagttaatttgaaaactttggatgctgaaccttgtttgtcagtgatttagatgatttaaaaatgcatgtgtgatttgaattttataattgttttgacaagcataatttacttggacaacttcgtaggtagccttaacttctggccaagtttgttttttatataaatatatatacatatatacatattatgtatggttgtaaattcatacacttatcacatgaatgtgttactgtatacaaaactcttaatgctttattctcaaatgctgggttgaaaaatgttttgaaagccttttaaaatatatatctttataaagtaatattcaggatgatgataaaaattgtttatattgttatgataaaaatgacagtataatgttgcccagtgtatttaatgatttatttgaagagggattgggaaggaacgtcttcataccactttctcctttgaaattttcagtttattgacttttaaaaaatgaatacctcaggcagtagacattttttttctagtatcatttaattgataccctgtgcgctaaatagtgtgtggtgcctgattaatttggtctgaatatttgattctttctgttcctttcaacttgacattcagattattgactcaaggagagaggctcagagtggaatggttggcgctgtgggtaaggttggatctcccttaaaactgccttttggattcagtgtttgtgcttgagttcgctttcaaatatgaccataatcgtgtgggtgcaagactgtacagtgatacatatgtagaggtaaagcattcattttaatacttaaagttatataaatcttttcaaaaagtgttttgttataaaatacgctgtttgtacccataccagcccacctcttctgaggccctgtattcaaatagatgatagtgatctatctttcctgcatgaagtgtaggtggcgagtgggcgaggggcgcagacttctttgaaatcgaagggtacagtcaaatctactgctgatttggttgttttgttgctgtggcagaatatgccatgaaacacatacagacttctccgaacgtgcaccctcatcagccacctcctcccctctttccctgagtgctgtgaacacagcagacctgcacacttctgcagatccagctcctacagcttggggcactaggctgcctttcctagtcctgtcaacaaccatacagtgcgaattgctgaattagctgctattctatgtggagtcacattaagctttttcttatctttttctatggggaagctatagggtgggtaaggaaaaaatgttgaatgcttttactttgctgaaaatattagaactctcttgtgacaggatacagcaaattataattaaatataaattaccagaaccagagctacctctaagtcatacttcctcaagcacaaagctctcaggcatatgagacccaccttaatgaagggtctctgatttcttgagcatcagcgagtttcagaagtgactatttttttgtactcttctagtttccttgtaactatacactttttcccattccacactgtgcttaaatgacaaagactcttctgagaagccaaattctgtccaagtattaactagagatattgttgattaaagaaaatctagaactgaagtgaaagaagagagttccagttctaatagtcttttgattaacaattcttttctgagaaatgatttttataagaaatggggtgattctttaaatgcttttcttaagttgaaggcacaacagttaatggctgtattgttgctattccgttgctgacatgtttttgataaagctttaacattcctgctactaattttggcggagagtgtttgccaggtttcaatgtgggctgcagctttttgtgctccttctctggtttgcagtgtaatgagttcataagctaaattttcagaaagaattttgtttaagattatgcctcttatctacttgagagcaacatgtcttttcaatcatgggattgacacatgaaaaataaagttatttcttaatcaa

SEQ ID NO: 186740 - DNA, 2962 bp, Homo sapiens
  Payload ID: 16770
  Gene Symbol: STRADA
  Gene Name: STE20-related kinase adaptor alpha
  ENST ID: ENST00000245865
  CDS Start-End: 211-915
gcttgctaactccaggaacaggtttaagtttttgaaactgaagtaggcctacacagtaggaactcatgtcatttcttgtaagtaaaccagagcgaatcaggcggtgggtctcggaaaagttcattgttgagggcttaagagatttggaactatttggagaccaatgatgcgagctcagagtcaatagcatccttctctaaacaggaggtcatgagtagctttctgccagagggagggtgttacgagctgctcactgtgataggcaaaggatttgaggacctgatgactgtgaatctagcaaggtacaaaccaacaggagagtacgtgactgtacggaggattaacctagaagcttgttccaatgagatggtaacattcttgcagggcgagctgcatgtctccaaactcttcaaccatcccaatatcgtgccatatcgagccacttttattgcagacaatgagctgtgggttgtcacatcattcatggcatacggttctgcaaaagatctcatctgtacacacttcatggatggcatgaatgagctggcgattgcttacatcctgcagggggtgctgaaggccctcgactacatccaccacatgggatatgtacacaggagtgtcaaagccagccacatcctgatctctgtggatgggaaggtctacctgtctggtttgcgcagcaacctcagcatgataagccatgggcagcggcagcgagtggtccacgattttcccaagtacagtgtcaaggttctgccgtggctcagccccgaggtcctccagcagggttatgatgccaagtctgacatctacagtgtgggaatcacagcctgtgaactggccaacggccatgtcccctttaaggatatgcctgccacccagggtgaagactctacggtaaaaggaatttgatgccttggaaagggagagcggaaactgtgagccctgctttccagccatggcgaaagcgggtacttttgtgcaacccctctcctttcacgttggcctggctagggcggagctgccacgccagtgaccagcgtttctttgggaaaattggacttactccacttccaccttttccactcttcaaatgatcacatttgcatattgggaacagtgtatttgtgaagagactctcaggccttccagggaccaccccccccccccacccgctacagcccaggtcctggttctgtcctccccagatgctgctagagaaactgaacggcacagtgccctgcctgttggataccagcaccatccccgctgaggagctgaccatgagcccttcgcgctcagtggccaactctggcctgagtgacagcctgaccaccagcaccccccggccctccaacggtgactcgccctcccacccctaccaccgaaccttctccccccacttccaccactttgtggagcagtgccttcagcgcaacccggatgccaggtatccctgctggcctgggcctgggcttcgggagagcagagggtgctcaggagggtaaggccagggtgtgaagggacttacctcccaaaggttctgcaggggaatctggagctacacacaggagggatcagctcctgggtgtgtcagaggccagcctggggagctctggccactgcttcccatgagctgagggagagggagaggggacccgaggctgaggcataagtggcaggatttcgggaagctggggacacggcagtgatgctgcggtctctcctcccctttccctccaggcccagtgccagcaccctcctgaaccactctttcttcaagcaggtatcgtagccccttcgttctggttctggttctagttctggttctaacaactcacaatccctttagctttctctcccctccctttgaatgagagaaactaccccgcttccgaagcccctgaaagacactgctccttcctctcatggagttggctccgacagcccgtctgccaccaggccatggttccttgccccatggtgtcctgggacccagagcaacaggatctgtcacccacctctctcttctcccccagatcaagcgacgtgcctcagaggctttgcccgaattgcttcgtcctgtcacccccatcaccaattttgagggcagccagtctcaggaccacagtggaatctttggcctggtaacaaacctggaagagctggaggtggacgattgggagttctgagcctctgcaaactgtgcgcattctccagccagggatgcagaggccacccagaggcccttcctgagggccggccacattcccgccctcctgggcagattgggtagaaaggacattcttccaggaaagttgactgctgactgattgggaaagaaaatcctggagagacacttcactgctccaaggcttttgagacacaagggaatctcaacaaccagggatcaggagggtccaaagccgacattcccagtcctgtgagctcaggtgacctcctccgcagaagagagatgctgctctggccctgggagctgaattccaagcccagggtttggctccttaaacccgaggaccgccacctcttcccagtgcttgcgaccagcctcattctatttaactttgctctcagatgcctcagatgctataggtcagtgaaagggcaagtagtaagctgcctgcctcccttccctcagacctctccctcataattccagagaagggcatttctgtctttttaagcacagactaaggctggaacagtccatccttatccctcttctggcttgggccctgacacctaagtctttcccacggtttatgtgtgtgcctcattcctttcccaccaagaatccatcttagcgcctcctgccagctgccctggtgctttctccaagggccatcagtgtcttgcctagcttgagggcttaagtccttatgctgtgttagtttcgttgtcagaacaaattaaaattttcagagacgctgctggagaa

SEQ ID NO: 186741 - DNA, 2143 bp, Homo sapiens
  Payload ID: 16770
  Gene Symbol: STRADA
  Gene Name: STE20-related kinase adaptor alpha
  Uniprot ID: Q7RTN6
  ENST ID: ENST00000336174
  CDS Start-End: 114-1409
gcggcgcggcagtaaaactgaggaggcggagccaagacggtcggggctgcttgctaactccaggaacaggtttaagtttttgaaactgaagtaggcctacacagtaggaactcatgtcatttcttgtaagtaaaccagagcgaatcaggcggtgggtctcggaaaagttcattgttgagggcttaagagatttggaactatttggagagcagcctccgggtgacactcggagaaaaaccaatgatgcgagctcagagtcaatagcatccttctctaaacaggaggtcatgagtagctttctgccagagggagggtgttacgagctgctcactgtgataggcaaaggatttgaggacctgatgactgtgaatctagcaaggtacaaaccaacaggagagtacgtgactgtacggaggattaacctagaagcttgttccaatgagatggtaacattcttgcagggcgagctgcatgtctccaaactcttcaaccatcccaatatcgtgccatatcgagccacttttattgcagacaatgagctgtgggttgtcacatcattcatggcatacggttctgcaaaagatctcatctgtacacacttcatggatggcatgaatgagctggcgattgcttacatcctgcagggggtgctgaaggccctcgactacatccaccacatgggatatgtacacaggagtgtcaaagccagccacatcctgatctctgtggatgggaaggtctacctgtctggtttgcgcagcaacctcagcatgataagccatgggcagcggcagcgagtggtccacgattttcccaagtacagtgtcaaggttctgccgtggctcagccccgaggtcctccagcagaatctccagggttatgatgccaagtctgacatctacagtgtgggaatcacagcctgtgaactggccaacggccatgtcccctttaaggatatgcctgccacccagatgctgctagagaaactgaacggcacagtgccctgcctgttggataccagcaccatccccgctgaggagctgaccatgagcccttcgcgctcagtggccaactctggcctgagtgacagcctgaccaccagcaccccccggccctccaacggtgactcgccctcccacccctaccaccgaaccttctccccccacttccaccactttgtggagcagtgccttcagcgcaacccggatgccaggcccagtgccagcaccctcctgaaccactctttcttcaagcagatcaagcgacgtgcctcagaggctttgcccgaattgcttcgtcctgtcacccccatcaccaattttgagggcagccagtctcaggaccacagtggaatctttggcctggtaacaaacctggaagagctggaggtggacgattgggagttctgagcctctgcaaactgtgcgcattctccagccagggatgcagaggccacccagaggcccttcctgagggccggccacattcccgccctcctgggcagattgggtagaaaggacattcttccaggaaagttgactgctgactgattgggaaagaaaatcctggagagacacttcactgctccaaggcttttgagacacaagggaatctcaacaaccagggatcaggagggtccaaagccgacattcccagtcctgtgagctcaggtgacctcctccgcagaagagagatgctgctctggccctgggagctgaattccaagcccagggtttggctccttaaacccgaggaccgccacctcttcccagtgcttgcgaccagcctcattctatttaactttgctctcagatgcctcagatgctataggtcagtgaaagggcaagtagtaagctgcctgcctcccttccctcagacctctccctcataattccagagaagggcatttctgtctttttaagcacagactaaggctggaacagtccatccttatccctcttctggcttgggccctgacacctaagtctttcccacggtttatgtgtgtgcctcattcctttcccaccaagaatccatcttagcgcctcctgccagctgccctggtgctttctccaagggccatcagtgtcttgcctagcttgagggcttaagtccttatgctgtgttagtttcgttgtcagaa

SEQ ID NO: 186742 - DNA, 2121 bp, Homo sapiens
  Payload ID: 16770
  Gene Symbol: STRADA
  Gene Name: STE20-related kinase adaptor alpha
  Uniprot ID: Q7RTN6
  ENST ID: ENST00000375840
  CDS Start-End: 233-1354
cggagccaagacggtcggggctgcttgctaactccaggaacaggtttaagtttttgaaactgaagtaggcctacacagtaggaactcatgtcatttcttgtaagtaaaccagagcgaatcaggcggtgggtctcggaaaagttcattgttgagggcttaagagatttggaactatttggagaccaatgatgcgagctcagagtcaatagcatccttctctaaacaggaggtcatgagtagctttctgccagagggagggtgttacgagctgctcactgtgataggcaaaggatttgaggacctgatgactgtgaatctagcaaggtacaaaccaacaggagagtacgtgactgtacggaggattaacctagaagcttgttccaatgagatggtaacattcttgcagggcgagctgcatgtctccaaactcttcaaccatcccaatatcgtgccatatcgagccacttttattgcagacaatgagctgtgggttgtcacatcattcatggcatacggttctgcaaaagatctcatctgtacacacttcatggatggcatgaatgagctggcgattgcttacatcctgcagggggtgctgaaggccctcgactacatccaccacatgggatatgtacacaggagtgtcaaagccagccacatcctgatctctgtggatgggaaggtctacctgtctggtttgcgcagcaacctcagcatgataagccatgggcagcggcagcgagtggtccacgattttcccaagtacagtgtcaaggttctgccgtggctcagccccgaggtcctccagcagaatctccagggttatgatgccaagtctgacatctacagtgtgggaatcacagcctgtgaactggccaacggccatgtcccctttaaggatatgcctgccacccagatgctgctagagaaactgaacggcacagtgccctgcctgttggataccagcaccatccccgctgaggagctgaccatgagcccttcgcgctcagtggccaactctggcctgagtgacagcctgaccaccagcaccccccggccctccaacggtgactcgccctcccacccctaccaccgaaccttctccccccacttccaccactttgtggagcagtgccttcagcgcaacccggatgccaggcccagtgccagcaccctcctgaaccactctttcttcaagcagatcaagcgacgtgcctcagaggctttgcccgaattgcttcgtcctgtcacccccatcaccaattttgagggcagccagtctcaggaccacagtggaatctttggcctggtaacaaacctggaagagctggaggtggacgattgggagttctgagcctctgcaaactgtgcgcattctccagccagggatgcagaggccacccagaggcccttcctgagggccggccacattcccgccctcctgggcagattgggtagaaaggacattcttccaggaaagttgactgctgactgattgggaaagaaaatcctggagagacacttcactgctccaaggcttttgagacacaagggaatctcaacaaccagggatcaggagggtccaaagccgacattcccagtcctgtgagctcaggtgacctcctccgcagaagagagatgctgctctggccctgggagctgaattccaagcccagggtttggctccttaaacccgaggaccgccacctcttcccagtgcttgcgaccagcctcattctatttaactttgctctcagatgcctcagatgctataggtcagtgaaagggcaagtagtaagctgcctgcctcccttccctcagacctctccctcataattccagagaagggcatttctgtctttttaagcacagactaaggctggaacagtccatccttatccctcttctggcttgggccctgacacctaagtctttcccacggtttatgtgtgtgcctcattcctttcccaccaagaatccatcttagcgcctcctgccagctgccctggtgctttctccaagggccatcagtgtcttgcctagcttgagggcttaagtccttatgctgtgttagtttcgttgtcagaacaaattaaaattttcagagacgctgctggagaa

SEQ ID NO: 186743 - DNA, 2762 bp, Homo sapiens
  Payload ID: 16770
  Gene Symbol: STRADA
  Gene Name: STE20-related kinase adaptor alpha
  Uniprot ID: Q7RTN6
  ENST ID: ENST00000392950
  CDS Start-End: 275-1321
cggcgcggcggcggctgctagggcctgccgcagccgcggccactcggaaagggcgggacttccccgcagggcggggtggggcggagcgctctatcagtcctcccggtcgccccactgcgcatggcacgttgcgtactcccctcccagcaaccggtctggcggcggcgcggcagtaaaactgaggaggcggagccaagacggtcggggctgcttgctaactccaggaacaggtttaagtttttgaaactgaagtaggcctacacagtaggaactcatgtcatttcttaccaatgatgcgagctcagagtcaatagcatccttctctaaacaggaggtcatgagtagctttctgccagagggagggtgttacgagctgctcactgtgataggcaaaggatttgaggacctgatgactgtgaatctagcaaggtacaaaccaacaggagagtacgtgactgtacggaggattaacctagaagcttgttccaatgagatggtaacattcttgcagggcgagctgcatgtctccaaactcttcaaccatcccaatatcgtgccatatcgagccacttttattgcagacaatgagctgtgggttgtcacatcattcatggcatacggttctgcaaaagatctcatctgtacacacttcatggatggcatgaatgagctggcgattgcttacatcctgcagggggtgctgaaggccctcgactacatccaccacatgggatatgtacacaggagtgtcaaagccagccacatcctgatctctgtggatgggaaggtctacctgtctggtttgcgcagcaacctcagcatgataagccatgggcagcggcagcgagtggtccacgattttcccaagtacagtgtcaaggttctgccgtggctcagccccgaggtcctccagcagaatctccagggttatgatgccaagtctgacatctacagtgtgggaatcacagcctgtgaactggccaacggccatgtcccctttaaggatatgcctgccacccagatgctgctagagaaactgaacggcacagtgccctgcctgttggataccagcaccatccccgctgaggagctgaccatgagcccttcgcgctcagtggccaactctggcctgagtgacagcctgaccaccagcaccccccggccctccaacggtgactcgccctcccacccctaccaccgaaccttctccccccacttccaccactttgtggagcagtgccttcagcgcaacccggatgccaggtatccctgctggcctgggcctgggcttcgggagagcagagggtgctcaggagggtaaggccagggtgtgaagggacttacctcccaaaggttctgcaggggaatctggagctacacacaggagggatcagctcctgggtgtgtcagaggccagcctggggagctctggccactgcttcccatgagctgagggagagggagaggggacccgaggctgaggcataagtggcaggatttcgggaagctggggacacggcagtgatgctgcggtctctcctcccctttccctccaggcccagtgccagcaccctcctgaaccactctttcttcaagcaggtatcgtagccccttcgttctggttctggttctagttctggttctaacaactcacaatccctttagctttctctcccctccctttgaatgagagaaactaccccgcttccgaagcccctgaaagacactgctccttcctctcatggagttggctccgacagcccgtctgccaccaggccatggttccttgccccatggtgtcctgggacccagagcaacaggatctgtcacccacctctctcttctcccccagatcaagcgacgtgcctcagaggctttgcccgaattgcttcgtcctgtcacccccatcaccaattttgagggcagccagtctcaggaccacagtggaatctttggcctggtaacaaacctggaagagctggaggtggacgattgggagttctgagcctctgcaaactgtgcgcattctccagccagggatgcagaggccacccagaggcccttcctgagggccggccacattcccgccctcctgggcagattgggtagaaaggacattcttccaggaaagttgactgctgactgattgggaaagaaaatcctggagagacacttcactgctccaaggcttttgagacacaagggaatctcaacaaccagggatcaggagggtccaaagccgacattcccagtcctgtgagctcaggtgacctcctccgcagaagagagatgctgctctggccctgggagctgaattccaagcccagggtttggctccttaaacccgaggaccgccacctcttcccagtgcttgcgaccagcctcattctatttaactttgctctcagatgcctcagatgctataggtcagtgaaagggcaagtagtaagctgcctgcctcccttccctcagacctctccctcataattccagagaagggcatttctgtctttttaagcacagactaaggctggaacagtccatccttatccctcttctggcttgggccctgacacctaagtctttcccacggtttatgtgtgtgcctcattcctttcccaccaagaatccatcttagcgcctcctgccagctgccctggtgctttctccaagggccatcagtgtcttgcctagcttgagggcttaagtccttatgctgtgttagtttcgttgtcagaacaaattaaaattttcagagacgc

SEQ ID NO: 186744 - DNA, 1398 bp, Homo sapiens
  Payload ID: 16770
  Gene Symbol: STRADA
  Gene Name: STE20-related kinase adaptor alpha
  Uniprot ID: Q7RTN6
  ENST ID: ENST00000447001
  CDS Start-End: 183-1082
atcagtcctcccggtcgccccactgcgcatggcacgttgcgtactcccctcccagcaaccggtctggcggcggcgcggcagtaaaactgaggaggcggagccaagacggtcggggctgcttgctaactccaggaacaggtttaagtttttgaaactgaagtaggcctacacagtaggaactcatgtcatttcttgtaagtaaaccagagcgaatcaggcggtgggtctcggaaaagttcattgttgagggcttaagagatttggaactatttggaggcaaaggatttgaggacctgatgactgtgaatctagcaaggtacaaaccaacaggagagtacgtgactgtacggaggattaacctagaagcttgttccaatgagatggtaacattcttgcagggcgagctgcatgtctccaaactcttcaaccatcccaatatcgtgccatatcgagccacttttattgcagacaatgagctgtgggttgtcacatcattcatggcatacggttctgcaaaagatctcatctgtacacacttcatggatggcatgaatgagctggcgattgcttacatcctgcagggggtgctgaaggccctcgactacatccaccacatgggatatgtacacaggagtgtcaaagccagccacatcctgatctctgtggatgggaaggtctacctgtctggtttgcgcagcaacctcagcatgataagccatgggcagcggcagcgagtggtccacgattttcccaagtacagtgtcaaggttctgccgtggctcagccccgaggtcctccagcagaatctccagggttatgatgccaagtctgacatctacagtgtgggaatcacagcctgtgaactggccaacggccatgtcccctttaaggatatgcctgccacccagatgctgctagagaaactgaacggcacagtgccctgcctgttggataccagcaccatccccgctgaggagctgaccatgagcccttcgcgctcagtggccaactctggcctgagtgacagcctgaccaccagcaccccccggccctccaacggcccagtgccagcaccctcctgaaccactctttcttcaagcagatcaagcgacgtgcctcagaggctttgcccgaattgcttcgtcctgtcacccccatcaccaattttgagggcagccagtctcaggaccacagtggaatctttggcctggtaacaaacctggaagagctggaggtggacgattgggagttctgagcctctgcaaactgtgcgcattctccagccagggatgcagaggccacccagaggcccttcctgagggccggccacattcccgccctcctgggcagattgggtagaaaggacattcttccaggaaagttgactgctgactgatt

SEQ ID NO: 186745 - DNA, 604 bp, Homo sapiens
  Payload ID: 16770
  Gene Symbol: STRADA
  Gene Name: STE20-related kinase adaptor alpha
  ENST ID: ENST00000579549
  CDS Start-End: 388-604
aaaactgaggaggcggagccaagacggtcggggctgcttgctaactccaggaacaggtacctgcctggcggggtgcctggtacgctgccggggccagtccctcctggctctgccaccgattccatctccccaggcccgggccttcgtcggagcggccatcctgggctcacctcaccctccacgggccccctttttaacccgcgtcctcgactcccgcaatgaggcgccgcagcccgagagcagaataggcttgggcctggcggggagacgctgaagcggagttgccgggcgagagaggcgggctcctgctttccccttcctccccaccccctaggacttccaggtttaagtttttgaaactgaagtaggcctacacagtaggaactcatgtcatttcttaccaatgatgcgagctcagagtcaatagcatccttctctaaacaggaggtcatgagtagctttctgccagagggagggtgttacgagctgctcactgtgataggcaaaggatttgaggacctgatgactgtgaatctagcaaggtacaaaccaacaggagagtacgtgactgtacggaggattaacctagaagcttgttccaatg

SEQ ID NO: 186746 - DNA, 563 bp, Homo sapiens
  Payload ID: 16770
  Gene Symbol: STRADA
  Gene Name: STE20-related kinase adaptor alpha
  ENST ID: ENST00000584110
  CDS Start-End: 533-563
aaaactgaggaggcggagccaagacggtcggggctgcttgctaactccaggaacaggtacctgcctggcggggtgcctggtacgctgccggggccagtccctcctggctctgccaccgattccatctccccaggcccgggccttcgtcggagcggccatcctgggctcacctcaccctccacgggccccctttttaacccgcgtcctcgactcccgcaatgaggcgccgcagcccgagagcagaataggcttgggcctggcggggagacgctgaagcggagttgccgggcgagagaggcgggctcctgctttccccttcctccccaccccctaggacttccaggtttaagtttttgaaactgaagtaggcctacacagtaggaactcatgtcatttcttgtaagtaaaccagagcgaatcaggcggtgggtctcggaaaagttcattgttgagggcttaagagatttggaactatttggagaccaatgatgcgagctcagagtcaatagcatccttctctaaacaggaggtcatgagtagctttctgccagagggagggtgtt

SEQ ID NO: 186747 - DNA, 1168 bp, Homo sapiens
  Payload ID: 16770
  Gene Symbol: STRADA
  Gene Name: STE20-related kinase adaptor alpha
  ENST ID: ENST00000579340
  CDS Start-End: 282-803
ccctcccagcaaccggtctggcggcggcgcggcagtaaaactgaggaggcggagccaagacggtcggggctgcttgctaactccaggaacaggtttaagtttttgaaactgaagtaggcctacacagtaggaactcatgtcatttcttgtaagtaaaccagagcgaatcaggcggtgggtctcggaaaagttcattgttgagggcttaagagatttggaactatttggagaccaatgatgcgagctcagagtcaatagcatccttctctaaacaggaggtcatgagtagctttctgccagagggagggtgttacgagctgctcactgtgataggcaaaggatttgaggacctgatgactgtgaatctagcaaggtacaaaccaacaggagagtacgtgactgtacggaggattaacctagaagcttgttccaatgagatggtaacattcttgcagggcgagctgcatgtctccaaactcttcaaccatcccaatatcgtgccatatcgagccacttttattgcagacaatgagctgtgggttgtcacatcattcatggcatacggttctgcaaaagatctcatctgtacacacttcatggatggcatgaatgagctggcgattgcttacatcctgcagggggtgctgaaggccctcgactacatccaccacatgggatatgtacacagaatctccagggttatgatgccaagtctgacatctacagtgtgggaatcacagcctgtgaactggccaacggccatgtcccctttaaggatatgcctgccacccagatgctgctagagaaactgaacggcacagtgccctgcctgttggataccagcaccatccccgctgaggagctgaccatgagcccttcgcgctcagtggccaactctggcctgagtgacagcctgaccaccagcaccccccggccctccaacggtgactcgccctcccacccctaccaccgaaccttctccccccacttccaccactttgtggagcagtgccttcagcgcaacccggatgccaggtatccctgctggcctgggcctgggcttcgggagagcagagggtgctcaggagggtaaggccagggtgtgaagggacttacctcccaaaggttctgcaggggaatctggagctacacacaggagggatcagct

SEQ ID NO: 186748 - DNA, 1159 bp, Homo sapiens
  Payload ID: 16770
  Gene Symbol: STRADA
  Gene Name: STE20-related kinase adaptor alpha
  Uniprot ID: Q7RTN6
  ENST ID: ENST00000582137
  CDS Start-End: 101-1045
aaaactgaggaggcggagccaagacggtcggggctgcttgctaactccaggaacaggtttaagtttttgaaactgaagtaggcctacacagtaggaactcatgtcatttcttgtaagtaaaccagagcgaatcaggaccaatgatgcgagctcagagtcaatagcatccttctctaaacaggaggtcatgagtagctttctgccagagggagggtgttacgagctgctcactgtgataggcaaaggatttgaggacctgatgactgtgaatctagcaaggtacaaaccaacaggagagtacgtgactgtacggaggattaacctagaagcttgttccaatgagatggtaacattcttgcagggcgagctgcatgtctccaaactcttcaaccatcccaatatcgtgccatatcgagccacttttattgcagacaatgagctgtgggttgtcacatcattcatggcatacggttctgcaaaagatctcatctgtacacacttcatggatggcatgaatgagctggcgattgcttacatcctgcagggggtgctgaaggccctcgactacatccaccacatgggatatgtacacaggagtgtcaaagccagccacatcctgatctctgtggatgggaaggtctacctgtctggtttgcgcagcaacctcagcatgataagccatgggcagcggcagcgagtggtccacgattttcccaagtacagtgtcaaggttctgccgtggctcagccccgaggtcctccagcagaatctccagggttatgatgccaagtctgacatctacagtgtgggaatcacagcctgtgaactggccaacggccatgtcccctttaaggatatgcctgccacccagatgctgctagagaaactgaacggcacagtgccctgcctgttggataccagcaccatccccgctgaggagctgaccatgagcccttcgcgctcagtggccaactctggcctgagtgacagcctgaccaccagcaccccccggccctccaacggcccagtgccagcaccctcctgaaccactctttcttcaagcagatcaagcgacgtgcctcagaggctttgcccgaattgcttcgtcctgtcacccccatcaccaattttgagggcagccagtctcaggaccacagtg

SEQ ID NO: 186749 - DNA, 563 bp, Homo sapiens
  Payload ID: 16770
  Gene Symbol: STRADA
  Gene Name: STE20-related kinase adaptor alpha
  ENST ID: ENST00000580338
  CDS Start-End: 328-563
tactcccctcccagcaaccggtctggcggcggcgcggcagtaaaactgaggaggcggagccaagacggtcggggctgcttgctaactccaggaacagacttaaaatttataagctgatgatgagcacttaacagtattgtttaagtttttgaaactgaagtaggcctacacagtaggaactcatgtcatttcttgtaagtaaaccagagcgaatcaggcggtgggtctcggaaaagttcattgttgagggcttaagagatttggaactatttggagaccaatgatgcgagctcagagtcaatagcatccttctctaaacaggaggtcatgagtagctttctgccagagggagggtgttacgagctgctcactgtgataggcaaaggatttgaggacctgatgactgtgaatctagcaaggtacaaaccaacaggagagtacgtgactgtacggaggattaacctagaagcttgttccaatgagatggtaacattcttgcagggcgagctgcatgtctccaaactcttcaaccatcccaatatcgtgccatatcgagccacttt

SEQ ID NO: 186750 - DNA, 525 bp, Homo sapiens
  Payload ID: 16770
  Gene Symbol: STRADA
  Gene Name: STE20-related kinase adaptor alpha
  ENST ID: ENST00000580288
  CDS Start-End: 390-525
gtaaaactgaggaggcggagccaagacggtcggggctgcttgctaactccaggaacaggtacctgcctggcggggtgcctggtacgctgccggggccagtccctcctggctctgccaccgattccatctccccaggcccgggccttcgtcggagcggccatcctgggctcacctcaccctccacgggccccctttttaacccgcgtcctcgactcccgcaatgaggcgccgcagcccgagagcagaataggcttgggcctggcggggagacgctgaagcggagttgccgggcgagagaggcgggctcctgctttccccttcctccccaccccctaggacttccaggtttaagtttttgaaactgaagtaggcctacacagtaggaactcatgtcatttcttgtaagtaaaccagagcgaatcaggcggtgggtctcggaaaagttcattgttgagggcttaagagatttggaactatttggagagcagcctccgggtgacactcggagaaaaaccaatgatgcga

SEQ ID NO: 186751 - DNA, 560 bp, Homo sapiens
  Payload ID: 16770
  Gene Symbol: STRADA
  Gene Name: STE20-related kinase adaptor alpha
  ENST ID: ENST00000578801
  CDS Start-End: 1-396
ctagaagcttgttccaatgagatggtaacattcttgcagggcgagctgcatgtctccaaactcttcaaccatcccaatatcgtgccatatcgagccacttttattgcagacaatgagctgtgggttgtcacatcattcatggcatacggttctgcaaaagatctcatctgtacacacttcatggatggcatgaatgagctggcgattgcttacatcctgcagggggtgctgaaggccctcgactacatccaccacatgggatatgtacacagaatctccagggttatgatgccaagtctgacatctacagtgtgggaatcacagcctgtgaactggccaacggccatgtcccctttaaggatatgcctgccacccagggtgaagactctacggtaaaaggaatttgatgccttggaaagggagagcggaaactgtgagccctgctttccagccatggcgaaagcgggtacttttgtgcaacccctctcctttcacgttggcctggctagggcggagctgccacgccagtgaccagcgtttctttgggaaaattggactta

SEQ ID NO: 186752 - DNA, 938 bp, Homo sapiens
  Payload ID: 16770
  Gene Symbol: STRADA
  Gene Name: STE20-related kinase adaptor alpha
  ENST ID: ENST00000581243
  CDS Start-End: 135-257
ctcccagcaaccggtctggcggcggcgcggcagtaaaactgaggaggcggagccaagacggtcggggctgcttgctaactccaggaacaggtttaagtttttgaaactgaagtaggcctacacagtaggaactcatgtcatttcttgtaagtaaaccagagcgaatcaggcggtgggtctcggaaaagttcattgttgagggcttaagagatttggaactatttggaggagagtcaccaaaaagtagagagcaatagaaggaggaggagaataggattcacatgtattgaatgtcttttatacaccagaccaatgatgcgagctcagagtcaatagcatccttctctaaacaggaggtcatgagtagctttctgccagagggagggtgttacgagctgctcactgtgataggcaaaggatttgaggacctgatgactgtgaatctagcaaggtacaaaccaacaggagagtacgtgactgtacggaggattaacctagaagcttgttccaatgagatggtaacattcttgcagggcgagctgcatgtctccaaactcttcaaccatcccaatatcgtgccatatcgagccacttttattgcagacaatgagctgtgggttgtcacatcattcatggcatacggttctgcaaaagatctcatctgtacacacttcatggatggcatgaatgagctggcgattgcttacatcctgcagggggtgctgaaggccctcgactacatccaccacatgggatatgtacacaggagtgtcaaagccagccacatcctgatctctgtggatgggaaggtctacctgtctggtttgcgcagcaacctcagcatgataagccatgggcagcggcagcgagtggtccacgattttcccaagtacagtgtcaaggttctgccgtggctcagccccgaggtcctccagcag

SEQ ID NO: 186753 - DNA, 582 bp, Homo sapiens
  Payload ID: 16770
  Gene Symbol: STRADA
  Gene Name: STE20-related kinase adaptor alpha
  ENST ID: ENST00000582030
  CDS Start-End: 432-582
aaaactgaggaggcggagccaagacggtcggggctgcttgctaactccaggaacaggcccgggccttcgtcggagcggccatcctgggctcacctcaccctccacgggccccctttttaacccgcgtcctcgactcccgcaatgaggcgccgcagcccgagagcagaataggcttgggcctggcggggagacgctgaagcggagttgccgggcgagagaggcgggctcctgctttccccttcctccccaccccctaggacttccaggtttaagtttttgaaactgaagtaggcctacacagtaggaactcatgtcatttcttcggtgggtctcggaaaagttcattgttgagggcttaagagatttggaactatttggagaccaatgatgcgagctcagagtcaatagcatccttctctaaacaggaggtcatgagtagctttctgccagagggagggtgttacgagctgctcactgtgataggcaaaggatttgaggacctgatgactgtgaatctagcaaggtacaaaccaacaggagagtacgtgactgtacggaggattaacctagaagcttgttcca

SEQ ID NO: 186754 - DNA, 961 bp, Homo sapiens
  Payload ID: 16770
  Gene Symbol: STRADA
  Gene Name: STE20-related kinase adaptor alpha
  ENST ID: ENST00000582026
  CDS Start-End: 1-167
ccagcaccccccggccctccaacggtgactcgccctcccacccctaccaccgaaccttctccccccacttccaccactttgtggagcagtgccttcagcgcaacccggatgccaggcccagtgccagcaccctcctgaaccactctttcttcaagcaggtatcgtagccccttcgttctggttctggttctagttctggttctaacaactcacaatccctttagctttctctcccctccctttgaatgagagaaactaccccgcttccgaagcccctgaaagacactgctccttcctctcatggagttggctccgacagcccgtctgccaccaggccatggttccttgccccatggtgtcctgggacccagagcaacaggatctgtcacccacctctctcttctcccccagatcaagcgacgtgcctcagaggctttgcccgaattgcttcgtcctgtcacccccatcaccaattttgagggcagccagtctcaggaccacagtggaatctttggcctggtaacaaacctggaagagctggaggtggacgattgggagttctgagcctctgcaaactgtgcgcattctccagccagggatgcagaggccacccagaggcccttcctgagggccggccacattcccgccctcctgggcagattgggtagaaaggacattcttccaggaaagttgactgctgactgattgggaaagaaaatcctggagagacacttcactgctccaaggcttttgagacacaagggaatctcaacaaccagggatcaggagggtccaaagccgacattcccagtcctgtgagctcaggtgacctcctccgcagaagagagatgctgctctggccctgggagctgaattccaagcccagggtttggctccttaaacccgaggaccgccacctcttcccagtgcttgcgaccagcctcattctatttaactttgc

SEQ ID NO: 186755 - DNA, 798 bp, Homo sapiens
  Payload ID: 16770
  Gene Symbol: STRADA
  Gene Name: STE20-related kinase adaptor alpha
  ENST ID: ENST00000578008
  CDS Start-End: 1-504
aatatcgtgccatatcgagccacttttattgcagacaatgagctgtgggttgtcacatcattcatggcatacggttctgcaaaagatctcatctgtacacacttcatggatggcatgaatgagctggcgattgcttacatcctgcagggggtgctgaaggccctcgactacatccaccacatgggatatgtacacaggagtgtcaaagccagccacatcctgatctctgtggatgggaaggtctacctgtctggtttgcgcagcaacctcagcatgataagccatgggcagcggcagcgagtggtccacgattttcccaagtacagtgtcaaggttctgccgtggctcagccccgaggtcctccagcagaatctccagggttatgatgccaagtctgacatctacagtgtgggaatcacagcctgtgaactggccaacggccatgtcccctttaaggatatgcctgccacccagggtgaagactctacggtaaaaggaatttgatgccttggaaagggagagcggaaactgtgagccctgctttccagccatggcgaaagcgggtacttttgtgcaacccctctcctttcacgttggcctggctagggcggagctgccacgccagtgaccagcgtttctttgggaaaattggacttactccacttccaccttttccactcttcaaatgatcacatttgcatattgggaacagtgtatttgtgaagagactctcaggccttccagggaccaccccccccccccacccgctacagcccaggtcctggttctgtcctcccc

SEQ ID NO: 186756 - DNA, 705 bp, Homo sapiens
  Payload ID: 16770
  Gene Symbol: STRADA
  Gene Name: STE20-related kinase adaptor alpha
  ENST ID: ENST00000617949
  CDS Start-End: 1-705
atgagtagctttctgccagagggagggtgttacgagctgctcactgtgataggcaaaggatttgaggacctgatgactgtgaatctagcaaggtacaaaccaacaggagagtacgtgactgtacggaggattaacctagaagcttgttccaatgagatggtaacattcttgcagggcgagctgcatgtctccaaactcttcaaccatcccaatatcgtgccatatcgagccacttttattgcagacaatgagctgtgggttgtcacatcattcatggcatacggttctgcaaaagatctcatctgtacacacttcatggatggcatgaatgagctggcgattgcttacatcctgcagggggtgctgaaggccctcgactacatccaccacatgggatatgtacacaggagtgtcaaagccagccacatcctgatctctgtggatgggaaggtctacctgtctggtttgcgcagcaacctcagcatgataagccatgggcagcggcagcgagtggtccacgattttcccaagtacagtgtcaaggttctgccgtggctcagccccgaggtcctccagcagggttatgatgccaagtctgacatctacagtgtgggaatcacagcctgtgaactggccaacggccatgtcccctttaaggatatgcctgccacccagggtgaagactctacggtaaaaggaatttga

SEQ ID NO: 186757 - DNA, 2293 bp, Homo sapiens
  Payload ID: 16771
  Gene Symbol: STRADB
  Gene Name: STE20-related kinase adaptor beta
  Uniprot ID: Q9C0K7
  ENST ID: ENST00000194530
  CDS Start-End: 366-1622
ccccgccttctcgctgcccagccccggggagggaggcggggccgcgaccccggcgcgggtggggcgaatgcgttcccagcgggtagcctgggactggtgcagagttccaagcccacggccccggtcgcggcctcgccgccctcccgcgccccgcgccgggagcgggcctagagcgctcgcctcgcccctccgcgagcagggctctggcgcccgcccctgtccgcaccgctggcagcctgaagagagtcgctggccgtggtcgccgctaggtaggatatatctgcatcttgaaaggaagataaaacaaaagccttctttggaatagatggatttttgtcactttctgtgtgaactaaagtgattcaatgtctcttttggattgcttctgcacttcaagaacacaagttgaatcactcagacctgaaaaacagtctgaaaccagtatccatcaatacttggttgatgagccaaccctttcctggtcacgtccatccactagagccagtgaagtactatgttccaccaacgtttctcactatgagctccaagtagaaataggaagaggatttgacaacttgacttctgtccatcttgcacggcatactcccacaggaacactggtaactataaaaattacaaatctggaaaactgcaatgaagaacgcctgaaagctttacagaaagccgtgattctatcccactttttccggcatcccaatattacaacttattggacagttttcactgttggcagctggctttgggttatttctccatttatggcctatggttcagcaagtcaactcttgaggacctattttcctgaaggaatgagtgaaactttaataagaaacattctctttggagccgtgagagggttgaactatctgcaccaaaatggctgtattcacaggagtattaaagccagccatatcctcatttctggtgatggcctagtgaccctctctggcctgtcccatctgcatagtttggttaagcatggacagaggcatagggctgtgtatgatttcccacagttcagcacatcagtgcagccgtggctgagtccagaactactgagacaggatttacatgggtataatgtgaagtcagatatttacagtgttgggattacagcatgtgaattagccagtgggcaggtgcctttccaggacatgcatagaactcagatgctgttacagaaactgaaaggtcctccttatagcccattggatatcagtattttccctcaatcagaatccagaatgaaaaattcccagtcaggtgtagactctgggattggagaaagtgtgcttgtctccagtggaactcacacagtaaatagtgaccgattacacacaccatcctcaaaaactttctctcctgccttctttagcttggtacagctctgtttgcaacaagatcctgagaaaaggccatcagcaagcagtttattgtcccatgttttcttcaaacagatgaaagaagaaagccaggattcaatactttcactgttgcctcctgcttataacaagccatcaatatcattgcctccagtgttaccttggactgagccagaatgtgattttcctgatgaaaaagactcatactgggaattctagggctgccaaatcattttatgtcctatatacttgacactttctccttgctgctttttcttctgtatttctaggtacaaataccagaattatacttgaaaatacagttggtgcactggagaatctattatttaaaaccactctgttcaaaggggcaccagtttgtagtccctctgtttcgcacagagtactatgacaaggaaacatcagaattactaatctagctagtgtcatttattctggaatttttttctaagctgtgactaactctttttatctctcaatataatttttgagccagttaatttttttcagtattttgctgtcccttgggaatgggccctcagaggacagtgcttccaagtacatcttctcccagattctctggcctttttaatgagctattgttaaaccaacaggctagtttatcttacatcagacccttttctggtagagggaaaatgtttgtgctttccctttttcttctgttaatacttatggtaacacctaactgagcctcactcacattaaatgattcacttgaaatatatacagaaattgtaatttgcttttttttaaacaagggggctaaagtaacactttcctacttatgtaaattatagatcctaaattcacgcaccccgtgggagctcaataaagatttactgaattga

SEQ ID NO: 186758 - DNA, 2190 bp, Homo sapiens
  Payload ID: 16771
  Gene Symbol: STRADB
  Gene Name: STE20-related kinase adaptor beta
  Uniprot ID: Q9C0K7
  ENST ID: ENST00000392249
  CDS Start-End: 239-1372
cggcctcgccgccctcccgcgccccgcgccgggagcgggcctagagcgctcgcctcgcccctccgcgagcagggctctggcgcccgcccctgtccgcaccgctggcagcctgaagagagtcgctggccgtggtcgccgctaggtaggatatatctgcatcttgaaaggaagataaaacaaaagccttctttggaatagatggatttttgtcactttctgtgtgaactaaagtgattcaatgtctcttttggattgcttctgcacttcaagaacacaagttgaatcactcagacctgaaaaacagtctgaaaccagtatccatcaatacttggttgatgagccaaccctttcctggtcacgtccatccactagagccagtgaagtactatgttccaccaacgtttctcactatgagctccaagtagaaataggaagaggatttgacaacttgacttctgtccatcttgcacggcatactcccacaggaacactggtaactataaaaattacaaatctggaaaactgcaatgaagaacgcctgaaagctttacagaaagccgtgattctatcccactttttccggcatcccaatattacaacttattggacagttttcactgttggcagctggctttgggttatttctccatttatggcctatggttcagcaagtcaactcttgaggacctattttcctgaaggaatgagtgaaactttaataagaaacattctctttggagccgtgagagggttgaactatctgcaccaaaatggctgtattcacaggagtattaaagccagccatatcctcatttctggtgatggcctagtgaccctctctggcctgtcccatctgcatagtttggttaagcatggacagaggcatagggctgtgtatgatttcccacagttcagcacatcagtgcagccgtggctgagtccagaactactgagacaggatttacatgggtataatgtgaagtcagatatttacagtgttgggattacagcatgtgaattagccagtgggcaggtgcctttccaggacatgcatagaactcagatgctgttacagaaactgaaaggtcctccttatagcccattggatatcagtattttccctcaatcagaatccagaatgaaaaattcccagtcaggtgtagactctgggattggagaaagtgtgcttgtctccagtggaactcacacagtaaatagtgaccgattacacacaccatcctcaaaaactttctctcctgccttctttagcttggtacagctctgtttgcaacaagatcctgagaaaaggccatcagcaagcagtttattgtcccatgttttcttcaaacagccttattttgagtttctttaacagatgaaagaagaaagccaggattcaatactttcactgttgcctcctgcttataacaagccatcaatatcattgcctccagtgttaccttggactgagccagaatgtgattttcctgatgaaaaagactcatactgggaattctagggctgccaaatcattttatgtcctatatacttgacactttctccttgctgctttttcttctgtatttctaggtacaaataccagaattatacttgaaaatacagttggtgcactggagaatctattatttaaaaccactctgttcaaaggggcaccagtttgtagtccctctgtttcgcacagagtactatgacaaggaaacatcagaattactaatctagctagtgtcatttattctggaatttttttctaagctgtgactaactctttttatctctcaatataatttttgagccagttaatttttttcagtattttgctgtcccttgggaatgggccctcagaggacagtgcttccaagtacatcttctcccagattctctggcctttttaatgagctattgttaaaccaacaggctagtttatcttacatcagacccttttctggtagagggaaaatgtttgtgctttccctttttcttctgttaatacttatggtaacacctaactgagcctcactcacattaaatgattcacttgaaatatatacagaaattgtaatttgcttttttttaaacaagggggctaaagtaacactttcctacttatgtaaattatagatcctaaattcacgcaccccgtgggagctcaataaagatttactgaattga

SEQ ID NO: 186759 - DNA, 576 bp, Homo sapiens
  Payload ID: 16771
  Gene Symbol: STRADB
  Gene Name: STE20-related kinase adaptor beta
  ENST ID: ENST00000447698
  CDS Start-End: 301-414
gaatgcgttcccagcgggtagcctgggactggtgcagagttccaagcccacggccccggtcgcggcctcgccgccctcccgcgccccgcgccgggagcgggcctagagcgctcgcctcgcccctccgcgagcagggctctggcgcccgcccctgtccgcaccgctggcagcctgaagagagtcgctggccgtggtcgccgctaggtaggatatatctgcatcttgaaaggaagataaaacaaaagccttctttggaatagatggatttttgtcactttctgtgtgaactaaagtgattcaatgtctcttttggattgcttctgcacttcaagaacacaagttgaatcactcagacctgaaaaacagtctgaaaccagtatccatcaatacttggaagaggatttgacaacttgacttctgtccatcttgcacggcatactcccacaggaacactggtaactataaaaattacaaatctggaaaactgcaatgaagaacgcctgaaagctttacagaaagccgtgattctatcccactttttccggcatcccaatattacaacttattggacagttt

SEQ ID NO: 186760 - DNA, 772 bp, Homo sapiens
  Payload ID: 16771
  Gene Symbol: STRADB
  Gene Name: STE20-related kinase adaptor beta
  ENST ID: ENST00000458269
  CDS Start-End: 191-772
agaacctggatcttccgctgccattcttcagcaaagaactgcttctcacttaaatagttttgtcgacgcaagctaaggcgatgcagtgctgtagccaaatcactatctcctgagggtcctggttggcccatcttctgggagctcctataggaaaatcgcgttcactgattagatcttgaggatcatcagcatgacccagacctctcctttctataatggaagaggatttgacaacttgacttctgtccatcttgcacggcatactcccacaggaacactggtaactataaaaattacaaatctggaaaactgcaatgaagaacgcctgaaagctttacagaaagccgtgattctatcccactttttccggcatcccaatattacaacttattggacagttttcactgttggcagctggctttgggttatttctccatttatggcctatggttcagcaagtcaactcttgaggacctattttcctgaaggaatgagtgaaactttaataagaaacattctctttggagccgtgagagggttgaactatctgcaccaaaatggctgtattcacaggagtattaaagccagccatatcctcatttctggtgatggcctagtgaccctctctggcctgtcccatctgcatagtttggttaagcatggacagaggcatagggctgtgtatgatttcccacagttcagcacatcagtgcagccgtggctgagtccagaactactgagacaggatttacatgggtataatgtgaagtca

SEQ ID NO: 186761 - DNA, 616 bp, Homo sapiens
  Payload ID: 16771
  Gene Symbol: STRADB
  Gene Name: STE20-related kinase adaptor beta
  ENST ID: ENST00000415688
  CDS Start-End: 1-268
gccagtgggcaggtgcctttccaggacatgcatagaactcagcttggtacagctctgtttgcaacaagatcctgagaaaaggccatcagcaagcagtttattgtcccatgttttcttcaaacagatgaaagaagaaagccaggattcaatactttcactgttgcctcctgcttataacaagccatcaatatcattgcctccagtgttaccttggactgagccagaatgtgattttcctgatgaaaaagactcatactgggaattctagggctgccaaatcattttatgtcctatatacttgacactttctccttgctgctttttcttctgtatttctaggtacaaataccagaattatacttgaaaatacagttggtgcactggagaatctattatttaaaaccactctgttcaaaggggcaccagtttgtagtccctctgtttcgcacagagtactatgacaaggaaacatcagaattactaatctagctagtgtcatttattctggaatttttttctaagctgtgactaactctttttatctctcaatataatttttgagccagttaatttttttcagtattttgctgtcccttgggaatgggccctcagagga

SEQ ID NO: 186762 - DNA, 1515 bp, Homo sapiens
  Payload ID: 16772
  Gene Symbol: STEAP1B
  Gene Name: STEAP family member 1B
  Uniprot ID: Q6NZ63
  ENST ID: ENST00000404369
  CDS Start-End: 417-1445
aatatgcccccgggtaatcttatacacgctgaagtctgagaaccactgctctagagaaatgcacaaacgttccttagtggagattaaacaaaaggcgaggggttggagggcgcgaaacggacctcaagggcagggcagacggcatttgagaggaaactgggagaggccggagtgcgacttggggagtcttagcctccaaggacgttcccgaaccctgcggacgcggggcgccagcaggtggcgctggacgcgcaactgacaaggaggcggggcctgcagcaggcttggaggcttcgcgctctggaggctcaggcgccgcgtggggccggcacctcccggcagcagcggcagctgagactcacggtcaagctacggcgaggagtgggtggctgaagccatactattttatagaattaatggaaagcagaaaagacatcacaaaccaagaagaaatttggaaaatgaagcctaggagaaatttagaagacaacgattatttgcatgaggacacgggagagaccagcatgctaaaaagacctgtgcttttgcatttgcagcaaacagcccatgctgatgaatttgactgcccttcagaacttcagcacgcacaggaactctttccacagtggcacttgccaattaaaatagctgctgttatggcatctctgacttttctttacactcttctgagggaagtaattcaccctttagcaacttcccatcaacaatatttttataaaattccaatcctggtcatcaacaaagtcttgccaatggtttccatcactctcttggcattggtttacctaccaggtgtgatagcagcaattgtccaagttcataatggaaccaagtataagaagtttccacattggttggataagtggatgttaacaagaaagcagtttgggcttctcagtttgttttttgctgtactgcatgcaatttatactctgtcttacgcaatgaggcgatcctacagatacaagttgctaaactgggcatatcaacaggtccaacaaaataaagaagatgcctggattgagcatgatgtttggagaatggagatttatgtgtctctgggaattgtgggactggcaatactggctctgttggctgtgacatctattccatctgtgagtgactctttgacatggagagaatttcactatattcaggctatactgactggaagcctggtagctttgtgcaactttcaggccactaaactggccaagacacaactggtaggcacaccaaatttctggcaggagcagcagtgtggaatccatttcccaccaccttccaagactaggagttatatatacttcattttatcagcagccagcccttcaaagggaaatgttagctctcacatgtttcagcttcatctagaaaatctcaataaaaaagacaagttattgctgatcatctttcagatttaagcatgcatgaaagtgagaaccttgttccctgctcatacatcttacatacttgcagaccagaccatggtag

SEQ ID NO: 186763 - DNA, 1193 bp, Homo sapiens
  Payload ID: 16772
  Gene Symbol: STEAP1B
  Gene Name: STEAP family member 1B
  Uniprot ID: Q6NZ63
  ENST ID: ENST00000406890
  CDS Start-End: 96-833
ggggccggcacctcccggcagcagcggcagctgagactcacggtcaagctacggcgaggagtgggtggctgaagccatactattttatagaattaatggaaagcagaaaagacatcacaaaccaagaagaaatttggaaaatgaagcctaggagaaatttagaagacaacgattatttgcaaacagcccatgctgatgaatttgactgcccttcagaacttcagcacgcacaggaactctttccacagtggcacttgccaattaaaatagctgctgttatggcatctctgacttttctttacactcttctgagggaagtaattcaccctttagcaacttcccatcaacaatatttttataaaattccaatcctggtcatcaacaaagtcttgccaatggtttccatcactctcttggcattggtttacctaccaggtgtgatagcagcaattgtccaagttcataatggaaccaagtataagaagtttccacattggttggataagtggatgttaacaagaaagcagtttgggcttctcagtttgttttttgctgtactgcatgcaatttatactctgtcttacgcaatgaggcgatcctacagatacaagttgctaaactgggcatatcaacaggtccaacaaaataaagaagatgcctggattgagcatgatgtttggagaatggagatttatgtgtctctgggaattgtgggactggcaatactggctctgttggctgtgacatctattccatctgtgagtgactctttgacatggagagaatttcactatattcaggtacatggtaggatcaacttcctgaccttgtgacagatcctgccagtaacatgagaggaaatgagaacgaggctttggagcacagcattggattgctcatgcagaacaccacccagtgccctttccctctgccacaatgaacagccatgctgcaggtgacggctgctctgtcaacatggatccggcagggcagatgagtggatcccccagcggactcatgagagagcaaacaaaaagtccatatgtgttgtgctaatccactgagattgtgttggttgttacggagcctaacctagcctatcccgacacgaggatcagacatgataatcaaatgtgtttataaagtgttggatggaaatattctgacaacattaaaagactctacccaaggaa

SEQ ID NO: 186764 - DNA, 797 bp, Homo sapiens
  Payload ID: 16772
  Gene Symbol: STEAP1B
  Gene Name: STEAP family member 1B
  ENST ID: ENST00000439708
  CDS Start-End: 148-797
cagatgaatgcatgatatctcttggtaaaatggcccagaagaaacacaggaaggagttatgaaaagataacacccgtaagtgtgactacacattttgtgatccagtcatcatttctgtggctgaagccatactattttatagaattaatggaaagcagaaaagacatcacaaaccaagaagaaatttggaaaatgaagcctaggagaaatttagaagacaacgattatttgcatgaggacacgggagagaccagcatgctaaaaagacctgtgcttttgcatttgcagcaaacagcccatgctgatgaatttgactgcccttcagaacttcagcacgcacaggaactctttccacagtggcacttgccaattaaaatagctgctgttatggcatctctgacttttctttacactcttctgagggaagtaattcaccctttagcaacttcccatcaacaatatttttataaaattccaatcctggtcatcaacaaagtcttgccaatggtttccatcactctcttggcattggtttacctaccaggtgtgatagcagcaattgtccaagttcataatggaaccaagtataagaagtttccacattggttggataagtggatgttaacaagaaagcagtttgggcttctcagtttgttttttgctgtactgcatgcaatttatactctgtcttacgcaatgaggcgatcctacagatacaagttgctaaactgggcatatcaacaggtccaacaaaataaagaagatgcctggattgagcatgatgtttggagaatgga

SEQ ID NO: 186765 - DNA, 1004 bp, Homo sapiens
  Payload ID: 16772
  Gene Symbol: STEAP1B
  Gene Name: STEAP family member 1B
  ENST ID: ENST00000424363
  CDS Start-End: 243-1004
tcgcgctctggaggctcaggcgccgcgtggggccggcacctcccggcagcagcggcagctgagactcacggtcaagctacggcgaggagtggggttgaccagaagactgggcacatcattaattcagcacaactcaccattcccactggaaacatactggcaattcacatcttccaaacaaggaccaacctcttactccaaaagaaaaatggtggctgaagccatactattttatagaattaatggaaagcagaaaagacatcacaaaccaagaagaaatttggaaaatgaagcctaggagaaatttagaagacaacgattatttgcatgaggacacgggagagaccagcatgctaaaaagacctgtgcttttgcatttgcagcaaacagcccatgctgatgaatttgactgcccttcagaacttcagcacgcacaggaactctttccacagtggcacttgccaattaaaatagctgctgttatggcatctctgacttttctttacactcttctgagggaagtaattcaccctttagcaacttcccatcaacaatatttttataaaattccaatcctggtcatcaacaaagtcttgccaatggtttccatcactctcttggcattggtttacctaccaggtgtgatagcagcaattgtccaagttcataatggaaccaagtataagaagtttccacattggttggataagtggatgttaacaagaaagcagtttgggcttctcagtttgttttttgctgtactgcatgcaatttatactctgtcttacgcaatgaggcgatcctacagatacaagttgctaaactgggcatatcaacaggtccaacaaaataaagaagatgcctggattgagcatgatgtttggagaatggagatttatgtgtctctgggaattgtgggactggcaatactggctctgttggctgtgacatctattccatctgtgagtgactctttgacatggagagaatttcactatattcag

SEQ ID NO: 186766 - DNA, 6873 bp, Homo sapiens
  Payload ID: 16773
  Gene Symbol: STEAP2
  Gene Name: STEAP family member 2, metalloreductase
  Uniprot ID: Q8NFT2
  ENST ID: ENST00000287908
  CDS Start-End: 394-1866
gccccctccgagctccccgactcctccccgcgctccacggctcttcccgactccagtcagcgttcctcgggccctcggcgccacgagctgtccgggcacgcagcccctagcggcgcgtcgctgccaagccggcctccgcgcgcctccctccttccttctcccctggctgttcgcgatccagcttgggtaggcggggaagcagctggagtgcgaccgccgcggcagccaccctgcaaccgccagtcggaggtgcagtccgtaggccctggcccccgggtgggcccttggggagtcggcgccgctcccggggagctgcaaggctcgcccctgcccggcgtggagggcgcggggggcgcggaggatattcttggtgatcttggaagtgtccgtatcatggaatcaatctctatgatgggaagccctaagagccttagtgaaacttttttacctaatggcataaatggtatcaaagatgcaaggaaggtcactgtaggtgtgattggaagtggagattttgccaaatccttgaccattcgacttattagatgcggctatcatgtggtcataggaagtagaaatcctaagtttgcttctgaattttttcctcatgtggtagatgtcactcatcatgaagatgctctcacaaaaacaaatataatatttgttgctatacacagagaacattatacctccctgtgggacctgagacatctgcttgtgggtaaaatcctgattgatgtgagcaataacatgaggataaaccagtacccagaatccaatgctgaatatttggcttcattattcccagattctttgattgtcaaaggatttaatgttgtctcagcttgggcacttcagttaggacctaaggatgccagccggcaggtttatatatgcagcaacaatattcaagcgcgacaacaggttattgaacttgcccgccagttgaatttcattcccattgacttgggatccttatcatcagccagagagattgaaaatttacccctacgactctttactctctggagagggccagtggtggtagctataagcttggccacattttttttcctttattcctttgtcagagatgtgattcatccatatgctagaaaccaacagagtgacttttacaaaattcctatagagattgtgaataaaaccttacctatagttgccattactttgctctccctagtatacctcgcaggtcttctggcagctgcttatcaactttattacggcaccaagtataggagatttccaccttggttggaaacctggttacagtgtagaaaacagcttggattactaagttttttcttcgctatggtccatgttgcctacagcctctgcttaccgatgagaaggtcagagagatatttgtttctcaacatggcttatcagcaggttcatgcaaatattgaaaactcttggaatgaggaagaagtttggagaattgaaatgtatatctcctttggcataatgagccttggcttactttccctcctggcagtcacttctatcccttcagtgagcaatgctttaaactggagagaattcagttttattcagtctacacttggatatgtcgctctgctcataagtactttccatgttttaatttatggatggaaacgagcttttgaggaagagtactacagattttatacaccaccaaactttgttcttgctcttgttttgccctcaattgtaattctgggtaagattattttattccttccatgtataagccgaaagctaaaacgaattaaaaaaggctgggaaaagagccaatttctggaagaaggtatgggaggaacaattcctcatgtctccccggagagggtcacagtaatgtgatgacaaatggtgttcacagctgccatataaagttctactcatgccattatttttatgacttctacgttcagttacaagtatgctgtcaaattatcgtgggttgaaacttgttaaatgagatttcaactgacttagtgatagagttttcttcaagttaattttcacaaatgtcatgtttgccaatatgaatttttctagtcaacatattattgtaatttaggtatgttttgttttgttttgcacaactgtaaccctgttgttactttatatttcataatcaggcaaaaatacttacagttaataatatagatataatgttaaaaacaatttgcaaaccagcagaattttaagcttttaaaataattcaatggatatacatttttttctgaagattaagattttaattattcaacttaaaaagtagaaatgcattattatacatttttttaagaaaggacacgttatgttagcatctaggtaaggctgcatgatagcattcctatatttctctcataaaataggatttgaaggatgaaattaattgtatgaagcaatgtgattatatgaagagacacaaattaaaaagacaaattaaacctgaaattatatttaaaatatatttgagacatgaaatacatactgataatacatacctcatgaaagattttattctttattgtgttacagagcagtttcattttcatattaatatactgatcaggaagaggattcagtaacatttggcttccaaaactgctatctctaatacggtaccaatcctaggaactgtatactagttcctacttagaacaaaagtatcaagtttgcacacaagtaatctgccagctgacctttgtcgcaccttaaccagtcaccacttgctatggtataggattatactgatgttctttgagggattctgatgtgctaggcatggttctaagtactttacttgtattatcccatttaatacttagaacaaccccgtgagataagtagttattatcctcattttacacatgagggaccgaaggatagaaaagttatttttcaaaggtcttgcagttaataaatggcagagtgagcattcaagtccaggtagtcatattccagaggccacggttttaaccactaggctctagagctcccgccgcgcccctatgcattatgttcacaatgccaatctagatgcttcctcttttgtataaagtcactgacattctttagagtgggttgggtgcatccaaaaatgtataaaaatattattataataaacttattactgcttgtagggtaattcacagttacttaccctattcttgcttggaacatgagcctggagacccatggcagtccatatgcctccctatgcagtgaagggccctagcagtgttaacaaattgctgagatcccacggagtctttcaaaaatctctgtagagttagtcttctccttttctcttcctgagaagttctcctgcctgcataaccattcattagggagtactttacaagcatgaaggatattagggtaagtggctaattataaatctactctagagacatataatcatacagattattcataaaatttttcagtgctgtccttccacatttaattgcattttgctcaaactgtagaatgccctacattccccccaccccaatttgctatttccttattaaaatagaaaattataggcaagatacaattatatgcgttcctcttcctgaaattataacatttctaaacttacccacgtaggtactactgaatccaactgccaacaataaaaagacttttatttagtagaggctacctttcccaccagtgactctttttctacaactgccttgtcagtttggtaattcacttatgattttctaatgttctcttggtgaattttattatcttgtaccctctttttttttttttttttttttaaagacagagtcttgctctgtcacccaggctggagtgcagtggcacgatctcggctcactgcaagctctgcctcccgggttcacgccattctcctgcctcagcctcccgagtagctgggactacaggtgcccgccaccatgcccggctgatttctttttgtatttttagtagagacggagtttcaccgtgttagccaggatggtctcgatctcctgacctcgtgatccgcccgccttggcctccaaagtgctgggattacaggtgtgagctaccgcgcccggcctattatcttgtactttctaactgagccctctattttctttattttaataatatttctccccacttgagaatcacttgttagttcttggtaggaattcagttgggcaatgataacttttatgggcaaaaacattctattatagtgaactaatgaaaataacagcgtattttcaatattttcttattccttaaattccactcttttaacactatgcttaaccacttaatgtgatgaaatattcctaaaagttaaatgactattaaagcatatattgttgcatgtatatattaagtagccgatactctaaataaaaataccactgttacagataaatggggcctttaaaaatatgaaaaacaaacttgtgaaaatgtataaaagatgcatctgttgtttcaaatggcactatcttcttttcagtactacaaaaacagaataattttgaagttttagaataaatgtaatatatttactataattctaaatgtttaaatgcttttctaaaaatgcaaaactatgatgtttagttgctttattttacctctatgtgattatttttcttaattgttattttttataatcattatttttctgaaccattcttctggcctcagaagtaggactgaattctactattgctaggtgtgagaaagtggtggtgagaaccttagagcagtggagatttgctacctggtctgtgttttgagaagtgccccttagaaagttaaaagaatgtagaaaagatactcagtcttaatcctatgcaaaaaaaaaaatcaagtaattgttttcctatgaggaaaataaccatgagctgtatcatgctacttagcttttatgtaaatatttcttatgtctcctctattaagagtatttaaaatcatatttaaatatgaatctattcatgctaacattatttttcaaaacatacatggaaatttagcccagattgtctacatataaggtttttatttgaattgtaaaatatttaaaagtatgaataaaatatatttataggtatttatcagagatgattattttgtgctacatacaggttggctaatgagctctagtgttaaactacctgattaatttcttataaagcagcataaccttggcttgattaaggaattctactttcaaaaattaatctgataatagtaacaaggtatattatactttcattacaatcaaattatagaaattacttgtgtaaaagggcttcaagaatatatccaatttttaaatattttaatatatctcctatctgataacttaattcttctaaattaccacttgccattaagctatttcataataaattctgtacagtttccccccaaaaaagagatttatttatgaaatatttaaagtttctaatgtggtattttaaataaagtatcataaatgtaataagtaaatatttatttaggaatactgtgaacactgaactaattattcctgtgtcagtctatgaaatccctgttttgaaatacgtaaacagcctaaaatgtgttgaaattattttgtaaatccatgacttaaaacaagatacatacatagtataacacacctcacagtgttaagatttatattgtgaaatgagacaccctaccttcaattgttcatcagtgggtaaaacaaattctgatgtacattcaggacaaatgattagccctaaatgaaactgtaataatttcagtggaaactcaatctgtttttacctttaaacagtgaattttacatgaatgaatgggttcttcactttttttttagtatgagaaaattatacagtgcttaattttcagagattctttccatatgttactaaaaaatgttttgttcagcctaacatactgagttttttttaactttctaaattattgaatttccatcatgcattcatccaaaattaaggcagactgtttggattcttccagtggccagatgagctaaattaaatcacaaaagcagatgcttttgtatgatctccaaattgccaactttaaggaaatattctcttgaaattgtctttaaagatcttttgcagctttgcagatacccagactgagctggaactggaatttgtcttcctattgactctacttctttaaaagcggctgcccattacattcctcagctgtccttgcagttaggtgtacatgtgactgagtgttggccagtgagatgaagtctcctcaaaggaaggcagcatgtgtcctttttcatcccttcatcttgctgctgggattgtggatataacaggagccctggcagctgtctccagaggatcaaagccacacccaaagagtaaggcagattagagaccagaaagaccttgactacttccctacttccactgctttttcctgcatttaagccattgtaaatctgggtgtgttacatgaagtgaaaattaattctttctgcccttcagttctttatcctgataccatttaacactgtctgaattaactagactgcaataattctttcttttgaaagcttttaaaggataatgtgcaattcacattaaaattgattttccattgtcaattagttatactcattttcctgccttgatctttcattagatattttgtatctgcttggaatatattatcttctttttaactgtgtaattggtaattactaaaactctgtaatctccaaaatattgctatcaaattacacaccatgttttctatcattctcatagatctgccttataaacatttaaataaaaagtactatttaatgatttaacttctgttttgaaa

SEQ ID NO: 186767 - DNA, 7033 bp, Homo sapiens
  Payload ID: 16773
  Gene Symbol: STEAP2
  Gene Name: STEAP family member 2, metalloreductase
  Uniprot ID: Q8NFT2
  ENST ID: ENST00000394621
  CDS Start-End: 507-1979
gccccctccgagctccccgactcctccccgcgctccacggctcttcccgactccagtcagcgttcctcgggccctcggcgccacgagctgtccgggcacgcagcccctagcggcgcgtcgctgccaagccggcctccgcgcgcctccctccttccttctcccctggctgttcgcgatccagcttgggtaggcggggaagcagctggagtgcgaccgccgcggcagccaccctgcaaccgccagtcggaggtgcagtccgtaggccctggcccccgggtgggcccttggggagtcggcgccgctcccggggagctgcaaggctcgcccctgcccggcgtggagggcgcggggggcgcggagaaagtgaagagaggaaattggaaaattgtgagtggaccttctgatactgctcctccttgcgtggaaaaggggaaagaactgcatgcatattattcagcgtcctatattcaaaggatattcttggtgatcttggaagtgtccgtatcatggaatcaatctctatgatgggaagccctaagagccttagtgaaacttttttacctaatggcataaatggtatcaaagatgcaaggaaggtcactgtaggtgtgattggaagtggagattttgccaaatccttgaccattcgacttattagatgcggctatcatgtggtcataggaagtagaaatcctaagtttgcttctgaattttttcctcatgtggtagatgtcactcatcatgaagatgctctcacaaaaacaaatataatatttgttgctatacacagagaacattatacctccctgtgggacctgagacatctgcttgtgggtaaaatcctgattgatgtgagcaataacatgaggataaaccagtacccagaatccaatgctgaatatttggcttcattattcccagattctttgattgtcaaaggatttaatgttgtctcagcttgggcacttcagttaggacctaaggatgccagccggcaggtttatatatgcagcaacaatattcaagcgcgacaacaggttattgaacttgcccgccagttgaatttcattcccattgacttgggatccttatcatcagccagagagattgaaaatttacccctacgactctttactctctggagagggccagtggtggtagctataagcttggccacattttttttcctttattcctttgtcagagatgtgattcatccatatgctagaaaccaacagagtgacttttacaaaattcctatagagattgtgaataaaaccttacctatagttgccattactttgctctccctagtatacctcgcaggtcttctggcagctgcttatcaactttattacggcaccaagtataggagatttccaccttggttggaaacctggttacagtgtagaaaacagcttggattactaagttttttcttcgctatggtccatgttgcctacagcctctgcttaccgatgagaaggtcagagagatatttgtttctcaacatggcttatcagcaggttcatgcaaatattgaaaactcttggaatgaggaagaagtttggagaattgaaatgtatatctcctttggcataatgagccttggcttactttccctcctggcagtcacttctatcccttcagtgagcaatgctttaaactggagagaattcagttttattcagtctacacttggatatgtcgctctgctcataagtactttccatgttttaatttatggatggaaacgagcttttgaggaagagtactacagattttatacaccaccaaactttgttcttgctcttgttttgccctcaattgtaattctgggtaagattattttattccttccatgtataagccgaaagctaaaacgaattaaaaaaggctgggaaaagagccaatttctggaagaaggtatgggaggaacaattcctcatgtctccccggagagggtcacagtaatgtgatgacaaatggtgttcacagctgccatataaagttctactcatgccattatttttatgacttctacgttcagttacaagtatgctgtcaaattatcgtgggttgaaacttgttaaatgagatttcaactgacttagtgatagagttttcttcaagttaattttcacaaatgtcatgtttgccaatatgaatttttctagtcaacatattattgtaatttaggtatgttttgttttgttttgcacaactgtaaccctgttgttactttatatttcataatcaggcaaaaatacttacagttaataatatagatataatgttaaaaacaatttgcaaaccagcagaattttaagcttttaaaataattcaatggatatacatttttttctgaagattaagattttaattattcaacttaaaaagtagaaatgcattattatacatttttttaagaaaggacacgttatgttagcatctaggtaaggctgcatgatagcattcctatatttctctcataaaataggatttgaaggatgaaattaattgtatgaagcaatgtgattatatgaagagacacaaattaaaaagacaaattaaacctgaaattatatttaaaatatatttgagacatgaaatacatactgataatacatacctcatgaaagattttattctttattgtgttacagagcagtttcattttcatattaatatactgatcaggaagaggattcagtaacatttggcttccaaaactgctatctctaatacggtaccaatcctaggaactgtatactagttcctacttagaacaaaagtatcaagtttgcacacaagtaatctgccagctgacctttgtcgcaccttaaccagtcaccacttgctatggtataggattatactgatgttctttgagggattctgatgtgctaggcatggttctaagtactttacttgtattatcccatttaatacttagaacaaccccgtgagataagtagttattatcctcattttacacatgagggaccgaaggatagaaaagttatttttcaaaggtcttgcagttaataaatggcagagtgagcattcaagtccaggtagtcatattccagaggccacggttttaaccactaggctctagagctcccgccgcgcccctatgcattatgttcacaatgccaatctagatgcttcctcttttgtataaagtcactgacattctttagagtgggttgggtgcatccaaaaatgtataaaaatattattataataaacttattactgcttgtagggtaattcacagttacttaccctattcttgcttggaacatgagcctggagacccatggcagtccatatgcctccctatgcagtgaagggccctagcagtgttaacaaattgctgagatcccacggagtctttcaaaaatctctgtagagttagtcttctccttttctcttcctgagaagttctcctgcctgcataaccattcattagggagtactttacaagcatgaaggatattagggtaagtggctaattataaatctactctagagacatataatcatacagattattcataaaatttttcagtgctgtccttccacatttaattgcattttgctcaaactgtagaatgccctacattccccccaccccaatttgctatttccttattaaaatagaaaattataggcaagatacaattatatgcgttcctcttcctgaaattataacatttctaaacttacccacgtaggtactactgaatccaactgccaacaataaaaagacttttatttagtagaggctacctttcccaccagtgactctttttctacaactgccttgtcagtttggtaattcacttatgattttctaatgttctcttggtgaattttattatcttgtaccctctttttttttttttttttttttaaagacagagtcttgctctgtcacccaggctggagtgcagtggcacgatctcggctcactgcaagctctgcctcccgggttcacgccattctcctgcctcagcctcccgagtagctgggactacaggtgcccgccaccatgcccggctgatttctttttgtatttttagtagagacggagtttcaccgtgttagccaggatggtctcgatctcctgacctcgtgatccgcccgccttggcctccaaagtgctgggattacaggtgtgagctaccgcgcccggcctattatcttgtactttctaactgagccctctattttctttattttaataatatttctccccacttgagaatcacttgttagttcttggtaggaattcagttgggcaatgataacttttatgggcaaaaacattctattatagtgaactaatgaaaataacagcgtattttcaatattttcttattccttaaattccactcttttaacactatgcttaaccacttaatgtgatgaaatattcctaaaagttaaatgactattaaagcatatattgttgcatgtatatattaagtagccgatactctaaataaaaataccactgttacagataaatggggcctttaaaaatatgaaaaacaaacttgtgaaaatgtataaaagatgcatctgttgtttcaaatggcactatcttcttttcagtactacaaaaacagaataattttgaagttttagaataaatgtaatatatttactataattctaaatgtttaaatgcttttctaaaaatgcaaaactatgatgtttagttgctttattttacctctatgtgattatttttcttaattgttattttttataatcattatttttctgaaccattcttctggcctcagaagtaggactgaattctactattgctaggtgtgagaaagtggtggtgagaaccttagagcagtggagatttgctacctggtctgtgttttgagaagtgccccttagaaagttaaaagaatgtagaaaagatactcagtcttaatcctatgcaaaaaaaaaaatcaagtaattgttttcctatgaggaaaataaccatgagctgtatcatgctacttagcttttatgtaaatatttcttatgtctcctctattaagagtatttaaaatcatatttaaatatgaatctattcatgctaacattatttttcaaaacatacatggaaatttagcccagattgtctacatataaggtttttatttgaattgtaaaatatttaaaagtatgaataaaatatatttataggtatttatcagagatgattattttgtgctacatacaggttggctaatgagctctagtgttaaactacctgattaatttcttataaagcagcataaccttggcttgattaaggaattctactttcaaaaattaatctgataatagtaacaaggtatattatactttcattacaatcaaattatagaaattacttgtgtaaaagggcttcaagaatatatccaatttttaaatattttaatatatctcctatctgataacttaattcttctaaattaccacttgccattaagctatttcataataaattctgtacagtttccccccaaaaaagagatttatttatgaaatatttaaagtttctaatgtggtattttaaataaagtatcataaatgtaataagtaaatatttatttaggaatactgtgaacactgaactaattattcctgtgtcagtctatgaaatccctgttttgaaatacgtaaacagcctaaaatgtgttgaaattattttgtaaatccatgacttaaaacaagatacatacatagtataacacacctcacagtgttaagatttatattgtgaaatgagacaccctaccttcaattgttcatcagtgggtaaaacaaattctgatgtacattcaggacaaatgattagccctaaatgaaactgtaataatttcagtggaaactcaatctgtttttacctttaaacagtgaattttacatgaatgaatgggttcttcactttttttttagtatgagaaaattatacagtgcttaattttcagagattctttccatatgttactaaaaaatgttttgttcagcctaacatactgagttttttttaactttctaaattattgaatttccatcatgcattcatccaaaattaaggcagactgtttggattcttccagtggccagatgagctaaattaaatcacaaaagcagatgcttttgtatgatctccaaattgccaactttaaggaaatattctcttgaaattgtctttaaagatcttttgcagctttgcagatacccagactgagctggaactggaatttgtcttcctattgactctacttctttaaaagcggctgcccattacattcctcagctgtccttgcagttaggtgtacatgtgactgagtgttggccagtgagatgaagtctcctcaaaggaaggcagcatgtgtcctttttcatcccttcatcttgctgctgggattgtggatataacaggagccctggcagctgtctccagaggatcaaagccacacccaaagagtaaggcagattagagaccagaaagaccttgactacttccctacttccactgctttttcctgcatttaagccattgtaaatctgggtgtgttacatgaagtgaaaattaattctttctgcccttcagttctttatcctgataccatttaacactgtctgaattaactagactgcaataattctttcttttgaaagcttttaaaggataatgtgcaattcacattaaaattgattttccattgtcaattagttatactcattttcctgccttgatctttcattagatattttgtatctgcttggaatatattatcttctttttaactgtgtaattggtaattactaaaactctgtaatctccaaaatattgctatcaaattacacaccatgttttctatcattctcatagatctgccttataaacatttaaataaaaagtactatttaatgatttaacttctgttttgaaatgttgtatacacgtggatttttttctcattaaataataattctagta

SEQ ID NO: 186768 - DNA, 6612 bp, Homo sapiens
  Payload ID: 16773
  Gene Symbol: STEAP2
  Gene Name: STEAP family member 2, metalloreductase
  Uniprot ID: Q8NFT2
  ENST ID: ENST00000394622
  CDS Start-End: 170-1642
gatccagcttgggtaggcggggaagcagctggagtgcgaccgccgcggcagccaccctgcaaccgccagtcggagagctaagggcaagtcctgaggttgggcccaggagaaagaaggcaaggagacattgtcccaggatattcttggtgatcttggaagtgtccgtatcatggaatcaatctctatgatgggaagccctaagagccttagtgaaacttttttacctaatggcataaatggtatcaaagatgcaaggaaggtcactgtaggtgtgattggaagtggagattttgccaaatccttgaccattcgacttattagatgcggctatcatgtggtcataggaagtagaaatcctaagtttgcttctgaattttttcctcatgtggtagatgtcactcatcatgaagatgctctcacaaaaacaaatataatatttgttgctatacacagagaacattatacctccctgtgggacctgagacatctgcttgtgggtaaaatcctgattgatgtgagcaataacatgaggataaaccagtacccagaatccaatgctgaatatttggcttcattattcccagattctttgattgtcaaaggatttaatgttgtctcagcttgggcacttcagttaggacctaaggatgccagccggcaggtttatatatgcagcaacaatattcaagcgcgacaacaggttattgaacttgcccgccagttgaatttcattcccattgacttgggatccttatcatcagccagagagattgaaaatttacccctacgactctttactctctggagagggccagtggtggtagctataagcttggccacattttttttcctttattcctttgtcagagatgtgattcatccatatgctagaaaccaacagagtgacttttacaaaattcctatagagattgtgaataaaaccttacctatagttgccattactttgctctccctagtatacctcgcaggtcttctggcagctgcttatcaactttattacggcaccaagtataggagatttccaccttggttggaaacctggttacagtgtagaaaacagcttggattactaagttttttcttcgctatggtccatgttgcctacagcctctgcttaccgatgagaaggtcagagagatatttgtttctcaacatggcttatcagcaggttcatgcaaatattgaaaactcttggaatgaggaagaagtttggagaattgaaatgtatatctcctttggcataatgagccttggcttactttccctcctggcagtcacttctatcccttcagtgagcaatgctttaaactggagagaattcagttttattcagtctacacttggatatgtcgctctgctcataagtactttccatgttttaatttatggatggaaacgagcttttgaggaagagtactacagattttatacaccaccaaactttgttcttgctcttgttttgccctcaattgtaattctgggtaagattattttattccttccatgtataagccgaaagctaaaacgaattaaaaaaggctgggaaaagagccaatttctggaagaaggtatgggaggaacaattcctcatgtctccccggagagggtcacagtaatgtgatgacaaatggtgttcacagctgccatataaagttctactcatgccattatttttatgacttctacgttcagttacaagtatgctgtcaaattatcgtgggttgaaacttgttaaatgagatttcaactgacttagtgatagagttttcttcaagttaattttcacaaatgtcatgtttgccaatatgaatttttctagtcaacatattattgtaatttaggtatgttttgttttgttttgcacaactgtaaccctgttgttactttatatttcataatcaggcaaaaatacttacagttaataatatagatataatgttaaaaacaatttgcaaaccagcagaattttaagcttttaaaataattcaatggatatacatttttttctgaagattaagattttaattattcaacttaaaaagtagaaatgcattattatacatttttttaagaaaggacacgttatgttagcatctaggtaaggctgcatgatagcattcctatatttctctcataaaataggatttgaaggatgaaattaattgtatgaagcaatgtgattatatgaagagacacaaattaaaaagacaaattaaacctgaaattatatttaaaatatatttgagacatgaaatacatactgataatacatacctcatgaaagattttattctttattgtgttacagagcagtttcattttcatattaatatactgatcaggaagaggattcagtaacatttggcttccaaaactgctatctctaatacggtaccaatcctaggaactgtatactagttcctacttagaacaaaagtatcaagtttgcacacaagtaatctgccagctgacctttgtcgcaccttaaccagtcaccacttgctatggtataggattatactgatgttctttgagggattctgatgtgctaggcatggttctaagtactttacttgtattatcccatttaatacttagaacaaccccgtgagataagtagttattatcctcattttacacatgagggaccgaaggatagaaaagttatttttcaaaggtcttgcagttaataaatggcagagtgagcattcaagtccaggtagtcatattccagaggccacggttttaaccactaggctctagagctcccgccgcgcccctatgcattatgttcacaatgccaatctagatgcttcctcttttgtataaagtcactgacattctttagagtgggttgggtgcatccaaaaatgtataaaaatattattataataaacttattactgcttgtagggtaattcacagttacttaccctattcttgcttggaacatgagcctggagacccatggcagtccatatgcctccctatgcagtgaagggccctagcagtgttaacaaattgctgagatcccacggagtctttcaaaaatctctgtagagttagtcttctccttttctcttcctgagaagttctcctgcctgcataaccattcattagggagtactttacaagcatgaaggatattagggtaagtggctaattataaatctactctagagacatataatcatacagattattcataaaatttttcagtgctgtccttccacatttaattgcattttgctcaaactgtagaatgccctacattccccccaccccaatttgctatttccttattaaaatagaaaattataggcaagatacaattatatgcgttcctcttcctgaaattataacatttctaaacttacccacgtaggtactactgaatccaactgccaacaataaaaagacttttatttagtagaggctacctttcccaccagtgactctttttctacaactgccttgtcagtttggtaattcacttatgattttctaatgttctcttggtgaattttattatcttgtaccctctttttttttttttttttttttaaagacagagtcttgctctgtcacccaggctggagtgcagtggcacgatctcggctcactgcaagctctgcctcccgggttcacgccattctcctgcctcagcctcccgagtagctgggactacaggtgcccgccaccatgcccggctgatttctttttgtatttttagtagagacggagtttcaccgtgttagccaggatggtctcgatctcctgacctcgtgatccgcccgccttggcctccaaagtgctgggattacaggtgtgagctaccgcgcccggcctattatcttgtactttctaactgagccctctattttctttattttaataatatttctccccacttgagaatcacttgttagttcttggtaggaattcagttgggcaatgataacttttatgggcaaaaacattctattatagtgaactaatgaaaataacagcgtattttcaatattttcttattccttaaattccactcttttaacactatgcttaaccacttaatgtgatgaaatattcctaaaagttaaatgactattaaagcatatattgttgcatgtatatattaagtagccgatactctaaataaaaataccactgttacagataaatggggcctttaaaaatatgaaaaacaaacttgtgaaaatgtataaaagatgcatctgttgtttcaaatggcactatcttcttttcagtactacaaaaacagaataattttgaagttttagaataaatgtaatatatttactataattctaaatgtttaaatgcttttctaaaaatgcaaaactatgatgtttagttgctttattttacctctatgtgattatttttcttaattgttattttttataatcattatttttctgaaccattcttctggcctcagaagtaggactgaattctactattgctaggtgtgagaaagtggtggtgagaaccttagagcagtggagatttgctacctggtctgtgttttgagaagtgccccttagaaagttaaaagaatgtagaaaagatactcagtcttaatcctatgcaaaaaaaaaaatcaagtaattgttttcctatgaggaaaataaccatgagctgtatcatgctacttagcttttatgtaaatatttcttatgtctcctctattaagagtatttaaaatcatatttaaatatgaatctattcatgctaacattatttttcaaaacatacatggaaatttagcccagattgtctacatataaggtttttatttgaattgtaaaatatttaaaagtatgaataaaatatatttataggtatttatcagagatgattattttgtgctacatacaggttggctaatgagctctagtgttaaactacctgattaatttcttataaagcagcataaccttggcttgattaaggaattctactttcaaaaattaatctgataatagtaacaaggtatattatactttcattacaatcaaattatagaaattacttgtgtaaaagggcttcaagaatatatccaatttttaaatattttaatatatctcctatctgataacttaattcttctaaattaccacttgccattaagctatttcataataaattctgtacagtttccccccaaaaaagagatttatttatgaaatatttaaagtttctaatgtggtattttaaataaagtatcataaatgtaataagtaaatatttatttaggaatactgtgaacactgaactaattattcctgtgtcagtctatgaaatccctgttttgaaatacgtaaacagcctaaaatgtgttgaaattattttgtaaatccatgacttaaaacaagatacatacatagtataacacacctcacagtgttaagatttatattgtgaaatgagacaccctaccttcaattgttcatcagtgggtaaaacaaattctgatgtacattcaggacaaatgattagccctaaatgaaactgtaataatttcagtggaaactcaatctgtttttacctttaaacagtgaattttacatgaatgaatgggttcttcactttttttttagtatgagaaaattatacagtgcttaattttcagagattctttccatatgttactaaaaaatgttttgttcagcctaacatactgagttttttttaactttctaaattattgaatttccatcatgcattcatccaaaattaaggcagactgtttggattcttccagtggccagatgagctaaattaaatcacaaaagcagatgcttttgtatgatctccaaattgccaactttaaggaaatattctcttgaaattgtctttaaagatcttttgcagctttgcagatacccagactgagctggaactggaatttgtcttcctattgactctacttctttaaaagcggctgcccattacattcctcagctgtccttgcagttaggtgtacatgtgactgagtgttggccagtgagatgaagtctcctcaaaggaaggcagcatgtgtcctttttcatcccttcatcttgctgctgggattgtggatataacaggagccctggcagctgtctccagaggatcaaagccacacccaaagagtaaggcagattagagaccagaaagaccttgactacttccctacttccactgctttttcctgcatttaagccattgtaaatctgggtgtgttacatgaagtgaaaattaattctttctgcccttcagttctttatcctgataccatttaacactgtctgaattaactagactgcaataattctttcttttgaaagcttttaaaggataatgtgcaattcacattaaaattgattttccattgtcaattagttatactcattttcctgccttgatctttcattagatattttgtatctgcttggaatatattatcttctttttaactgtgtaattggtaattactaaaactctgtaatctccaaaatattgctatcaaattacacaccatgttttctatcattctcatagatctgccttataaacatttaaata

SEQ ID NO: 186769 - DNA, 2456 bp, Homo sapiens
  Payload ID: 16773
  Gene Symbol: STEAP2
  Gene Name: STEAP family member 2, metalloreductase
  Uniprot ID: Q8NFT2
  ENST ID: ENST00000394626
  CDS Start-End: 336-1700
agcgttcctcgggccctcggcgccacgagctgtccgggcacgcagcccctagcggcgcgtcgctgccaagccggcctccgcgcgcctccctccttccttctcccctggctgttcgcgatccagcttgggtaggcggggaagcagctggagtgcgaccgccgcggcagccaccctgcaaccgccagtcggaggtgcagtccgtaggccctggcccccgggtgggcccttggggagtcggcgccgctcccggggagctgcaaggctcgcccctgcccggcgtggagggcgcggggggcgcggaggatattcttggtgatcttggaagtgtccgtatcatggaatcaatctctatgatgggaagccctaagagccttagtgaaacttttttacctaatggcataaatggtatcaaagatgcaaggaaggtcactgtaggtgtgattggaagtggagattttgccaaatccttgaccattcgacttattagatgcggctatcatgtggtcataggaagtagaaatcctaagtttgcttctgaattttttcctcatgtggtagatgtcactcatcatgaagatgctctcacaaaaacaaatataatatttgttgctatacacagagaacattatacctccctgtgggacctgagacatctgcttgtgggtaaaatcctgattgatgtgagcaataacatgaggataaaccagtacccagaatccaatgctgaatatttggcttcattattcccagattctttgattgtcaaaggatttaatgttgtctcagcttgggcacttcagttaggacctaaggatgccagccggcaggtttatatatgcagcaacaatattcaagcgcgacaacaggttattgaacttgcccgccagttgaatttcattcccattgacttgggatccttatcatcagccagagagattgaaaatttacccctacgactctttactctctggagagggccagtggtggtagctataagcttggccacattttttttcctttattcctttgtcagagatgtgattcatccatatgctagaaaccaacagagtgacttttacaaaattcctatagagattgtgaataaaaccttacctatagttgccattactttgctctccctagtatacctcgcaggtcttctggcagctgcttatcaactttattacggcaccaagtataggagatttccaccttggttggaaacctggttacagtgtagaaaacagcttggattactaagttttttcttcgctatggtccatgttgcctacagcctctgcttaccgatgagaaggtcagagagatatttgtttctcaacatggcttatcagcaggttcatgcaaatattgaaaactcttggaatgaggaagaagtttggagaattgaaatgtatatctcctttggcataatgagccttggcttactttccctcctggcagtcacttctatcccttcagtgagcaatgctttaaactggagagaattcagttttattcagtctacacttggatatgtcgctctgctcataagtactttccatgttttaatttatggatggaaacgagcttttgaggaagagtactacagattttatacaccaccaaactttgttcttgctcttgttttgccctcaattgtaattctggatcttttgcagctttgcagatacccagactgagctggaactggaatttgtcttcctattgactctacttctttaaaagcggctgcccattacattcctcagctgtccttgcagttaggtgtacatgtgactgagtgttggccagtgagatgaagtctcctcaaaggaaggcagcatgtgtcctttttcatcccttcatcttgctgctgggattgtggatataacaggagccctggcagctgtctccagaggatcaaagccacacccaaagagtaaggcagattagagaccagaaagaccttgactacttccctacttccactgctttttcctgcatttaagccattgtaaatctgggtgtgttacatgaagtgaaaattaattctttctgcccttcagttctttatcctgataccatttaacactgtctgaattaactagactgcaataattctttcttttgaaagcttttaaaggataatgtgcaattcacattaaaattgattttccattgtcaattagttatactcattttcctgccttgatctttcattagatattttgtatctgcttggaatatattatcttctttttaactgtgtaattggtaattactaaaactctgtaatctccaaaatattgctatcaaattacacaccatgttttctatcattctcatagatctgccttataaacatttaaataaaaagtactatttaatgatttaacttctgttttgaaatgttgtatacacgtggatttttttctcattaaataataattctagta

SEQ ID NO: 186770 - DNA, 2261 bp, Homo sapiens
  Payload ID: 16773
  Gene Symbol: STEAP2
  Gene Name: STEAP family member 2, metalloreductase
  Uniprot ID: Q8NFT2
  ENST ID: ENST00000394629
  CDS Start-End: 188-1552
ttctgctatagagatggaacagtatatggaaagctcccaagaaagtgaagagaggaaattggaaaattgtgagtggaccttctgatactgctcctccttgcgtggaaaaggggaaagaactgcatgcatattattcagcgtcctatattcaaaggatattcttggtgatcttggaagtgtccgtatcatggaatcaatctctatgatgggaagccctaagagccttagtgaaacttttttacctaatggcataaatggtatcaaagatgcaaggaaggtcactgtaggtgtgattggaagtggagattttgccaaatccttgaccattcgacttattagatgcggctatcatgtggtcataggaagtagaaatcctaagtttgcttctgaattttttcctcatgtggtagatgtcactcatcatgaagatgctctcacaaaaacaaatataatatttgttgctatacacagagaacattatacctccctgtgggacctgagacatctgcttgtgggtaaaatcctgattgatgtgagcaataacatgaggataaaccagtacccagaatccaatgctgaatatttggcttcattattcccagattctttgattgtcaaaggatttaatgttgtctcagcttgggcacttcagttaggacctaaggatgccagccggcaggtttatatatgcagcaacaatattcaagcgcgacaacaggttattgaacttgcccgccagttgaatttcattcccattgacttgggatccttatcatcagccagagagattgaaaatttacccctacgactctttactctctggagagggccagtggtggtagctataagcttggccacattttttttcctttattcctttgtcagagatgtgattcatccatatgctagaaaccaacagagtgacttttacaaaattcctatagagattgtgaataaaaccttacctatagttgccattactttgctctccctagtatacctcgcaggtcttctggcagctgcttatcaactttattacggcaccaagtataggagatttccaccttggttggaaacctggttacagtgtagaaaacagcttggattactaagttttttcttcgctatggtccatgttgcctacagcctctgcttaccgatgagaaggtcagagagatatttgtttctcaacatggcttatcagcaggttcatgcaaatattgaaaactcttggaatgaggaagaagtttggagaattgaaatgtatatctcctttggcataatgagccttggcttactttccctcctggcagtcacttctatcccttcagtgagcaatgctttaaactggagagaattcagttttattcagtctacacttggatatgtcgctctgctcataagtactttccatgttttaatttatggatggaaacgagcttttgaggaagagtactacagattttatacaccaccaaactttgttcttgctcttgttttgccctcaattgtaattctggatcttttgcagctttgcagatacccagactgagctggaactggaatttgtcttcctattgactctacttctttaaaagcggctgcccattacattcctcagctgtccttgcagttaggtgtacatgtgactgagtgttggccagtgagatgaagtctcctcaaaggaaggcagcatgtgtcctttttcatcccttcatcttgctgctgggattgtggatataacaggagccctggcagctgtctccagaggatcaaagccacacccaaagagtaaggcagattagagaccagaaagaccttgactacttccctacttccactgctttttcctgcatttaagccattgtaaatctgggtgtgttacatgaagtgaaaattaattctttctgcccttcagttctttatcctgataccatttaacactgtctgaattaactagactgcaataattctttcttttgaaagcttttaaaggataatgtgcaattcacattaaaattgattttccattgtcaattagttatactcattttcctgccttgatctttcattagatattttgtatctgcttggaatatattatcttctttttaactgtgtaattggtaattactaaaactctgtaatctccaaaatattgctatcaaattacacaccatgttttctatcattctcatagatctgccttataaacatttaaataaaaagtactatttaatgatttaacttctgttttgaaa

SEQ ID NO: 186771 - DNA, 2072 bp, Homo sapiens
  Payload ID: 16773
  Gene Symbol: STEAP2
  Gene Name: STEAP family member 2, metalloreductase
  Uniprot ID: Q8NFT2
  ENST ID: ENST00000394632
  CDS Start-End: 170-1429
gatccagcttgggtaggcggggaagcagctggagtgcgaccgccgcggcagccaccctgcaaccgccagtcggagagctaagggcaagtcctgaggttgggcccaggagaaagaaggcaaggagacattgtcccaggatattcttggtgatcttggaagtgtccgtatcatggaatcaatctctatgatgggaagccctaagagccttagtgaaacttttttacctaatggcataaatggtatcaaagatgcaaggaaggtcactgtaggtgtgattggaagtggagattttgccaaatccttgaccattcgacttattagatgcggctatcatgtggtcataggaagtagaaatcctaagtttgcttctgaattttttcctcatgtggtagatgtcactcatcatgaagatgctctcacaaaaacaaatataatatttgttgctatacacagagaacattatacctccctgtgggacctgagacatctgcttgtgggtaaaatcctgattgatgtgagcaataacatgaggataaaccagtacccagaatccaatgctgaatatttggcttcattattcccagattctttgattgtcaaaggatttaatgttgtctcagcttgggcacttcagttaggacctaaggatgccagccggcaggtttatatatgcagcaacaatattcaagcgcgacaacaggttattgaacttgcccgccagttgaatttcattcccattgacttgggatccttatcatcagccagagagattgaaaatttacccctacgactctttactctctggagagggccagtggtggtagctataagcttggccacattttttttcctttattcctttgtcagagatgtgattcatccatatgctagaaaccaacagagtgacttttacaaaattcctatagagattgtgaataaaaccttacctatagttgccattactttgctctccctagtatacctcgcaggtcttctggcagctgcttatcaactttattacggcaccaagtataggagatttccaccttggttggaaacctggttacagtgtagaaaacagcttggattactaagttttttcttcgctatggtccatgttgcctacagcctctgcttaccgatgagaaggtcagagagatatttgtttctcaacatggcttatcagcaggttcatgcaaatattgaaaactcttggaatgaggaagaagtttggagaattgaaatgtatatctcctttggcataatgagccttggcttactttccctcctggcagtcacttctatcccttcagtgagcaatgctttaaactggagagaattcagttttattcagatcttttgcagctttgcagatacccagactgagctggaactggaatttgtcttcctattgactctacttctttaaaagcggctgcccattacattcctcagctgtccttgcagttaggtgtacatgtgactgagtgttggccagtgagatgaagtctcctcaaaggaaggcagcatgtgtcctttttcatcccttcatcttgctgctgggattgtggatataacaggagccctggcagctgtctccagaggatcaaagccacacccaaagagtaaggcagattagagaccagaaagaccttgactacttccctacttccactgctttttcctgcatttaagccattgtaaatctgggtgtgttacatgaagtgaaaattaattctttctgcccttcagttctttatcctgataccatttaacactgtctgaattaactagactgcaataattctttcttttgaaagcttttaaaggataatgtgcaattcacattaaaattgattttccattgtcaattagttatactcattttcctgccttgatctttcattagatattttgtatctgcttggaatatattatcttctttttaactgtgtaattggtaattactaaaactctgtaatctccaaaatattgctatcaaattacacaccatgttttctatcattctcatagatctgccttataaacatttaaataaaaagtactattta

SEQ ID NO: 186772 - DNA, 1372 bp, Homo sapiens
  Payload ID: 16773
  Gene Symbol: STEAP2
  Gene Name: STEAP family member 2, metalloreductase
  ENST ID: ENST00000402625
  CDS Start-End: 149-1360
ggaggtgcagtccgtaggccctggcccccgggtgggcccttggggagtcggcgccgctcccggggagctgcaaggctcgcccctgcccggcgtggagggcgcggggggcgcggaggatattcttggtgatcttggaagtgtccgtatcatggaatcaatctctatgatgggaagccctaagagccttagtgaaacttttttacctaatggcataaatggtatcaaagatgcaaggaaggtcactgtaggtgtgattggaagtggagattttgccaaatccttgaccattcgacttattagatgcggctatcatgtggtcataggaagtagaaatcctaagtttgcttctgaattttttcctcatgtggtagatgtcactcatcatgaagatgctctcacaaaaacaaatataatatttgttgctatacacagagaacattatacctccctgtgggacctgagacatctgcttgtgggtaaaatcctgattgatgtgagcaataacatgaggataaaccagtacccagaatccaatgctgaatatttggcttcattattcccagattctttgattgtcaaaggatttaatgttgtctcagcttgggcacttcagttaggacctaaggatgccagccggcaggtttatatatgcagcaacaatattcaagcgcgacaacaggttattgaacttgcccgccagttgaatttcattcccattgacttgggatccttatcatcagccagagagattgaaaatttacccctacgactctttactctctggagagggccagtggtggtagctataagcttggccacattttttttcctttattcctttgtcagagatgtgattcatccatatgctagaaaccaacagagtgacttttacaaaattcctatagagattgtgaataaaaccttacctatagttgccattactttgctctccctagtatacctcgcaggtcttctggcagctgcttatcaactttattacggcaccaagtataggagatttccaccttggttggaaacctggttacagtgtagaaaacagcttggattactaagttttttcttcgctatggtccatgttgcctacagcctctgcttaccgatgagaaggtcagagagatatttgtttctcaacatggcttatcagcaggttcatgcaaatattgaaaactcttggaatgaggaagaagtttggagaattgaaatgtatatctcctttggcataatgagccttggcttactttccctcctggcagtcacttctatcccttcagtgagcaatgctttaaactggagagaattcagttttattcagtggcctagcgctaccctgttgtcctaaagagtttctgct

SEQ ID NO: 186773 - DNA, 902 bp, Homo sapiens
  Payload ID: 16773
  Gene Symbol: STEAP2
  Gene Name: STEAP family member 2, metalloreductase
  ENST ID: ENST00000428074
  CDS Start-End: 358-902
caagcagagctctccttcctgaacaaaatgagtccacctggggtttattttctttaaagatttgctcaatagagattttattatctttggtttaaaataaaagttaaaatgatatatttactattttaatgagttacatttaatgttttatggcaacaaaaaagaaatatctgattctgatgtgatttttcagatcatagactacatgtctaaagaagcctataagaaattatggcctatgaagtgtggaatctgagactgctggcaagatggccgactaggaacagctctggtgcacagctcccagcaagatccacgcaggaggatattcttggtgatcttggaagtgtccgtatcatggaatcaatctctatgatgggaagccctaagagccttagtgaaacttttttacctaatggcataaatggtatcaaagatgcaaggaaggtcactgtaggtgtgattggaagtggagattttgccaaatccttgaccattcgacttattagatgcggctatcatgtggtcataggaagtagaaatcctaagtttgcttctgaattttttcctcatgtggtagatgtcactcatcatgaagatgctctcacaaaaacaaatataatatttgttgctatacacagagaacattatacctccctgtgggacctgagacatctgcttgtgggtaaaatcctgattgatgtgagcaataacatgaggataaaccagtacccagaatccaatgctgaatatttggcttcattattcccagattctttgattgtcaaaggatttaatgttgtctcagcttgggcacttcagttaggacctaaggatgccagccggcaggtttatatatgcagcaacaatattcaagcgcgacaacaggttattgaacttgc

SEQ ID NO: 186774 - DNA, 579 bp, Homo sapiens
  Payload ID: 16773
  Gene Symbol: STEAP2
  Gene Name: STEAP family member 2, metalloreductase
  ENST ID: ENST00000426158
  CDS Start-End: 316-579
taggcggggaagcagctggagtgcgaccgccgcggcagccaccctgcaaccgccagtcggaggtgcagtccgtaggccctggcccccgggtgggcccttggggagtcggcgccgctcccggggagctgcaaggctcgcccctgcccggcgtggagggcgcggggggcgcggagtgaagagaggaaattggaaaattgtgagtggaccttctgatactgctcctccttgcgtggaaaaggggaaagaactgcatgcatattattcagcgtcctatattcaaaggatattcttggtgatcttggaagtgtccgtatcatggaatcaatctctatgatgggaagccctaagagccttagtgaaacttttttacctaatggcataaatggtatcaaagatgcaaggaaggtcactgtaggtgtgattggaagtggagattttgccaaatccttgaccattcgacttattagatgcggctatcatgtggtcataggaagtagaaatcctaagtttgcttctgaattttttcctcatgtggtagatgtcactcatcatgaagatgctctcacaaaaacaaatata

SEQ ID NO: 186775 - DNA, 3915 bp, Homo sapiens
  Payload ID: 16774
  Gene Symbol: STEAP3
  Gene Name: STEAP family member 3, metalloreductase
  Uniprot ID: Q658P3
  ENST ID: ENST00000393106
  CDS Start-End: 135-1601
accgccttcgccgcggaccttcagctgccgcggtcgctccgagcggcgggccgcagaggttcaagcgattctcctgcttcagcctccggagtagctgggattacaggcacgtgccaacacacccagccaccaaaatgccagaagagatggacaagccactgatcagcctccacctggtggacagcgatagtagccttgccaaggtccccgatgaggcccccaaagtgggcatcctgggtagcggggactttgcccgctccctggccacacgcctggtgggctctggcttcaaagtggtggtggggagccgcaaccccaaacgcacagccaggctgtttccctcagcggcccaagtgactttccaagaggaggcagtgagctccccggaggtcatctttgtggctgtgttccgggagcactactcttcactgtgcagtctcagtgaccagctggcgggcaagatcctggtggatgtgagcaaccctacagagcaagagcaccttcagcatcgtgagtccaatgctgagtacctggcctccctcttccccacttgcacagtggtcaaggccttcaatgtcatctctgcctggaccctgcaggctggcccaagggatggtaacaggcaggtgcccatctgcggtgaccagccagaagccaagcgtgctgtctcggagatggcgctcgccatgggcttcatgcccgtggacatgggatccctggcgtcagcctgggaggtggaggccatgcccctgcgcctcctcccggcctggaaggtgcccaccctgctggccctggggctcttcgtctgcttctatgcctacaacttcgtccgggacgttctgcagccctatgtgcaggaaagccagaacaagttcttcaagctgcccgtgtccgtggtcaacaccacactgccgtgcgtggcctacgtgctgctgtcactcgtgtacttgcccggcgtgctggcggctgccctgcagctgcggcgcggcaccaagtaccagcgcttccccgactggctggaccactggctacagcaccgcaagcagatcgggctgctcagcttcttctgcgccgccctgcacgccctctacagcttctgcttgccgctgcgccgcgcccaccgctacgacctggtcaacctggcagtcaagcaggtcttggccaacaagagccacctctgggtggaggaggaggtctggcggatggagatctacctctccctgggagtgctggccctcggcacgttgtccctgctggccgtgacctcactgccgtccattgcaaactcgctcaactggagggagttcagcttcgttcagtcctcactgggctttgtggccctcgtgctgagcacactgcacacgctcacctacggctggacccgcgccttcgaggagagccgctacaagttctacctgcctcccaccttcacgctcacgctgctggtgccctgcgtcgtcatcctggccaaagccctgtttctcctgccctgcatcagccgcagactcgccaggatccggagaggctgggagagggagagcaccatcaagttcacgctgcccacagaccacgccctggccgagaagacgagccacgtatgaggtgcctgccctgggctctggaccccgggcacacgagggacggtgccctgagcccgttaggttttcttttcttggtggtgcaaagtggtataactgtgtgcaaataggaggtttgaggtccaaattcctgggactcaaatgtatgcagtactattcagaatgatatacacacatatgtgtatatgtatttacatatattccacatatataacaggatttgcaattatacatagctagctaaaaagttgggtctctgagatttcaacttgtagatttaaaaacaagtgccgtacgttaagagaagagcagatcatgctattgtgacatttgcagagatatacacacactttttgtacagaagaggcttgtgctgtggtgggttcgatttatccctgcccaccccacccccacaacttcccttttgctacttccccaaggctcttgcagagctagggctctgaaggggagggaaggcaacggctctgcccagagccatccctggagcatgtgagcagcggctggtctcttccctccacctggggcagcagcaggaggcctggggaggaggaaaatcaggcagtcggcctggagtctgtgcctggtcctttgcccggtggtgggaggatggagggattgggctgaagctgctccacctcatccttgctgagtgggggagacattttccctgaaagtcagaagtcaccatagagcctgcaaatggatcctcctgtgagagtgacgtcacctcctttccagagccattagtgagcctggcttgggaacaagtgtaatttccttccctcctttaacctggcgatgagcgtcctttaaaccactgtgccttctcaccctttccatcttcagtttgaatgactcccaggaaggcctagagcagaccctttagaaatcagcccaagggggagagcaagagaaaacactctagggagtaaagctccccgggcgtcagagttgagccctgcctgggctgaaggactgtcttcacgaagtcagtcctgaggaaaaatattggggactccaaatgtcctctggcagaggacccagaaaaccacactggctccaacttcctcctcatggggcattacacttcaaaacagtggggagcaacttttccaccaaagctacaaacctaaaatgctgctgccccaaagcacaagagggaagagcaccgccggggccacaggacgtctgtcctccagtcacaggccatccttgctgctccctactgactctagcttacttcccctgtgaagaaacaggtgttctcggctgagcccccaaccctctgcagaaccaggttgatctgccacagaaaaagcatctttgaagacaaagagggtgaggtcttcatgagtctcctgggcccaaagccatcttctgatggaaggaagagagtagggccagtgaaggctgcccagagagaatgtcacagatgaggctgcccctgccccccccccgccagggaggtttcatgagctcatgtctatgcagcacataagggttcttcagtgaaaagcaggagaagagcccactgcaaggatagctcattaggcacatgaccgatgcagggaaggccatgccggggaagctcttcctgcaggtattttccatctgctgtgccaaggctgagcggcagaaacttgtctcataaattggcactgatggagcatcagctgtggcccacagagagccttgctgagaagggggcaggtaaagcagagattttagcattgccttggcataacaagggcccatcgattccctactaatgagaggcagggagagcatgggcaatggagacccaccaatgatccccaaccccggtgggtactggctgcctgccctgggccagggaatggctccttataccaaagatgctggcacatagcagaacccagtgcacgtcctccccttcccacccacctctggctgaaggtgctcaagagggaagcaattataaggtgggtggcaggagggaacaggtgccacctgctggacaatcacacgaaaggcaggcgggctgtgtactgggccctgactgtgcgtccactgctgtcttccctacctcaccaggctactggcagcagcatcccgagagcacatcatctccacagcctggtaaattccatgtgcctctgggtacaaaagtgcctcaacgacatgctctggaaatcccaaatgccacagtctgaggttgatatctaaaatctatgccttcaaaagagtctctgttttttttttttaacctggtagacagtataaaagcagtgcaaataaacacctaaccttctgcaaa

SEQ ID NO: 186776 - DNA, 1871 bp, Homo sapiens
  Payload ID: 16774
  Gene Symbol: STEAP3
  Gene Name: STEAP family member 3, metalloreductase
  Uniprot ID: Q658P3
  ENST ID: ENST00000393107
  CDS Start-End: 45-1511
agctgccgcggtcgctccgagcggcgggccgcagagccaccaaaatgccagaagagatggacaagccactgatcagcctccacctggtggacagcgatagtagccttgccaaggtccccgatgaggcccccaaagtgggcatcctgggtagcggggactttgcccgctccctggccacacgcctggtgggctctggcttcaaagtggtggtggggagccgcaaccccaaacgcacagccaggctgtttccctcagcggcccaagtgactttccaagaggaggcagtgagctccccggaggtcatctttgtggctgtgttccgggagcactactcttcactgtgcagtctcagtgaccagctggcgggcaagatcctggtggatgtgagcaaccctacagagcaagagcaccttcagcatcgtgagtccaatgctgagtacctggcctccctcttccccacttgcacagtggtcaaggccttcaatgtcatctctgcctggaccctgcaggctggcccaagggatggtaacaggcaggtgcccatctgcggtgaccagccagaagccaagcgtgctgtctcggagatggcgctcgccatgggcttcatgcccgtggacatgggatccctggcgtcagcctgggaggtggaggccatgcccctgcgcctcctcccggcctggaaggtgcccaccctgctggccctggggctcttcgtctgcttctatgcctacaacttcgtccgggacgttctgcagccctatgtgcaggaaagccagaacaagttcttcaagctgcccgtgtccgtggtcaacaccacactgccgtgcgtggcctacgtgctgctgtcactcgtgtacttgcccggcgtgctggcggctgccctgcagctgcggcgcggcaccaagtaccagcgcttccccgactggctggaccactggctacagcaccgcaagcagatcgggctgctcagcttcttctgcgccgccctgcacgccctctacagcttctgcttgccgctgcgccgcgcccaccgctacgacctggtcaacctggcagtcaagcaggtcttggccaacaagagccacctctgggtggaggaggaggtctggcggatggagatctacctctccctgggagtgctggccctcggcacgttgtccctgctggccgtgacctcactgccgtccattgcaaactcgctcaactggagggagttcagcttcgttcagtcctcactgggctttgtggccctcgtgctgagcacactgcacacgctcacctacggctggacccgcgccttcgaggagagccgctacaagttctacctgcctcccaccttcacgctcacgctgctggtgccctgcgtcgtcatcctggccaaagccctgtttctcctgccctgcatcagccgcagactcgccaggatccggagaggctgggagagggagagcaccatcaagttcacgctgcccacagaccacgccctggccgagaagacgagccacgtatgaggtgcctgccctgggctctggaccccgggcacacgagggacggtgccctgagcccgttaggttttcttttcttggtggtgcaaagtggtataactgtgtgcaaataggaggtttgaggtccaaattcctgggactcaaatgtatgcagtactattcagaatgatatacacacatatgtgtatatgtatttacatatattccacatatataacaggatttgcaattatacatagctagctaaaaagttgggtctctgagatttcaacttgtagatttaaaaacaagtgccgtacgttaagagaagagcagatcatgctattgtgacatttgcagagatatacacacactttttgtacagaa

SEQ ID NO: 186777 - DNA, 4262 bp, Homo sapiens
  Payload ID: 16774
  Gene Symbol: STEAP3
  Gene Name: STEAP family member 3, metalloreductase
  Uniprot ID: Q658P3
  ENST ID: ENST00000393110
  CDS Start-End: 452-1948
accgccttcgccgcggaccttcagctgccgcggtcgctccgagcggcgggccgcagagatgacatttattcattttatgcatcctgggttctactggtcgtcccacctcagttcctgtagcaaagagacttgagtctgagccactaattatcacccgtgaggtttcctccccgagcaggaagcagcaggccagagctgcgctctctcagtgcactctccaaccaagcatcagtcaccactcccggtccagcccctgtggccaagagctggcgtgcaggctgcgggaggcagctggctgtgcaagaccctggcagggccctcgcctcctgagaaaccgagagtcagaaccaaagccaggctgtcctggttggagactgagccagaaagggtggctcacctcacggtgaggctgtcgagtgacctgagagcctcagaccctcacgtcagccggatgtcgcaccagcctgctgttgccaccaaaatgccagaagagatggacaagccactgatcagcctccacctggtggacagcgatagtagccttgccaaggtccccgatgaggcccccaaagtgggcatcctgggtagcggggactttgcccgctccctggccacacgcctggtgggctctggcttcaaagtggtggtggggagccgcaaccccaaacgcacagccaggctgtttccctcagcggcccaagtgactttccaagaggaggcagtgagctccccggaggtcatctttgtggctgtgttccgggagcactactcttcactgtgcagtctcagtgaccagctggcgggcaagatcctggtggatgtgagcaaccctacagagcaagagcaccttcagcatcgtgagtccaatgctgagtacctggcctccctcttccccacttgcacagtggtcaaggccttcaatgtcatctctgcctggaccctgcaggctggcccaagggatggtaacaggcaggtgcccatctgcggtgaccagccagaagccaagcgtgctgtctcggagatggcgctcgccatgggcttcatgcccgtggacatgggatccctggcgtcagcctgggaggtggaggccatgcccctgcgcctcctcccggcctggaaggtgcccaccctgctggccctggggctcttcgtctgcttctatgcctacaacttcgtccgggacgttctgcagccctatgtgcaggaaagccagaacaagttcttcaagctgcccgtgtccgtggtcaacaccacactgccgtgcgtggcctacgtgctgctgtcactcgtgtacttgcccggcgtgctggcggctgccctgcagctgcggcgcggcaccaagtaccagcgcttccccgactggctggaccactggctacagcaccgcaagcagatcgggctgctcagcttcttctgcgccgccctgcacgccctctacagcttctgcttgccgctgcgccgcgcccaccgctacgacctggtcaacctggcagtcaagcaggtcttggccaacaagagccacctctgggtggaggaggaggtctggcggatggagatctacctctccctgggagtgctggccctcggcacgttgtccctgctggccgtgacctcactgccgtccattgcaaactcgctcaactggagggagttcagcttcgttcagtcctcactgggctttgtggccctcgtgctgagcacactgcacacgctcacctacggctggacccgcgccttcgaggagagccgctacaagttctacctgcctcccaccttcacgctcacgctgctggtgccctgcgtcgtcatcctggccaaagccctgtttctcctgccctgcatcagccgcagactcgccaggatccggagaggctgggagagggagagcaccatcaagttcacgctgcccacagaccacgccctggccgagaagacgagccacgtatgaggtgcctgccctgggctctggaccccgggcacacgagggacggtgccctgagcccgttaggttttcttttcttggtggtgcaaagtggtataactgtgtgcaaataggaggtttgaggtccaaattcctgggactcaaatgtatgcagtactattcagaatgatatacacacatatgtgtatatgtatttacatatattccacatatataacaggatttgcaattatacatagctagctaaaaagttgggtctctgagatttcaacttgtagatttaaaaacaagtgccgtacgttaagagaagagcagatcatgctattgtgacatttgcagagatatacacacactttttgtacagaagaggcttgtgctgtggtgggttcgatttatccctgcccaccccacccccacaacttcccttttgctacttccccaaggctcttgcagagctagggctctgaaggggagggaaggcaacggctctgcccagagccatccctggagcatgtgagcagcggctggtctcttccctccacctggggcagcagcaggaggcctggggaggaggaaaatcaggcagtcggcctggagtctgtgcctggtcctttgcccggtggtgggaggatggagggattgggctgaagctgctccacctcatccttgctgagtgggggagacattttccctgaaagtcagaagtcaccatagagcctgcaaatggatcctcctgtgagagtgacgtcacctcctttccagagccattagtgagcctggcttgggaacaagtgtaatttccttccctcctttaacctggcgatgagcgtcctttaaaccactgtgccttctcaccctttccatcttcagtttgaatgactcccaggaaggcctagagcagaccctttagaaatcagcccaagggggagagcaagagaaaacactctagggagtaaagctccccgggcgtcagagttgagccctgcctgggctgaaggactgtcttcacgaagtcagtcctgaggaaaaatattggggactccaaatgtcctctggcagaggacccagaaaaccacactggctccaacttcctcctcatggggcattacacttcaaaacagtggggagcaacttttccaccaaagctacaaacctaaaatgctgctgccccaaagcacaagagggaagagcaccgccggggccacaggacgtctgtcctccagtcacaggccatccttgctgctccctactgactctagcttacttcccctgtgaagaaacaggtgttctcggctgagcccccaaccctctgcagaaccaggttgatctgccacagaaaaagcatctttgaagacaaagagggtgaggtcttcatgagtctcctgggcccaaagccatcttctgatggaaggaagagagtagggccagtgaaggctgcccagagagaatgtcacagatgaggctgcccctgccccccccccgccagggaggtttcatgagctcatgtctatgcagcacataagggttcttcagtgaaaagcaggagaagagcccactgcaaggatagctcattaggcacatgaccgatgcagggaaggccatgccggggaagctcttcctgcaggtattttccatctgctgtgccaaggctgagcggcagaaacttgtctcataaattggcactgatggagcatcagctgtggcccacagagagccttgctgagaagggggcaggtaaagcagagattttagcattgccttggcataacaagggcccatcgattccctactaatgagaggcagggagagcatgggcaatggagacccaccaatgatccccaaccccggtgggtactggctgcctgccctgggccagggaatggctccttataccaaagatgctggcacatagcagaacccagtgcacgtcctccccttcccacccacctctggctgaaggtgctcaagagggaagcaattataaggtgggtggcaggagggaacaggtgccacctgctggacaatcacacgaaaggcaggcgggctgtgtactgggccctgactgtgcgtccactgctgtcttccctacctcaccaggctactggcagcagcatcccgagagcacatcatctccacagcctggtaaattccatgtgcctctgggtacaaaagtgcctcaacgacatgctctggaaatcccaaatgccacagtctgaggttgatatctaaaatctatgccttcaaaagagtctctgttttttttttttaacctggtagacagtataaaagcagtgcaaataaacacctaaccttctgcaaa

SEQ ID NO: 186778 - DNA, 2103 bp, Homo sapiens
  Payload ID: 16774
  Gene Symbol: STEAP3
  Gene Name: STEAP family member 3, metalloreductase
  ENST ID: ENST00000409811
  CDS Start-End: 45-1418
agctgccgcggtcgctccgagcggcgggccgcagagccaccaaaatgccagaagagatggacaagccactgatcagcctccacctggtggacagcgatagtagccttgccaaggtccccgatgaggcccccaaagtgggcatcctgggtagcggggactttgcccgctccctggccacacgcctggtgggctctggcttcaaagtggtggtggggagccgcaaccccaaacgcacagccaggctgtttccctcagcggcccaagtgactttccaagaggaggcagtgagctccccggaggtcatctttgtggctgtgttccgggagcactactcttcactgtgcagtctcagtgaccagctggcgggcaagatcctggtggatgtgagcaaccctacagagcaagagcaccttcagcatcgtgagtccaatgctgagtacctggcctccctcttccccacttgcacagtggtcaaggccttcaatgtcatctctgcctggaccctgcaggctggcccaagggatggtaacaggcaggtgcccatctgcggtgaccagccagaagccaagcgtgctgtctcggagatggcgctcgccatgggcttcatgcccgtggacatgggatccctggcgtcagcctgggaggtggaggccatgcccctgcgcctcctcccggcctggaaggtgcccaccctgctggccctggggctcttcgtctgcttctatgcctacaacttcgtccgggacgttctgcagccctatgtgcaggaaagccagaacaagttcttcaagctgcccgtgtccgtggtcaacaccacactgccgtgcgtggcctacgtgctgctgtcactcgtgtacttgcccggcgtgctggcggctgccctgcagctgcggcgcggcaccaagtaccagcgcttccccgactggctggaccactggctacagcaccgcaagcagatcgggctgctcagcttcttctgcgccgccctgcacgccctctacagcttctgcttgccgctgcgccgcgcccaccgctacgacctggtcaacctggcagtcaagcaggtcttggccaacaagagccacctctgggtggaggaggaggtctggcggatggagatctacctctccctgggagtgctggccctcggcacgttgtccctgctggccgtgacctcactgccgtccattgcaaactcgctcaactggagggagttcagcttcgttcagtgtgtggcaacttccagtgcaggaaacacaggcagtggaacccgaagacctgaatctcagtcccaagacccccacttacctgccccgcatcatcagacaagtttcctaggccctcggagcttctgctgctcacttgtgcctgtgtccaccccatatggtcatcaagaggatttgagctggacacgttaaatgcaggatgcgtgcagccaacagtggcatgctggcttttgagtcctcactgggctttgtggccctcgtgctgagcacactgcacacgctcacctacggctggacccgcgccttcgaggagagccgctacaagttctacctgcctcccaccttcacgctcacgctgctggtgccctgcgtcgtcatcctggccaaagccctgtttctcctgccctgcatcagccgcagactcgccaggatccggagaggctgggagagggagagcaccatcaagttcacgctgcccacagaccacgccctggccgagaagacgagccacgtatgaggtgcctgccctgggctctggaccccgggcacacgagggacggtgccctgagcccgttaggttttcttttcttggtggtgcaaagtggtataactgtgtgcaaataggaggtttgaggtccaaattcctgggactcaaatgtatgcagtactattcagaatgatatacacacatatgtgtatatgtatttacatatattccacatatataacaggatttgcaattatacatagctagctaaaaagttgggtctctgagatttcaacttgtagatttaaaaacaagtgccgtacgttaagagaagagcagatcatgctattgtgacatttgcagagatatacacacactttttgtacagaa

SEQ ID NO: 186779 - DNA, 2321 bp, Homo sapiens
  Payload ID: 16775
  Gene Symbol: STEAP4
  Gene Name: STEAP family member 4
  Uniprot ID: Q687X5
  ENST ID: ENST00000301959
  CDS Start-End: 100-951
gagctgcaggcgcggcgaaacttccctctacccgcccggcccgcggcgcgcaccgttggcgctggacgcttcctccttggaagcgcctctccctcagttatggagaaaacttgtatagatgcacttcctcttactatgaattcttcagaaaagcaagagactgtatgtatttttggaactggtgattttggaagatcactgggattgaaaatgctccagtgtggttattctgttgtttttggaagtcgaaacccccagaagaccaccctactgcccagtggtgcagaagtcttgagctattcagaagcagccaagaagtctggcatcataatcatagcaatccacagagagcattatgattttctcacagaattaactgaggttctcaatggaaaaatattggtagacatcagcaacaacctcaaaatcaatcaatatccagaatctaatgcagagtaccttgctcatttggtgccaggagcccacgtggtaaaagcatttaacaccatctcagcctgggctctccagtcaggagcactggatgcaagtcggcaggcaatactcaagaaggagaatccatttagcacctcctcagcctggctcagtgattcatatgtggctttgggaatacttgggttttttctgtttgtactcttgggaatcacttctttgccatctgttagcaatgcagtcaactggagagagttccgatttgtccagtccaaactgggttatttgaccctgatcttgtgtacagcccacaccctggtgtacggtgggaagagattcctcagcccttcaaatctcagatggtatcttcctgcagcctacgtgttagggcttatcattccttgcactgtgctggtgatcaagtttgtcctaatcatgccatgtgtagacaacacccttacaaggatccgccagggctgggaaaggaactcaaaacactagaaaaagcattgaatggaaaatcaatatttaaaacaaagttcaatttagctggatttctgaactatggttttgaatgtttaaagaagaatgatgggtacagttaggaaagtttttttcttacaccgtgactgagggaaacattgcttgtctttgagaaattgactgacatactggaagagaacaccattttatctcaggttagtgaagaatcagtgcaggtccctgactcttattttcccagaggccatggagctgagattgagactagccttgtggtttcacactaaagagtttccttgttatgggcaacatgcatgacctaatgtcttgcaaaatccaatagaagtattgcagcttccttctctggctcaagggctgagttaagtgaaaggaaaaacagcacaatggtgaccactgataaaggctttattaggtatatctgaggaagtgggtcacatgaaatgtaaaaagggaatgaggtttttgttgttttttggaagtaaaggcaaacataaatattaccatgatgaattctagtgaaatgaccccttgactttgcttttcttaatacagatatttactgagaggaactatttttataacacaagaaaaatttacaattgattaaaagtatccatgtcttggatacatacgtatctatagagctggcatgtaattcttcctctataaagaataggtataggaaagactgaataaaaatggagggatatccccttggatttcacttgcattgtgcaataagcaaagaagggttgataaaagttcttgatcaaaaagttcaaagaaaccagaattttagacagcaagctaaataaatattgtaaaattgcactatattaggttaagtattatttaggtattataatatgctttgtaaattttatattccaaatattgctcaatatttttcatctattaaattaatttctagtgtaaataagtagcttctatatctgtcttagtctattataattgtaaggagtaaaattaaatgaatagtctgcaggtataaatttgaacaatgcatagatgatcgaaaattacggaaaatcatagggcagagaggtgtgaagattcatcattatgtgaaatttggatctttctcaaatccttgctgaaatttaggatggttctcactgtttttctgtgctgatagtaccctttccaaggtgaccttcagggggattaaccttcctagctcaagcaatgagctaaaaggagccttatgcatgatcttcccacatatcaaaataactaaaaggcactgagtttggcatttttctgcctgctctgctaagacctttttttttttttactttcattataacatattatacatgacattatac

SEQ ID NO: 186780 - DNA, 9988 bp, Homo sapiens
  Payload ID: 16775
  Gene Symbol: STEAP4
  Gene Name: STEAP family member 4
  Uniprot ID: Q687X5
  ENST ID: ENST00000380079
  CDS Start-End: 103-1482
gctgagctgcaggcgcggcgaaacttccctctacccgcccggcccgcggcgcgcaccgttggcgctggacgcttcctccttggaagcgcctctccctcagttatggagaaaacttgtatagatgcacttcctcttactatgaattcttcagaaaagcaagagactgtatgtatttttggaactggtgattttggaagatcactgggattgaaaatgctccagtgtggttattctgttgtttttggaagtcgaaacccccagaagaccaccctactgcccagtggtgcagaagtcttgagctattcagaagcagccaagaagtctggcatcataatcatagcaatccacagagagcattatgattttctcacagaattaactgaggttctcaatggaaaaatattggtagacatcagcaacaacctcaaaatcaatcaatatccagaatctaatgcagagtaccttgctcatttggtgccaggagcccacgtggtaaaagcatttaacaccatctcagcctgggctctccagtcaggagcactggatgcaagtcggcaggtgtttgtgtgtggaaatgacagcaaagccaagcaaagagtgatggatattgttcgtaatcttggacttactccaatggatcaaggatcactcatggcagccaaagaaattgaaaagtaccccctgcagctatttccaatgtggaggttccccttctatttgtctgctgtgctgtgtgtcttcttgtttttctattgtgttataagagacgtaatctacccttatgtttatgaaaagaaagataatacatttcgtatggctatttccattccaaatcgtatctttccaataacagcacttacactgcttgctttggtttacctccctggtgttattgctgccattctacaactgtaccgaggcacaaaataccgtcgattcccagactggcttgaccactggatgctttgccgaaagcagcttggcttggtagctctgggatttgccttccttcatgtcctctacacacttgtgattcctattcgatattatgtacgatggagattgggaaacttaaccgttacccaggcaatactcaagaaggagaatccatttagcacctcctcagcctggctcagtgattcatatgtggctttgggaatacttgggttttttctgtttgtactcttgggaatcacttctttgccatctgttagcaatgcagtcaactggagagagttccgatttgtccagtccaaactgggttatttgaccctgatcttgtgtacagcccacaccctggtgtacggtgggaagagattcctcagcccttcaaatctcagatggtatcttcctgcagcctacgtgttagggcttatcattccttgcactgtgctggtgatcaagtttgtcctaatcatgccatgtgtagacaacacccttacaaggatccgccagggctgggaaaggaactcaaaacactagaaaaagcattgaatggaaaatcaatatttaaaacaaagttcaatttagctggatttctgaactatggttttgaatgtttaaagaagaatgatgggtacagttaggaaagtttttttcttacaccgtgactgagggaaacattgcttgtctttgagaaattgactgacatactggaagagaacaccattttatctcaggttagtgaagaatcagtgcaggtccctgactcttattttcccagaggccatggagctgagattgagactagccttgtggtttcacactaaagagtttccttgttatgggcaacatgcatgacctaatgtcttgcaaaatccaatagaagtattgcagcttccttctctggctcaagggctgagttaagtgaaaggaaaaacagcacaatggtgaccactgataaaggctttattaggtatatctgaggaagtgggtcacatgaaatgtaaaaagggaatgaggtttttgttgttttttggaagtaaaggcaaacataaatattaccatgatgaattctagtgaaatgaccccttgactttgcttttcttaatacagatatttactgagaggaactatttttataacacaagaaaaatttacaattgattaaaagtatccatgtcttggatacatacgtatctatagagctggcatgtaattcttcctctataaagaataggtataggaaagactgaataaaaatggagggatatccccttggatttcacttgcattgtgcaataagcaaagaagggttgataaaagttcttgatcaaaaagttcaaagaaaccagaattttagacagcaagctaaataaatattgtaaaattgcactatattaggttaagtattatttaggtattataatatgctttgtaaattttatattccaaatattgctcaatatttttcatctattaaattaatttctagtgtaaataagtagcttctatatctgtcttagtctattataattgtaaggagtaaaattaaatgaatagtctgcaggtataaatttgaacaatgcatagatgatcgaaaattacggaaaatcatagggcagagaggtgtgaagattcatcattatgtgaaatttggatctttctcaaatccttgctgaaatttaggatggttctcactgtttttctgtgctgatagtaccctttccaaggtgaccttcagggggattaaccttcctagctcaagcaatgagctaaaaggagccttatgcatgatcttcccacatatcaaaataactaaaaggcactgagtttggcatttttctgcctgctctgctaagacctttttttttttttactttcattataacatattatacatgacattatacaaaaatgattaaaatatattaaaacaacatcaacaatccaggatatttttctataaaactttttaaaaataattgtatctatatattcaattttacatcctttttcaaaggctttgtttttctaaaggctttgttttcctttttattatttttttcttttttatttttttgagacagtcttgctctgtcgctcaggctggagtgcagtggcacgatctcagctcactgcaacctcctcctcccaggttcaagtgattcttgttcatcagcctcccgagtagctgggactacaggcatgtgccactatgcccagctaatttttgtacttttagtagagacagggtttcaccacattggtcaggctggtcttgaaatgctggcgtcaagtgatctgcctgcctccgcctcacaaagcactgggattacaggcatgaatctggccttacgtaatatattttcttaatggctgcataatatcacatcaaataggcatttttcaaacctctttccttattaaacatgtagactatatccattttttactaaaataaataacatttcagataatatctttgcactgataatgttgccaagccatttctaaagtgaccttatcaatttaattaccattggatgagggtgttgctttcatcgcaccattgtagattgtcttttttatttcaatttgcgtttatttataactggttgcaaaggtacacagaacacacgctccttcaacttatctttgataaacccaagcaaggatacaaaaagttggacgacattgagtagagtcatggtatacggtgctgaccctacagtatcagtggaaaagataaggaaaatgtcactactcacctatgttatgcaaaacagttaggtgtgctggggctggatactgctcttttacttgagcattggttgattaaagtttaggtaccatccaggctggtctagagaagtctttggagttaaccatgctctttttgttaaagaagagagtaatgtgtttatcctggctcatagtccgtcaccgaaaatagaaaatgccatccataggtaaaatgctgacctatagaaaaaaatgaactctacttttatagcctagtaaaaatgctctacctgagtagttaaaagcaattcatgaagcctgaagctaaagagcactctgatggttttggcataatagctgcatttccagacctgacctttggccccaaccacaagtgctccaagccccaccagctgaccaaagaaagcccaagttctccttctgtccttcccacaacctccctgctcccaaaactatgaaattaatttgaccatattaacacagctgactcctccagtttacttaaggtagaaagaatgagtttacaacagatgaaaataagtgctttgggcgaactgtattccttttaacagatccaaactattttacatttaaaaaaaaagttaaactaaacttctttactgctgatatgtttcctgtattctagaaaaatttttacactttcacattatttttgtacactttccccatgttaagggatgatggcttttataaatgtgtattcattaaatgttactttaaaaatatttcctagttttgtttaattctggttttaactcatcagcattccaaataaagttactaaaaggttttgaatcacagtagttccagcatctgggactaaaaatacttcccttcagggataagcaaaagagaaggcagtgcatgggtttgaaagtgcattaacagatctgcagcttcttgcaatgtaagcttgagctcagcggggtggcacagtccagtatgctgtgtgtgcttcagtattaccctcagagaggggagagcatcagatggctaaatggggaggactgcactatcccacgctggatttttgtgagaatttggaggtaaaaaaggctttccttctccatgcagacgccacagggataaggctaatggcttgacaagcagacttcaggttggattcagactgcgtgactgggcattaaatgccttgcacaactggactgctgcagctctgatgggtgttatcctgctttcaaaaatagtattaaaacttacaaataaagagaggactgacaacctggaggaagctggaagcaaatggaaagcccctactgaaaaagccatttcaattagaaattcattcaggagctcttcattcatctattgttcagggatcacaaaagagccatgataatgataaatgcatattatgcatttcacctctgagagcataaaagcttctggaactctgttccaaaattaaggtgtaatggcagtcatggtactgcacacagtagttgcaattttcattctccatcatcacaaccatcatcttcactaccacttctccaacacacacacacacacacacacacacacacacacaccccatgagagcccacagatagccttacagggtcctacttcaattttctataatgaattaggtttacattctagaaaaatccttcactcttctaaaggtttgttcagtagaatttgggaaaagagtataagttactcttcaatgtatcagaagcatttggaccaggtgactccatcttcaatagaggctgagtaaaataagcctgagactggccgggcgcagtgactcacacctgtaatcccagcactttgggaggccaagtcaggtggatcacctgaggtcaggagtttgagaccagcctggccaacatggtgaaaccccatctctactaaaaatataaaaaattagccagcatggtggcgcatgcctgtaatcccagctactctggaggctgaggcaggagaagtgcttggacccaggaagcagaggttacaatgagccaagatcgcgccattgcactccagcctgggtgacaagagtgaaactccgtctcaaaataaataaataaataaataagactgagacctactgggctgcattcccaggacagcaggtgttcttagtcacaggatgagataggagtaagcacaaggtacaggtcacaaagaccttgctgataaaacaggatgcaataaagaagccgtccaaaacctaccaaaaccaagatggcaatgaaagtgatctttggctgtctcagctgttcattatatgctaattataatatattagcagcctaaaatacactcccactagcaccatgacagtttacaaattccatggccacatccagaagttaccctatatgttctaaaagcaggaggagccctcagttctgggaatcatctgcccctttcctgaacatctcatgaataatccatcccttgtttagcatataatcaagaaataactataactatactcagccaggcagcccatgccactgctctgcctatgaaatagcccttttattcctttacagtcttaataaacttgctttcattttatggattcacctcaaattctttcttgtgcaagatccaagaactctctcttggggtctgtattggaccccctttctggtaacatatgcattacctctcctcaagctcgaggcaaagtcctaaagtttcggataagacccatatgagggaggtgaaggatgaagggattgagggcaaagggactgagaaaaggggagtgtggaagagcaagacagtgctcttgccattacccagcaaaagccaaaaggatccagtactacttgctttctgctgtaagggaattttggaaggcttttaatgatacttacagcagagtgccatgcgtaaagcctatgctaacaatttcacatgcattatcttatttaatcctcataacagttctctaaggttctcttcttatccttatttatcagaagaggaaactgagctttgaaatctcagtactttgactaagttcacacaactaatgagaggcagagctgggatctaggcagtctgactccaggcccatctccttttaacacaacgatataataggggacacccatgctgtcctcttaaatgtccctttgaatccacaaaatagactaagtgaacgaaaccactgcaactcttcttaaaaacatttttaaagacaagaagcttattcgcattttaaatattcctgattgcccagtcctcaatactccaggtttatctatgctgatttcaattcgtcctctaaggttgtagaaacacaggatctgtggttcccgcattaagttcaattccattgcaattgccattttaatcttcccactctagtctggccacaaggtttcctaaactctaaagggagctttgttctggtggagggaggtaaaatccccagacctgaggactcgaaggggcagtcaaggagaggatagctcttctccagagcttaaaggcaaatattttctttttccctggtttctcaccttattgctttgtgtactgagtgaacttatttgtttttgagatccagtaacccatgcaagaaatttcataacacttctcatttagtactttaatactagttgaagaatctagggttacacacacacacacacacacacaccaggcttagttccattacctatagctgtaaaaatgagatttttttctcagttttgtgaaaatgaaaggctgctggactggaactcacagtattgtatatcaaaaagtatcagattgtgataaaatagaaacccagaattaaacttggccttatgatttttagaaagtcaacagattttgaaggagcccacccagtgtattcatttcatttttactaatcctttctttcatgctaagatagagatgaaaaagaatgacagacttcctgttctcatttcattacagcaaaataaataagttttagtgttccatagctctgtaggatgactatagttaaaaataacatataatttcaaatagccaggaggacattgactgttcccaacacaaagaaatgataaatgtttgcaatgatggatatgctaattacactgatctgatcactatacattgtacatacataaacatgactatgtacctcatggatatgtacaactgttatttgtcagttttagaaaataaaaaagcagaagagatctgctaccaaatgcaggaattttctatagagtctgttatagctagccttctacaggcttaactcttctcatgatggagtattgaccatcaccaacaggaaatcttttgttttaggcactccaggaaattatcagggagttctctctgtagataaccaaagtttccctagttgtacttctacccatttttcttagtgtgatcatttaaagcagtgcctcaccaactatcagagatgggggccagtaatttttgtttcatttttttccagttcattacaaatcaatgcatatgtctgtaaaacacaaaatcacacccttaaatgtgatggcaacatcaaattgccataaaagtttctaaacttttcaccccaatttctgaatttatcacagactggtaaaaaacagctcacaagccagcaccacgggcagaccacactttgcacagtgctcaaacgtaggcctaacaacctggcttggcttggcacttctaaaaaccgatcctgaggcaaggcttcttgtaaaagagtttatactggaagttaaaaatcatcaaattattagatactgggaatggagtagtaaagtagacagagcagggaaggaataaagtatgaattttcaagctggttacccatctgggcaactggagctcagttttgctgggaaagtctggaagacagtgtcagatataactaagagttattcccatcaaggggaaaggaaactgtgcttttcatccaccaaatccttgcttaacattggaatacagatgcttccaagacattaactttgtggcacttctggcttttcctacacacttattgtgtatgccaccatgtctagggggaaaaaggcccacaggcaaagaggtaccagcattcataccaccagctttcagcttgtagaggtggccgccaagaggaactcgtagttggcagtgccaactacaactactacaccaaccagctggaaactatacaaagagtatgaacaaagttcacaggagaaacaaggctctgcaacatatgaaaatatattctacttcattcataatgagacgcatgaaaattgtaactgtatcaataccatttctcacctagtagatgggcaaaaatccaaatgtttgagcacacattctgtgggtgaggctgtggaaacgtaggttcacatacattgctcttggatatgcagattaggaccgctcctgtggagagcagttagggaatatctttcaaaattaaaaaatgcagagttaagttttgatccaggagtctcactcctgagaatttatgctatagatatgcctacaagcatttgagatgaaaaagaagcattgctatttgtttttcttgtttttcatgaataacattgtaaaagtagaatatgggcagtgattcaagcattcatctttgggactggttaaggaaactatgatgctttcacagaatgaaattctatgcagctgtttaaaacaaaccaagacaccttctttcacatatatggaaagatgtccaaaatatactgttcagtttttaaaaaggtacaaaataacatatatagtatgattccttttgcatatgtgtatttgcttttaattgcctaaagaaactctcagaaggattcaaaagatccataccaaacaagatgggagaacagaggagtagtgacaggagtagaagcactgtagaccttttcatatcattttggtttttaaattacatgagtaggttacctaattattaaaataaatttaatttaaaaggtaatgggggataggaagaaatttgttaaaagatacaaaattacagctagataggaagattaagttgtagtgttctatagctctgtaggatgactacagttaacaataatatatattctaaatagctagaaggaggatattgaatgttctcaacagaaagaaatgataaatgcttaagatgatggatatactaattaccctaatctgatcactgtatattttgtgtattgcaatgtcactatgtaccccataaatatgtataattatcgtgtgtcaattaaaaatttttaattaaaaaattataaacaaaaaa

SEQ ID NO: 186781 - DNA, 2332 bp, Homo sapiens
  Payload ID: 16775
  Gene Symbol: STEAP4
  Gene Name: STEAP family member 4
  ENST ID: ENST00000414498
  CDS Start-End: 191-1210
ggcgcggcgaaacttccctctacccgcccggcccgcggcgcgcaccgttggcgctggacgcttcctccttggaagcgcctctccctcaggtctcaagaactgttttgagatgcaggaattcatctaattttcactgccgggcgaggtgtgagagccctagcatctgaaagtggtcgacttgcgagttgttatggagaaaacttgtatagatgcacttcctcttactatgaattcttcagaaaagcaagagactgtatgtatttttggaactggtgattttggaagatcactgggattgaaaatgctccagtgtggttattctgttgtttttggaagtcgaaacccccagaagaccaccctactgcccagtggtgcagaagtcttgagctattcagaagcagccaagaagtctggcatcataatcatagcaatccacagagagcattatgattttctcacagaattaactgaggttctcaatggaaaaatattggtagacatcagcaacaacctcaaaatcaatcaatatccagaatctaatgcagagtaccttgctcatttggtgccaggagcccacgtggtaaaagcatttaacaccatctcagcctgggctctccagtcaggagcactggatgcaagtcggcaggtgtttgtgtgtggaaatgacagcaaagccaagcaaagagtgatggatattgttcgtaatcttggacttactccaatggatcaaggatcactcatggcagccaaagaaattgaaaagtaccccctgcagctatttccaatgtggaggttccccttctatttgtctgctgtgctgtgtgtcttcttgtttttctattgtgttataagagacgtaatctacccttatgtttatgaaaagaaagataatacatttcgtatggctatttccattccaaatcgtatctttccaataacagcacttacactgcttgctttggtttacctccctggtgttattgctgccattctacaactgtaccgaggcacaaaataccgtcgattcccagactggcttgaccactggatgctttgccgaaagcagcttggcttggtagctctgggatttgccttccttcatgtcctctacacacttgtgattcctattcgatattatgtacgatggagattgggaaacttaaccgttacccaggtaaatctcttcttatatattttcttctgctcctgaaatcagagactattgctacatcatattccatttcataattatagaaagtcactcttctaagcatcttcttttttaaagtaactagaattagaaatgtcatgtcagttttttaaaatgaatccagtttagatctcatacaactattaagaataaaagtttgccgggggcggtggctcactcccataatcccagcactttgggattccgaggcaggtgaatcatgtggtcaagagatcaagaccatcctggccaacatggtgaaaccccatctctactaaaaatacaaaaattagctgggcatggtggcgggtacctctaatcccagctacccaggaggctgaggcaggagaatcgcttgaacccaggaggcagaggttgcagtgagccgagatcgtgccactgcactccagcctgggtgacagagcaagactccatctcaaaaagaaaaaaaaaaaaagaaagaaaaaaaatgatactttccaggttcgcttgggtccagatctgtattcccagggctcatagagatattggcaaactgacagatttcatggctcaagaaacctaaagacacctacttgaattcctttggttggcagtcaaatgttaactagtgtgttttcaagcttctattcttaggcatgttacttccttttggaagtcaaaaccaaccatcttttaagtaagagggctaaccaaatatgtgccacactaaagcaaacaaattcacaaaagagcgcttataattcccttaatgtttgacttgggggaagttgacctcaataactagaaaaccaaataattctgagcaaatatcaaatattgtcttatgcataatcaaaagattcagtgagaatcagctgaaggagttttaagacattctcagaggaagtgctataagtcagttctagtttagaaatagctagttttgatagatcttacttcagtctcaaaaattattagttagtcattaatgatgcttctatgggtttctctacattattttcccaacaaatacatgtaagtttcctgggtaagagtcacactacaagtgtctgattcctctcaacttgtggtgcaagactgatgtattatattatgatgtatttattatcatgtataata

SEQ ID NO: 186782 - DNA, 5362 bp, Homo sapiens
  Payload ID: 16776
  Gene Symbol: SCD
  Gene Name: stearoyl-CoA desaturase (delta-9-desaturase)
  Uniprot ID: O00767
  ENST ID: ENST00000370355
  CDS Start-End: 382-1461
gtggtgtcggtgtcggcagcatccccggcgccctgctgcggtcgccgcgagcctcggcctctgtctcctccccctcccgcccttacctccacgcgggaccgcccgcgccagtcaactcctcgcactttgcccctgcttggcagcggataaaagggggctgaggaaataccggacacggtcacccgttgccagctctagcctttaaattcccggctcggggacctccacgcaccgcggctagcgccgacaaccagctagcgtgcaaggcgccgcggctcagcgcgtaccggcgggcttcgaaaccgcagtcctccggcgaccccgaactccgctccggagcctcagccccctggaaagtgatcccggcatccgagagccaagatgccggcccacttgctgcaggacgatatctctagctcctataccaccaccaccaccattacagcgcctccctccagggtcctgcagaatggaggagataagttggagacgatgcccctctacttggaagacgacattcgccctgatataaaagatgatatatatgaccccacctacaaggataaggaaggcccaagccccaaggttgaatatgtctggagaaacatcatccttatgtctctgctacacttgggagccctgtatgggatcactttgattcctacctgcaagttctacacctggctttggggggtattctactattttgtcagtgccctgggcataacagcaggagctcatcgtctgtggagccaccgctcttacaaagctcggctgcccctacggctctttctgatcattgccaacacaatggcattccagaatgatgtctatgaatgggctcgtgaccaccgtgcccaccacaagttttcagaaacacatgctgatcctcataattcccgacgtggctttttcttctctcacgtgggttggctgcttgtgcgcaaacacccagctgtcaaagagaaggggagtacgctagacttgtctgacctagaagctgagaaactggtgatgttccagaggaggtactacaaacctggcttgctgatgatgtgcttcatcctgcccacgcttgtgccctggtatttctggggtgaaacttttcaaaacagtgtgttcgttgccactttcttgcgatatgctgtggtgcttaatgccacctggctggtgaacagtgctgcccacctcttcggatatcgtccttatgacaagaacattagcccccgggagaatatcctggtttcacttggagctgtgggtgagggcttccacaactaccaccactcctttccctatgactactctgccagtgagtaccgctggcacatcaacttcaccacattcttcattgattgcatggccgccctcggtctggcctatgaccggaagaaagtctccaaggccgccatcttggccaggattaaaagaaccggagatggaaactacaagagtggctgagtttggggtccctcaggttcctttttcaaaaaccagccaggcagaggttttaatgtctgtttattaactactgaataatgctaccaggatgctaaagatgatgatgttaacccattccagtacagtattcttttaaaattcaaaagtattgaaagccaacaactctgcctttatgatgctaagctgatattatttcttctcttatcctctctctcttctaggcccattgtcctccttttcactttattgctatcgccctcctttcccttattgcctcccaggcaagcagctggtcagtctttgctcagtgtccagcttccaaagcctagacaacctttctgtagcctaaaacgaatggtctttgctccagataactctctttccttgagctgttgtgagctttgaagtaggtggcttgagctagagataaaacagaatcttctgggtagtcccctgttgattatcttcagcccaggcttttgctagatggaatggaaaagcaacttcatttgacacaaagcttctaaagcaggtaaattgtcgggggagagagttagcatgtatgaatgtaaggatgagggaagcgaagcaagaggaacctctcgccatgatcagacatacagctgcctacctaatgaggacttcaagccccaccacatagcatgcttcctttctctcctggctcggggtaaaaagtggctgcggtgtttggcaatgctaattcaatgccgcaacatatagttgaggccgaggataaagaaaagacattttaagtttgtagtaaaagtggtctctgctggggaagggttttcttttctttttttctttaataacaaggagatttcttagttcatatatcaagaagtcttgaagttgggtgtttccagaattggtaaaaacagcagctcatagaattttgagtattccatgagctgctcattacagttctttcctctttctgctctgccatcttcaggatattggttcttcccctcatagtaataagatggctgtggcatttccaaacatccaaaaaaagggaaggatttaaggaggtgaagtcgggtcaaaaataaaatatatatacatatatacattgcttagaacgttaaactattagagtatttcccttccaaagagggatgtttggaaaaaactctgaaggagaggaggaattagttgggatgccaatttcctctccactgctggacatgagatggagaggctgagggacaggatctataggcagcttctaagagcgaacttcacataggaagggatctgagaacacgttgccaggggcttgagaaggttactgagtgagttattgggagtcttaataaaataaactagatattaggtccattcattaattagttccagtttctccttgaaatgagtaaaaactagaaggcttctctccacagtgttgtgccccttcactcatttttttttgaggagaagggggtctctgttaacatctagcctaaagtatacaactgcctggggggcagggttaggaatctcttcactaccctgattcttgattcctggctctaccctgtctgtcccttttctttgaccagatctttctcttccctgaacgttttcttctttccctggacaggcagcctcctttgtgtgtattcagaggcagtgatgacttgctgtccaggcagctccctcctgcacacagaatgctcagggtcactgaaccactgcttctcttttgaaagtagagctagctgccactttcacgtggcctccgcagtgtctccacctacacccctgtgctcccctgccacactgatggctcaagacaaggctggcaaaccctcccagaaacatctctggcccagaaagcctctctctccctccctctctcatgaggcacagccaagccaagcgctcatgttgagccagtgggccagccacagagcaaaagagggtttattttcagtcccctctctctgggtcagaaccagagggcatgctgaatgccccctgcttacttggtgagggtgccccgcctgagtcagtgctctcagctggcagtgcaatgcttgtagaagtaggaggaaacagttctcactgggaagaagcaagggcaagaacccaagtgcctcacctcgaaaggaggccctgttccctggagtcagggtgaactgcaaagctttggctgagacctgggatttgagataccacaaaccctgctgaacacagtgtctgttcagcaaactaaccagcattccctacagcctagggcagacaatagtatagaagtctggaaaaaaacaaaaacagaatttgagaaccttggaccactcctgtccctgtagctcagtcatcaaagcagaagtctggctttgctctattaagattggaaatgtacactaccaaacactcagtccactgttgagccccagtgctggaagggaggaaggcctttcttctgtgttaattgcgtagaggctacaggggttagcctggactaaaggcatccttgtcttttgagctattcacctcagtagaaaaggatctaagggaagatcactgtagtttagttctgttgacctgtgcacctaccccttggaaatgtctgctggtatttctaattccacaggtcatcagatgcctgcttgataatatataaacaataaaaacaactttcacttcttcctattgtaatcgtgtgccatggatctgatctgtaccatgaccctacataaggctggatggcacctcaggctgagggccccaatgtatgtgtggctgtgggtgtgggtgggagtgtgtctgctgagtaaggaacacgattttcaagattctaaagctcaattcaagtgacacattaatgataaactcagatctgatcaagagtccggatttctaacagtccttgctttggggggtgtgctgacaacttagctcaggtgccttacatcttttctaatcacagtgttgcatatgagcctgccctcactccctctgcagaatccctttgcacctgagaccctactgaagtggctggtagaaaaaggggcctgagtggaggattatcagtatcacgatttgcaggattcccttctgggcttcattctggaaacttttgttagggctgcttttcttaagtgcccacatttgatggagggtggaaataatttgaatgtatttgatttataagttttttttttttttttgggttaaaagatggttgtagcatttaaaatggaaaattttctccttggtttgctagtatcttgggtgtattctctgtaagtgtagctcaaataggtcatcatgaaaggttaaaaaagcgaggtggccatgttatgctggtggttaaggccagggcctctccaaccactgtgccactgacttgctgtgtgaccctgggcaagtcacttaactataaggtgcctcagttttccttctgttaaaatggggataataatactgacctacctcaaagggcagttttgaggcatgactaatgctttttagaaagcattttgggatccttcagcacaggaattctcaagacctgagtattttttataataggaatgtccaccatgaacttgatacgtccgtgtgtcccagatgctgtcattagtctatatggttctccaagaaactgaatgaatccattggagaagcggtggataactagccagacaaaatttgagaatacataaacaacgcattgccacggaaacatacagaggatgccttttctgtgattgggtgggattttttccctttttatgtgggatatagtagttacttgtgacaagaataattttggaataatttctattaatatcaactctgaagctaattgtactaatctgagattgtgtttgttcataataaaagtgaagtgaatctgattgcactg

SEQ ID NO: 186783 - DNA, 1995 bp, Homo sapiens
  Payload ID: 16777
  Gene Symbol: SCD5
  Gene Name: stearoyl-CoA desaturase 5
  Uniprot ID: Q86SK9
  ENST ID: ENST00000273908
  CDS Start-End: 236-1006
agccatatgggggatacgccagcaacagacgccggccgccaagatctgcatccctaggccacgctaagaccctggggaagagcgcaggagcccgggagaagggctggaaggaggggactggacgtgcggagaattcccccctaaaaggcagaagcccccgcccccaccctcgagctccgctcgggcagagcgcctgcctgcctgccgctgctgcgggcgcccacctcgcccagccatgccaggcccggccaccgacgcggggaagatccctttctgcgacgccaaggaagaaatccgtgccgggctcgaaagctctgagggcggcggcggcccggagaggccaggcgcgcgcgggcagcggcagaacatcgtctggaggaatgtcgtcctgatgagcttgctccacttgggggccgtgtactccctggtgctcatccccaaagccaagccactcactctgctctgggcctacttctgcttcctcctggccgctctgggtgtgacagctggtgcccatcgcttgtggagccacaggtcctaccgggccaagctgcctctgaggatatttctggctgtcgccaactccatggctttccagaatgacatcttcgagtggtccagggaccaccgagcccaccacaagtactcagagacggatgctgacccccacaatgcccgccggggcttcttcttctcccatattgggtggctgtttgttcgcaagcatcgagatgttattgagaaggggagaaagcttgacgtcactgacctgcttgctgatcctgtggtccggatccagagaaatacacagcacatccagaaagaaggaagagctctcaatcaagaggcagcgtgtgagatgcttcgtgaatggcatcaagggcatatattgaaagtcacccttcccggattacacattttagctttgttacatactcattgtaaccactccgaaaagtgctgcttgatgctgcgtgctctttctgtgtccctggaggtattctgaaggtcagaagagagatatacaacagcgaggcttggtgataacgtatagaataacagacggggactccacacccaggccttttttaacggtgtgaagcatagacagagctgcagtctgtgctaacattaggttatttattgattcaatcagttgacacaaggaggcagctacggggaggtaaaatatggtcctaaaatcaaaaagatttcagttttgtcattctgtctctgagattctatttccacatctagagcagggtaataatgatacctaccttacaaaattattgggagaatacattagttaatatatgtgaaagtatggaggagatgtgcaataaatatttgtgttattaactacacatacagcactctataggagatattccatttataaaaactttaggttctaaaaacctgtacacgttgattatttttgtaagtcaaaagtgattaagaggagtttaagctatcatttccagatgtatttctataaataaaaacataagtatattcagttgatttggggtggagagttccatagatgtctgttaggtccgcttggtccagagctgagttcaagtcctgaatatccttgttaattttctgtcttgttgatctgtctaatattgacagtggggtattaaagtctcccactattattatatgggagtctaagtctccttgtaggtctctaagaacttgctttatgaatctgggtgctcctgtattaggtgcatacatatttaggatagttagctcttcttgctgcattgatcccattaccattatataatgcccttctttgtcttttttgatctttgttggtttaaagtctgttttattagagactaggattgcaacccctgctatttttttttttttttttgcttgataaatattcctgtatccctttattttgagcctatatgtgtctttgcacgtgaggtgggtctcctgaatacagcacaccgatgggttttgactcta

SEQ ID NO: 186784 - DNA, 3101 bp, Homo sapiens
  Payload ID: 16777
  Gene Symbol: SCD5
  Gene Name: stearoyl-CoA desaturase 5
  Uniprot ID: Q86SK9
  ENST ID: ENST00000319540
  CDS Start-End: 321-1313
attttcacagctcctcctccccggccgcgcgcccctcccgccccgcgcgcgcctcctctttctcgcggccgagttcagcccgggcagccatatgggggatacgccagcaacagacgccggccgccaagatctgcatccctaggccacgctaagaccctggggaagagcgcaggagcccgggagaagggctggaaggaggggactggacgtgcggagaattcccccctaaaaggcagaagcccccgcccccaccctcgagctccgctcgggcagagcgcctgcctgcctgccgctgctgcgggcgcccacctcgcccagccatgccaggcccggccaccgacgcggggaagatccctttctgcgacgccaaggaagaaatccgtgccgggctcgaaagctctgagggcggcggcggcccggagaggccaggcgcgcgcgggcagcggcagaacatcgtctggaggaatgtcgtcctgatgagcttgctccacttgggggccgtgtactccctggtgctcatccccaaagccaagccactcactctgctctgggcctacttctgcttcctcctggccgctctgggtgtgacagctggtgcccatcgcttgtggagccacaggtcctaccgggccaagctgcctctgaggatatttctggctgtcgccaactccatggctttccagaatgacatcttcgagtggtccagggaccaccgagcccaccacaagtactcagagacggatgctgacccccacaatgcccgccggggcttcttcttctcccatattgggtggctgtttgttcgcaagcatcgagatgttattgagaaggggagaaagcttgacgtcactgacctgcttgctgatcctgtggtccggatccagagaaagtactataagatctccgtggtgctcatgtgctttgtggtccccacgctggtgccctggtacatctggggagagagtctgtggaattcctacttcttggcctctattctccgctataccatctcactcaacatcagctggctggtcaacagcgccgcccacatgtatggaaaccggccctatgacaagcacatcagccctcggcagaacccactcgtcgctctgggtgccattggtgaaggcttccataattaccatcacacctttccctttgactactctgcgagtgaatttggcttaaattttaacccaaccacctggttcattgatttcatgtgctggctggggctggccactgaccgcaaacgggcaaccaagccgatgatcgaggcccggaaggccaggactggagacagcagtgcttgaacttggaacagccatcccacatgtctgccgttgcaacctcggttcatggctttggttacaatagctctcttgtacattggatcgtgggagggggcagagggtggggaaggaacgagtcaatgtggtttgggaatgtttttgtttatctcaaaataatgttgaaatacaattatcaatgaaaaaactttcgtttttttttttgtttgttttgtttttgagacagagtctcactctgtcacccaggctggagtgcagtggcgcagtctcggctcactgcagcctccacctacctggttcaagcaattctcctgcctcagcctcctgagtagctgagattacaggagcctgccaccacacccagctaatttttttgtatttttagtagagacagggtttcatcatgttggccagactggcctcgaattcctgacctcaggcaatccacccgcctcggcctcccaaagagctgggattacaggcgtgagccaccgcaccctgccgaaaaaaacttttttttttttgagacggaggctcgctctgtcccccaggctggagtgcagtggcgagatctcagctcactgcaagctccgcctcccgggttcacgccattctcctgcctcagcctcccgagtagctgggagccagcgcgcccagcctaaaaaacttttcaagtcaatattactacgatttaacattagagtgtggacatgtgatttaatcgctatagctaaaatacgtcaaatatacgttgtcatgtgcttgaacatgatgctaaccctgacaggatgaaggaaagtaatattctttcagtgtagttcaggagagcatttgttttcttttctaccaattaacccatcattgcttttaaacaaccatctgaaggagcagagaggcagggtagaagacagaagggggatctatgtggtaactaaagaatgtttctgttttgttaattattgtgtgtgtgtggttttattgtttgcttaagagaatcaaaaactgaaaaaaatgagaatacaggaaatggctcttgtttatttttttgctgtgtttacagcttgttaatgctctactgtctttgtttcaagagagatttgttcactgcccagctcgttttgtgtcctgagccctatggccagcccaccttataaatcatgcctgtttagatgtttgattttgttctgtttgctattgttatcttaaaggtgtataactctgacatgccagacatcaaattaagctcaaattaagctctcgtttaaatgtttaagcacctaatttatattctaattgatcccagccactgatgcatgtactttagctacttctgctaaataagcatattaattttccacatcagaccatcagatcttgagaaccaacagttatctagaattccgtgtctactaatgtttcacctgcatgcagccttcattaattttgtagcaaaatataaagtgatcattatgtagcttctggattaaaaaaatttgtgtgtgaagttgctttgtaaagtgcatgtggaattaatgggacagtgtgccctttgtgttagatgttagagcaaaagaaagggcttatagtgttagtattggagcactttgaagatagatattttcagaaaagatgtaggatttaaaagttaaattttaaattttagaaaaagatatgatggcaattggaaatagtcacaatgaagttcttcatccagtaggtgtttaacagtgttattttgccactggtaatgtgtaaactgtgagtgatttacaataaatgattatgaattca

SEQ ID NO: 186785 - DNA, 1635 bp, Homo sapiens
  Payload ID: 16778
  Gene Symbol: SLBP
  Gene Name: stem-loop binding protein
  ENST ID: ENST00000318386
  CDS Start-End: 63-896
ctctgcccgcgccgccgccgcctcagcctcggccctgcgctgcgcgcccggcccgtgctgccatggcctgccgcccgcgaagcccgccgaggcatcagagccgctgcgacggtgacgccagcccgccgtcccccgcgcgatggagcctgggacggaagcgcagagccgacggcaggcgctggaggcccgaagacgccgaggaggcagagcaccgcggcgccgagcgcagacccgagagctttaccactcctgaaggccctaaaccccgttccagatgctctgactgggcaagtgcagttgaagaagatgaaatgaggaccagagttaacaaagaaatggcaagcaatatttattttgccctcagatataaaaggaaactcctcatcaatgactttggaagagagagaaaatcatcatcaggaagttctgattcaaaggagtctatgtctactgtgccggctgactttgagacagatgaaagtgtcctaatgaggagacagaagcagatcaactatgggaagaacacaattgcctacgatcgttatattaaagaagtcccaagacaccttcgacaacctggcattcatcccaagacccctaataaatttaagaagtatagtcgacgttcatgggaccagcaaatcaaactctggaaggtggctctgcatttttgggatcctccagcggaagaaggatgtgatttgcaagaaatacaccctgtagaccttgaatctgcagaaagcagctccgagccccagaccagctctcaggatgactttgatgtgtactctggcacacccaccaaggtgagacacatggacagtcaagtggaggatgagtttgatttggaagcttgtttaactgaacccttgagagacttctcagccatgagctaactgccccctggcggccaggaagagaaacagctcctccccgactaggtggaaggctggccaggcaccaagcatgtgtgtgcacttgtacctggtggtttctctgttagcagtccattagctcatgctgaattatttttgccttactttcttaagaaacattaattttatgtatagtgagtatattttgcatgttttaaattgtaaatggagctaagtccaagaaagtacttgaagctctcttccagcgagcttaattgcgtaatccctgttgtcctccagggtaagctgacacgtctacataactggttttccacaggcatcttcagttattgcttgtcaggtggactgttttggatttaaccatgtaatccatgggaccaattgagagtcagctacttttataggcatcaaagtattctcagacacctttaatatctttatggaaacttaatttttggccttttatcaatatgtcataacagcattctgaagtcagacattgttaaattgagctattaaactaatgagttttatgtaagttatatggtcttaatttggtacttgtaaatagcactagttagactctttagaatactccaagagttagggcagcagagtggagcgatttagaaagaacattttaaaacaatcagttaatttaccatgtaaaattgctgtaaatgataatgtgtacagattttctgttcaaatattcaattgtaaacttcttgttaagact

SEQ ID NO: 186786 - DNA, 1623 bp, Homo sapiens
  Payload ID: 16778
  Gene Symbol: SLBP
  Gene Name: stem-loop binding protein
  Uniprot ID: Q14493
  ENST ID: ENST00000429429
  CDS Start-End: 131-826
gagctcgtgagcgccggcgcggggacgcgggtttctgcctcaggccctgccctgctctactctgcgctctctgcccgcgccgccgccgcctcagcctcggccctgcgctgcgcgcccggcccgtgctgccatggcctgccgcccgcgaagcccgccgaggcatcagagccgctgcgacggtgacgccagctttaccactcctgaaggccctaaaccccgttccagatgctctgactgggcaagtgcagttgaagaagatgaaatgaggaccagagttaacaaagaaatggcaagatataaaaggaaactcctcatcaatgactttggaagagagagaaaatcatcatcaggaagttctgattcaaaggagtctatgtctactgtgccggctgactttgagacagatgaaagtgtcctaatgaggagacagaagcagatcaactatgggaagaacacaattgcctacgatcgttatattaaagaagtcccaagacaccttcgacaacctggcattcatcccaagacccctaataaatttaagaagtatagtcgacgttcatgggaccagcaaatcaaactctggaaggtggctctgcatttttgggatcctccagcggaagaaggatgtgatttgcaagaaatacaccctgtagaccttgaatctgcagaaagcagctccgagccccagaccagctctcaggatgactttgatgtgtactctggcacacccaccaaggtgagacacatggacagtcaagtggaggatgagtttgatttggaagcttgtttaactgaacccttgagagacttctcagccatgagctaactgccccctggcggccaggaagagaaacagctcctccccgactaggtggaaggctggccaggcaccaagcatgtgtgtgcacttgtacctggtggtttctctgttagcagtccattagctcatgctgaattatttttgccttactttcttaagaaacattaattttatgtatagtgagtatattttgcatgttttaaattgtaaatggagctaagtccaagaaagtacttgaagctctcttccagcgagcttaattgcgtaatccctgttgtcctccagggtaagctgacacgtctacataactggttttccacaggcatcttcagttattgcttgtcaggtggactgttttggatttaaccatgtaatccatgggaccaattgagagtcagctacttttataggcatcaaagtattctcagacacctttaatatctttatggaaacttaatttttggccttttatcaatatgtcataacagcattctgaagtcagacattgttaaattgagctattaaactaatgagttttatgtaagttatatggtcttaatttggtacttgtaaatagcactagttagactctttagaatactccaagagttagggcagcagagtggagcgatttagaaagaacattttaaaacaatcagttaatttaccatgtaaaattgctgtaaatgataatgtgtacagattttctgttcaaatattcaattgtaaacttcttgttaagactgttacgtttctattgcttttgtatgggatattgcaaaaataaaaaggaaagaaccctc

SEQ ID NO: 186787 - DNA, 558 bp, Homo sapiens
  Payload ID: 16778
  Gene Symbol: SLBP
  Gene Name: stem-loop binding protein
  ENST ID: ENST00000480936
  CDS Start-End: 1-558
aaaggcggttgggggcggggcgcgcagagctcgtgagcgccggcgcggggacgcgggtttctgcctcaggccctgccctgctctactctgcgctctctgcccgcgccgccgccgcctcagcctcggccctgcgctgcgcgcccggcccgaagacgccgaggaggcagagcaccgcggcgccgagcgcagacccgagagctttaccactcctgaaggccctaaaccccgttccagatgctctgactgggcaagtgcagttgaagaagatgaaatgaggaccagagttaacaaagaaatggcaagatataaaaggaaactcctcatcaatgactttggaagagagagaaaatcatcatcaggaagttctgattcaaaggagtctatgtctactgtgccggctgactttgagacagatgaaagtgtcctaatgaggagacagaagcagatcaactatgggaagaacacaattgcctacgatcgttatattaaagaagtcccaagacaccttcgacaacctggcattcatcccaagacccctaataaatttaagaagtatag

SEQ ID NO: 186788 - DNA, 1977 bp, Homo sapiens
  Payload ID: 16778
  Gene Symbol: SLBP
  Gene Name: stem-loop binding protein
  Uniprot ID: Q14493
  ENST ID: ENST00000489418
  CDS Start-End: 368-1180
aggcctctcctcagcccacggcgtccatctggctcccgagccgagggccgggcagtcgggcttcgcggctgcccgcggtcccgaggcctcgccctagccccagtcggctcgcgaggcgcgcacagctgagtggacccctgcggcgtggcccgatggtctcgcccgacccggcgcgcgcgggaggccgaggggcggggcccggcgcccacataaaggcggttgggggcggggcgcgcagagctcgtgagcgccggcgcggggacgcgggtttctgcctcaggccctgccctgctctactctgcgctctctgcccgcgccgccgccgcctcagcctcggccctgcgctgcgcgcccggcccgtgctgccatggcctgccgcccgcgaagcccgccgaggcatcagagccgctgcgacggtgacgccagcccgccgtcccccgcgcgatggagcctgggacggaagcgcagagccgacggcaggcgctggaggcccgaagacgccgaggaggcagagcaccgcggcgccgagcgcagacccgagagctttaccactcctgaaggccctaaaccccgttccagatgctctgactgggcaagtgcagttgaagaagatgaaatgaggaccagagttaacaaagaaatggcaagatataaaaggaaactcctcatcaatgactttggaagagagagaaaatcatcatcaggaagttctgattcaaaggagtctatgtctactgtgccggctgactttgagacagatgaaagtgtcctaatgaggagacagaagcagatcaactatgggaagaacacaattgcctacgatcgttatattaaagaagtcccaagacaccttcgacaacctggcattcatcccaagacccctaataaatttaagaagtatagtcgacgttcatgggaccagcaaatcaaactctggaaggtggctctgcatttttgggatcctccagcggaagaaggatgtgatttgcaagaaatacaccctgtagaccttgaatctgcagaaagcagctccgagccccagaccagctctcaggatgactttgatgtgtactctggcacacccaccaaggtgagacacatggacagtcaagtggaggatgagtttgatttggaagcttgtttaactgaacccttgagagacttctcagccatgagctaactgccccctggcggccaggaagagaaacagctcctccccgactaggtggaaggctggccaggcaccaagcatgtgtgtgcacttgtacctggtggtttctctgttagcagtccattagctcatgctgaattatttttgccttactttcttaagaaacattaattttatgtatagtgagtatattttgcatgttttaaattgtaaatggagctaagtccaagaaagtacttgaagctctcttccagcgagcttaattgcgtaatccctgttgtcctccagggtaagctgacacgtctacataactggttttccacaggcatcttcagttattgcttgtcaggtggactgttttggatttaaccatgtaatccatgggaccaattgagagtcagctacttttataggcatcaaagtattctcagacacctttaatatctttatggaaacttaatttttggccttttatcaatatgtcataacagcattctgaagtcagacattgttaaattgagctattaaactaatgagttttatgtaagttatatggtcttaatttggtacttgtaaatagcactagttagactctttagaatactccaagagttagggcagcagagtggagcgatttagaaagaacattttaaaacaatcagttaatttaccatgtaaaattgctgtaaatgataatgtgtacagattttctgttcaaatattcaattgtaaacttcttgttaagactgttacgtttctattgcttttgtatgggatattgcaaaaataaaaaggaaagaaccctc

SEQ ID NO: 186789 - DNA, 987 bp, Homo sapiens
  Payload ID: 16778
  Gene Symbol: SLBP
  Gene Name: stem-loop binding protein
  ENST ID: ENST00000488267
  CDS Start-End: 130-837
agctcgtgagcgccggcgcggggacgcgggtttctgcctcaggccctgccctgctctactctgcgctctctgcccgcgccgccgccgcctcagcctcggccctgcgctgcgcgcccggcccgtgctgccatggcctgccgcccgcgaagcccgccgaggcatcagagccgctgcgacggtgacgccagcccgccgtcccccgcgcgatggagcctgggacggaagcgcagagccgacggcaggcgctggaggcccgaagacgccgaggaggcagagcaccgcggcgccgagcgcagacccgagagatataaaaggaaactcctcatcaatgactttggaagagagagaaaatcatcatcaggaagttctgattcaaaggagtctatgtctactgtgccggctgactttgagacagatgaaagtgtcctaatgaggagacagaagcagatcaactatgggaagaacacaattgcctacgatcgttatattaaagaagtcccaagacaccttcgacaacctggcattcatcccaagacccctaataaatttaagaagtatagtcgacgttcatgggaccagcaaatcaaactctggaaggtggctctgcatttttgggatcctccagcggaagaaggatgtgatttgcaagaaatacaccctgtagaccttgaatctgcagaaagcagctccgagccccagaccagctctcaggatgactttgatgtgtactctggcacacccaccaaggtgagacacatggacagtcaagtggaggatgagtttgatttggaagcttgtttaactgaacccttgagagacttctcagccatgagctaactgccccctggcggccaggaagagaaacagctcctccccgactaggtggaaggctggccaggcaccaagcatgtgtgtgcacttgtacctggtggtttctctgttagcagtccattagctcatgctgaattatttttgccttactttctt

SEQ ID NO: 186790 - DNA, 1030 bp, Homo sapiens
  Payload ID: 16778
  Gene Symbol: SLBP
  Gene Name: stem-loop binding protein
  ENST ID: ENST00000483348
  CDS Start-End: 1-677
gcccagccgaccgcgtccctccccgcagcccgccgtcccccgcgcgatggagcctgggacggaagcgcagagccgacggcaggcgctggaggcccgaagacgccgaggaggcagagcaccgcggcgccgagcgcagacccgagagatataaaaggaaactcctcatcaatgactttggaagagagagaaaatcatcatcaggaagttctgattcaaaggagtctatgtctactgtgccggctgactttgagacagatgaaagtgtcctaatgaggagacagaagcagatcaactatgggaagaacacaattgcctacgatcgttatattaaagaagtcccaagacaccttcgacaacctggcattcatcccaagacccctaataaatttaagaagtatagtcgacgttcatgggaccagcaaatcaaactctggaaggtggctctgcatttttgggatcctccagcggaagaaggatgtgatttgcaagaaatacaccctgtagaccttgaatctgcagaaagcagctccgagccccagaccagctctcaggatgactttgatgtgtactctggcacacccaccaaggtgagacacatggacagtcaagtggaggatgagtttgatttggaagcttgtttaactgaacccttgagagacttctcagccatgagctaactgccccctggcggccaggaagagaaacagctcctccccgactaggtggaaggctggccaggcaccaagcatgtgtgtgcacttgtacctggtggtttctctgttagcagtccattagctcatgctgaattatttttgccttactttcttaagaaacattaattttatgtatagtgagtatattttgcatgttttaaattgtaaatggagctaagtccaagaaagtacttgaagctctcttccagcgagcttaattgcgtaatccctgttgtcctccagggtaagctgacacgtctacataactggttttccacaggcatcttcagttattgcttgtcaggtggactgttttg

SEQ ID NO: 186791 - DNA, 1104 bp, Homo sapiens
  Payload ID: 16779
  Gene Symbol: STRC
  Gene Name: stereocilin
  ENST ID: ENST00000455136
  CDS Start-End: 1-359
gcagcctggctgccatccgggattacagcccaggaatgaggcctgaacagaaggaggctctggcaaagcgactgctggcccctgaactgtttggggaagtgcctgcctggccccaggagctgctgtgggcagtgctgcccctgctcccccacctccctctggagaactttttgcagctcagccctcaccagatccaggccctggaggatagctggccagcagcaggtctggggccagggcatgcccgccatgtgctgcgcagcctggtaaaccagagtgtccaggatggtgaggagcaggtacgcaggtggcatatgaacttctgggtgtgttgcgctcatctggaggagcggtgctgagcccccgggagctgcgggtctgggcccctctcttctctcagctgggcctccgcttccttcaggagctgtcagagccccagcttagagccatgcttcctgtcctgcagggaactagtgttacacctgctcaggctgtcctgctgcttggacggctccttcctaggcacgatgcacagtttctctggaagaagatgcaagtacccaccaaccttaccctcaggaatctgcaggctctgggcaccctggcaggaggcatgtcctgtgagtttctgcagcagatcaactccatggtagacttccttgaagtggtgcacatgatctatcagctgcccactagagttcgagggagcctgagggcctgtatctgggcagagctacagcggaggatggcaatgccagaaccagaatggacaactgtagggccagaactgaacgggctggatagcaagctactcctggacttaccgatccagttgatggacagactatccaatgaatccattatgttggtggtggagctggtgcaaagagctccagagcagctgctggcactgacccccctccaccaggcagccctggcagagagggcactacaaaacctggctccaaaggagactccagtctcaggggaagtgctggagaccttaggccctttggttggattcctggggacagagagcacacgacagatccccctacagatcctgctgtcccatctcagtcagctgcaaggcttctgcctagg

SEQ ID NO: 186792 - DNA, 4291 bp, Homo sapiens
  Payload ID: 16779
  Gene Symbol: STRC
  Gene Name: stereocilin
  ENST ID: ENST00000440125
  CDS Start-End: 77-1132
cctgccctcacctggctatcccacacaggtgagaataaccagaactcacctccggtaccagtgttcacttggaaacatggctctcagcctctggcccctgctgctgctgctgctgctgctgctgctgctgtcctttgcagtgactctggcccctactgggcctcattccctggaccctggtctctccttcctgaagtcattgctctccactctggaccaggctccccagggctccctgagccgctcacggttctttacattcctggccaacatttcttcttcctttgagcctgggagaatgggggaaggaccagtaggagagcccccacctctccagccgcctgctctgcggctccatgattttctagtgacactgagaggtagccccgactgggagccaatgctagggctgctaggggatatgctggcactgctgggacaggagcagactccccgagatttcctggtgcaccaggcaggggtgctgggtggacttgtggaggtgctgctgggagccttagttcctgggggcccccctaccccaactcggcccccatgcacccgtgatgggccgtctgactgtgtcctggctgctgactggttgccttctctgctgctgttgttagagggcacacgctggcaagctctggtgcaggtgcagcccagtgtggaccccaccaatgccacaggcctcgatgggagggaggcagctcctcactttttgcagggtctgttgggtttgcttaccccaacaggggagctaggctccaaggaggctctttggggcggtctgctacgcacagtgggggcccccctctatgctgcctttcaggaggggctgctccgtgtcactcactccctgcaggatgaggtcttctccattttggggcagccagagcctgataccaatgggcagtgccagggaggtaaccttcaacagctgctcttatggggcgtccggcacaacctttcctgggatgtccaggcgctgggctttctgtctggatcaccacccccaccccctgccctccttcactgcctgagcacgggcgtgcctctgcccagagcttctcagccgtcagcccacatcagcccacgccaacggcgagccatcactgtggaggccctctagggccggcgcagtgtgctacggacgattggggaatacctggaacaagatgaggagcagccaaccccatcaggctttgaacccactgtcaaccccagctctggtataagcaagatggagctgctggcctgctttagtcctgtgctgtgggatctgctccagagggaaaagagtgtttgggccctgcagattctagtgcaggcgtacctgcatatgcccccagaaaacctccagcagctggtgctttcagcagagagggaggctgcacagggcttcctgacactcatgctgcaggggaagctgcaggggaagctgcaggtaccaccatccgaggagcaggccctgggtcgcctgacagccctgctgctccagcggtacccacgcctcacctcccagctcttcattgacctgtcaccactcatccctttcttggctgtctctgacctgatgcgcttcccaccatccctgttagccaacgacagtgtacagcagggctacagagggtcagaggaaaacagtttggaggaagacaaagggttaagacccatgactcctcgcagcctggctgccatccgggattacagcccaggaatgaggcctgaacagaaggaggctctggcaaagcgactgctggcccctgaactgtttggggaagtgcctgcctggccccaggagctgctgtgggcagtgctgcccctgctcccccacctccctctggagaactttttgcagctcagccctcaccagatccaggccctggaggatagctggccagcagcaggtctggggccagggcatgcccgccatgtgctgcgcagcctggtaaaccagagtgtccaggatggtgaggagcaggtacgcaggcttgggcccctcgcctgtttcctgagccctgaggagctgcagagcctagtgcccctgagtgatccaacggggccagtagaacgggggctgctggaatgtgcagccaatgggaccctcagcccagaaggacgggtggcatatgaacttctgggtgtgttgcgctcatctggaggagcggtgctgagcccccgggagctgcgggtctgggcccctctcttctctcagctgggcctccgcttccttcaggagctgtcagagccccagcttagagccatgcttcctgtcctgcagggaactagtgttacacctgctcaggctgtcctgctgcttggacggctccttcctaggcacgatctgctacaactggattccttggctcttctggcaaatcgaagacgctactgggagctgccctggtctgagcagcaggcacagtttctctggaagaagatgcaagtacccaccaaccttaccctcaggaatctgcaggctctgggcaccctggcaggaggcatgtcctgtgagtttctgcagcagatcaactccatggtagacttccttgaagtggtgcacatgatctatcagctgcccactagagttcgagggagcctgagggcctgtatctgggcagagctacagcggaggatggcaatgccagaaccagaatggacaactgtagggccagaactgaacgggctggatagcaagctactcctggacttaccgatccagttgatggacagactatccaatgaatccattatgttggtggtggagctggtgcaaagagctccagagcagctgctggcactgacccccctccaccaggcagccctggcagagagggcactacaaaacctggctccaaaggagactccagtctcaggggaagtgctggagaccttaggccctttggttggattcctggggacagagagcacacgacagatccccctacagatcctgctgtcccatctcagtcagctgcaaggcttctgcctaggagagacatttgccacagagctgggatggctgctattgcaggagtctgttcttgggaaaccagagttgtggagccaggatgaagtagagcaagctggacgcctagtattcactctgtctactgaggcaatttccttgatccccagggaggccttgggtccagagaccctggagcggcttctagaaaagcagcagagctgggagcagagcagagttggacagctgtgtagggagccacagcttgctgccaagaaagcagccctggtagcaggggtggtgcgaccagctgctgaggatcttccagaacctgtgccaaattgtgcagatgtacgagggacattcccagcagcctggtctgcaacccagattgcagagatggagctctcagactttgaggactgcctgacattatttgcaggagacccaggacttgggcctgaggaactgcgggcagccatgggcaaagcaaaacagttgtggggtcccccccggggatttcgtcctgagcagatcctgcagcttggtaggctcttaataggtctaggagatcgggaactacaggagctgatcctagtggactggggagtgctgagcaccctggggcagatagatggctggagcaccactcagctccgcattgtggtctccagtttcctacggcagagtggtcggcatgtgagccacctggacttcgttcatctgacagcgctgggttatactctctgtggactgcggccagaggagctccagcacatcagcagttgggagttcagccaagcagctctcttcctcggcaccctgcatctccagtgctctgaggaacaactggaggttctggcccacctacttgtactgcctggtgggtttggcccaatcagtaactgggggcctgagatcttcactgaaattggcaccatagcagctgggatcccagacctggctctttcagcactgctgcggggacagatccagggcgttactcctcttgccatttctgtcatccctcctcctaaatttgctgtggtgtttagtcccatccaactatctagtctcaccagtgctcaggctgtggctgtcactcctgagcaaatggcctttctgagtcctgagcagcgacgagcagttgcatgggcccaacatgagggaaaggagagcccagaacagcaaggtcgaagtacagcctggggcctccaggactggtcacgaccttcctggtccctggtattgactatcagcttccttggccacctgctatgagcctgtctctacagtagaaggagattgtggggagagaaa

SEQ ID NO: 186793 - DNA, 5680 bp, Homo sapiens
  Payload ID: 16779
  Gene Symbol: STRC
  Gene Name: stereocilin
  Uniprot ID: Q7RTU9
  ENST ID: ENST00000450892
  CDS Start-End: 79-5406
gccctgccctcacctggctatcccacacaggtgagaataaccagaactcacctccggtaccagtgttcacttggaaacatggctctcagcctctggcccctgctgctgctgctgctgctgctgctgctgctgtcctttgcagtgactctggcccctactgggcctcattccctggaccctggtctctccttcctgaagtcattgctctccactctggaccaggctccccagggctccctgagccgctcacggttctttacattcctggccaacatttcttcttcctttgagcctgggagaatgggggaaggaccagtaggagagcccccacctctccagccgcctgctctgcggctccatgattttctagtgacactgagaggtagccccgactgggagccaatgctagggctgctaggggatatgctggcactgctgggacaggagcagactccccgagatttcctggtgcaccaggcaggggtgctgggtggacttgtggaggtgctgctgggagccttagttcctgggggcccccctaccccaactcggcccccatgcacccgtgatgggccgtctgactgtgtcctggctgctgactggttgccttctctgctgctgttgttagagggcacacgctggcaagctctggtgcaggtgcagcccagtgtggaccccaccaatgccacaggcctcgatgggagggaggcagctcctcactttttgcagggtctgttgggtttgcttaccccaacaggggagctaggctccaaggaggctctttggggcggtctgctacgcacagtgggggcccccctctatgctgcctttcaggaggggctgctccgtgtcactcactccctgcaggatgaggtcttctccattttggggcagccagagcctgataccaatgggcagtgccagggaggtaaccttcaacagctgctcttatggggcgtccggcacaacctttcctgggatgtccaggcgctgggctttctgtctggatcaccacccccaccccctgccctccttcactgcctgagcacgggcgtgcctctgcccagagcttctcagccgtcagcccacatcagcccacgccaacggcgagccatcactgtggaggccctctgtgagaaccacttaggcccagcaccaccctacagcatttccaacttctccatccacttgctctgccagcacaccaagcctgccactccacagccccatcccagcaccactgccatctgccagacagctgtgtggtatgcagtgtcctgggcaccaggtgcccaaggctggctacaggcctgccacgaccagtttcctgatgagtttttggatgcgatctgcagtaacctctccttttcagccctgtctggctccaaccgccgcctggtgaagcggctctgtgctggcctgctcccaccccctaccagctgccctgaaggcctgccccctgttcccctcaccccagacatcttttggggctgcttcttggagaatgagactctgtgggctgagcgactgtgtggggaggcaagtctacaggctgtgccccccagcaaccaggcttgggtccagcatgtgtgccagggccccaccccagatgtcactgcctccccaccatgccacattggaccctgtggggaacgctgcccggatgggggcagcttcctggtgatggtctgtgccaatgacaccatgtatgaggtcctggtgcccttctggccttggctagcaggccaatgcaggataagtcgtgggggcaatgacacttgcttcctagaagggctgctgggcccccttctgccctctctgccaccactgggaccatccccactctgtctgacccctggccccttcctccttggcatgctatcccagttgccacgctgtcagtcctctgtcccagctcttgctcaccccacacgcctacactatctcctccgcctgctgaccttcctcttgggtccaggggctgggggcgctgaggcccaggggatgctgggtcgggccctactgctctccagtctcccagacaactgctccttctgggatgcctttcgcccagagggccggcgcagtgtgctacggacgattggggaatacctggaacaagatgaggagcagccaaccccatcaggctttgaacccactgtcaaccccagctctggtataagcaagatggagctgctggcctgctttagtcctgtgctgtgggatctgctccagagggaaaagagtgtttgggccctgcagattctagtgcaggcgtacctgcatatgcccccagaaaacctccagcagctggtgctttcagcagagagggaggctgcacagggcttcctgacactcatgctgcaggggaagctgcaggggaagctgcaggtaccaccatccgaggagcaggccctgggtcgcctgacagccctgctgctccagcggtacccacgcctcacctcccagctcttcattgacctgtcaccactcatccctttcttggctgtctctgacctgatgcgcttcccaccatccctgttagccaacgacagtgtcctggctgccatccgggattacagcccaggaatgaggcctgaacagaaggaggctctggcaaagcgactgctggcccctgaactgtttggggaagtgcctgcctggccccaggagctgctgtgggcagtgctgcccctgctcccccacctccctctggagaactttttgcagctcagccctcaccagatccaggccctggaggatagctggccagcagcaggtctggggccagggcatgcccgccatgtgctgcgcagcctggtaaaccagagtgtccaggatggtgaggagcaggtacgcaggcttgggcccctcgcctgtttcctgagccctgaggagctgcagagcctagtgcccctgagtgatccaacggggccagtagaacgggggctgctggaatgtgcagccaatgggaccctcagcccagaaggacgggtggcatatgaacttctgggtgtgttgcgctcatctggaggagcggtgctgagcccccgggagctgcgggtctgggcccctctcttctctcagctgggcctccgcttccttcaggagctgtcagagccccagcttagagccatgcttcctgtcctgcagggaactagtgttacacctgctcaggctgtcctgctgcttggacggctccttcctaggcacgatctatccctggaggaactctgctccttgcaccttctgctaccaggcctcagcccccagacactccaggccatccctaggcgagtcctggtcggggcttgttcctgcctggcccctgaactgtcacgcctctcagcctgccagaccgcagcactgctgcagacctttcgggttaaagatggtgttaaaaatatgggtacaacaggtgctggtccagctgtgtgtatccctggtcagcctattcccaccacctggccagactgcctgcttcccctgctcccattaaagctgctacaactggattccttggctcttctggcaaatcgaagacgctactgggagctgccctggtctgagcagcaggcacagtttctctggaagaagatgcaagtacccaccaaccttaccctcaggaatctgcaggctctgggcaccctggcaggaggcatgtcctgtgagtttctgcagcagatcaactccatggtagacttccttgaagtggtgcacatgatctatcagctgcccactagagttcgagggagcctgagggcctgtatctgggcagagctacagcggaggatggcaatgccagaaccagaatggacaactgtagggccagaactgaacgggctggatagcaagctactcctggacttaccgatccagttgatggacagactatccaatgaatccattatgttggtggtggagctggtgcaaagagctccagagcagctgctggcactgacccccctccaccaggcagccctggcagagagggcactacaaaacctggctccaaaggagactccagtctcaggggaagtgctggagaccttaggccctttggttggattcctggggacagagagcacacgacagatccccctacagatcctgctgtcccatctcagtcagctgcaaggcttctgcctaggagagacatttgccacagagctgggatggctgctattgcaggagtctgttcttgggaaaccagagttgtggagccaggatgaagtagagcaagctggacgcctagtattcactctgtctactgaggcaatttccttgatccccagggaggccttgggtccagagaccctggagcggcttctagaaaagcagcagagctgggagcagagcagagttggacagctgtgtagggagccacagcttgctgccaagaaagcagccctggtagcaggggtggtgcgaccagctgctgaggatcttccagaacctgtgccaaattgtgcagatgtacgagggacattcccagcagcctggtctgcaacccagattgcagagatggagctctcagactttgaggactgcctgacattatttgcaggagacccaggacttgggcctgaggaactgcgggcagccatgggcaaagcaaaacagttgtggggtcccccccggggatttcgtcctgagcagatcctgcagcttggtaggctcttaataggtctaggagatcgggaactacaggagctgatcctagtggactggggagtgctgagcaccctggggcagatagatggctggagcaccactcagctccgcattgtggtctccagtttcctacggcagagtggtcggcatgtgagccacctggacttcgttcatctgacagcgctgggttatactctctgtggactgcggccagaggagctccagcacatcagcagttgggagttcagccaagcagctctcttcctcggcaccctgcatctccagtgctctgaggaacaactggaggttctggcccacctacttgtactgcctggtgggtttggcccaatcagtaactgggggcctgagatcttcactgaaattggcaccatagcagctgggatcccagacctggctctttcagcactgctgcggggacagatccagggcgttactcctcttgccatttctgtcatccctcctcctaaatttgctgtggtgtttagtcccatccaactatctagtctcaccagtgctcaggctgtggctgtcactcctgagcaaatggcctttctgagtcctgagcagcgacgagcagttgcatgggcccaacatgagggaaaggagagcccagaacagcaaggtcgaagtacagcctggggcctccaggactggtcacgaccttcctggtccctggtattgactatcagcttccttggccacctgctatgagcctgtctctacagtagaaggagattgtggggagagaaatcttaagtcataatgaataaagtgcaaacagaagtgcatcctgattattttcagaagctgatgaggaatatgggtaaaatgttaatgctttccacccacctgagaatcagtgttcctgggttgccatatctggagtctctttccatcataaataatcccactgcctcttttcatttcctgaaggctgctccctcctcaccccaccattagaagtaacacagacagctgcagcata

SEQ ID NO: 186794 - DNA, 2259 bp, Homo sapiens
  Payload ID: 16779
  Gene Symbol: STRC
  Gene Name: stereocilin
  ENST ID: ENST00000432436
  CDS Start-End: 1-1992
acattcctggccaacatttcttcttcctttgagcctgggagaatgggggaaggaccagtaggagagcccccacctctccagccgcctgctctgcggctccatgattttctagtgacactgagaggtagccccgactgggagccaatgctagggctgctaggggatatgctggcactgctgggacaggagcagactccccgagatttcctggtgcaccaggcaggggtgctgggtggacttgtggaggtgctgctgggagccttagttcctgggggcccccctaccccaactcggcccccatgcacccgtgatgggccgtctgactgtgtcctggctgctgactggttgccttctctgctgctgttgttagagggcacacgctggcaagctctggtgcaggtgcagcccagtgtggaccccaccaatgccacaggcctcgatgggagggaggcagctcctcactttttgcagggtctgttgggtttgcttaccccaacaggggagctaggctccaaggaggctctttggggcggtctgctacgcacagtgggggcccccctctatgctgcctttcaggaggggctgctccgtgtcactcactccctgcaggatgaggtcttctccattttggggcagccagagcctgataccaatgggcagtgccagggaggtaaccttcaacagctgctcttatggggcgtccggcacaacctttcctgggatgtccaggcgctgggctttctgtctggatcaccacccccaccccctgccctccttcactgcctgagcacgggcgtgcctctgcccagagcttctcagccgtcagcccacatcagcccacgccaacggcgagccatcactgtggaggccctctgtgagaaccacttaggcccagcaccaccctacagcatttccaacttctccatccacttgctctgccagcacaccaagcctgccactccacagccccatcccagcaccactgccatctgccagacagctgtgtggtatgcagtgtcctgggcaccaggtgcccaaggctggctacaggcctgccacgaccagtttcctgatgagtttttggatgcgatctgcagtaacctctccttttcagccctgtctggctccaaccgccgcctggtgaagcggctctgtgctggcctgctcccaccccctaccagctgccctgaaggcctgccccctgttcccctcaccccagacatcttttggggctgcttcttggagaatgagactctgtgggctgagcgactgtgtggggaggcaagtctacaggctgtgccccccagcaaccaggcttgggtccagcatgtgtgccagggccccaccccagatgtcactgcctccccaccatgccacattggaccctgtggggaacgctgcccggatgggggcagcttcctggtgatggtctgtgccaatgacaccatgtatgaggtcctggtgcccttctggccttggctagcaggccaatgcaggataagtcgtgggggcaatgacacttgcttcctagaagggctgctgggcccccttctgccctctctgccaccactgggaccatccccactctgtctgacccctggccccttcctccttggcatgctatcccagttgccacgctgtcagtcctctgtcccagctcttgctcaccccacacgcctacactatctcctccgcctgctgaccttcctcttgggtccaggggctgggggcgctgaggcccaggggatgctgggtcgggccctactgctctccagtctcccagacaactgctccttctgggatgcctttcgcccagagggccggcgcagtgtgctacggacgattggggaatacctggaacaagatgaggagcagccaaccccatcaggctttgaacccactgtcaaccccagctctggtataagcaagatggagctgctggcctgctttagtgtgagtgctctgccagagggaaagctcctagaacagtgagaaggccctccaggggaattcctcgaatactcagaggcagtagtgtggggtagtagttgaagcacacagctctagagtcagacaggcttggattcatatcttggttctgtgaccagccttgaatgagttatttaacttctctgagcaatatttttctcgtctcatttataaactagggatgataatggtatatgagataatacatgctgtgggcttagcacagtgcatgatacacaaacatgcaataaatattaccttgttattctt

SEQ ID NO: 186795 - DNA, 5386 bp, Homo sapiens
  Payload ID: 16779
  Gene Symbol: STRC
  Gene Name: stereocilin
  ENST ID: ENST00000428650
  CDS Start-End: 77-2986
cctgccctcacctggctatcccacacaggtgagaataaccagaactcacctccggtaccagtgttcacttggaaacatggctctcagcctctggcccctgctgctgctgctgctgctgctgctgctgctgtcctttgcagtgactctggcccctactgggcctcattccctggaccctggtctctccttcctgaagtcattgctctccactctggaccaggctccccagggctccctgagccgctcacggttctttacattcctggccaacatttcttcttcctttgagcctgggagaatgggggaaggaccagtaggagagcccccacctctccagccgcctgctctgcggctccatgattttctagtgacactgagaggtagccccgactgggagccaatgctagggctgctaggggatatgctggcactgctgggacaggagcagactccccgagatttcctggtgcaccaggcaggggtgctgggtggacttgtggaggtgctgctgggagccttagttcctgggggcccccctaccccaactcggcccccatgcacccgtgatgggccgtctgactgtgtcctggctgctgactggttgccttctctgctgctgttgttagagggcacacgctggcaagctctggtgcaggtgcagcccagtgtggaccccaccaatgccacaggcctcgatgggagggaggcagctcctcactttttgcagggtctgttgggtttgcttaccccaacaggggagctaggctccaaggaggctctttggggcggtctgctacgcacagtgggggcccccctctatgctgcctttcaggaggggctgctccgtgtcactcactccctgcaggatgaggtcttctccattttggggcagccagagcctgataccaatgggcagtgccagggaggtaaccttcaacagctgctcttatggggcgtccggcacaacctttcctgggatgtccaggcgctgggctttctgtctggatcaccacccccaccccctgccctccttcactgcctgagcacgggcgtgcctctgcccagagcttctcagccgtcagcccacatcagcccacgccaacggcgagccatcactgtggaggccctctgtgagaaccacttaggcccagcaccaccctacagcatttccaacttctccatccacttgctctgccagcacaccaagcctgccactccacagccccatcccagcaccactgccatctgccagacagctgtgtggtatgcagtgtcctgggcaccaggtgcccaaggctggctacaggcctgccacgaccagtttcctgatgagtttttggatgcgatctgcagtaacctctccttttcagccctgtctggctccaaccgccgcctggtgaagcggctctgtgctggcctgctcccaccccctaccagctgccctgaaggcctgccccctgttcccctcaccccagacatcttttggggctgcttcttggagaatgagactctgtgggctgagcgactgtgtggggaggcaagtctacaggctgtgccccccagcaaccaggcttgggtccagcatgtgtgccagggccccaccccagatgtcactgcctccccaccatgccacattggaccctgtggggaacgctgcccggatgggggcagcttcctggtgatggtctgtgccaatgacaccatgtatgaggtcctggtgcccttctggccttggctagcaggccaatgcaggataagtcgtgggggcaatgacacttgcttcctagaagggctgctgggcccccttctgccctctctgccaccactgggaccatccccactctgtctgacccctggccccttcctccttggcatgctatcccagttgccacgctgtcagtcctctgtcccagctcttgctcaccccacacgcctacactatctcctccgcctgctgaccttcctcttgggtccaggggctgggggcgctgaggcccaggggatgctgggtcgggccctactgctctccagtctcccagacaactgctccttctgggatgcctttcgcccagagggccggcgcagtgtgctacggacgattggggaatacctggaacaagatgaggagcagccaaccccatcaggctttgaacccactgtcaaccccagctctggtataagcaagatggagctgctggcctgctttagtcctgtgctgtgggatctgctccagagggaaaagagtgtttgggccctgcagattctagtgcaggcgtacctgcatatgcccccagaaaacctccagcagctggtgctttcagcagagagggaggctgcacagggcttcctgacactcatgctgcaggggaagctgcaggggaagctgcaggtaccaccatccgaggagcaggccctgggtcgcctgacagccctgctgctccagcggtacccacgcctcacctcccagctcttcattgacctgtcaccactcatccctttcttggctgtctctgacctgatgcgcttcccaccatccctgttagccaacgacagtgtacagcagggctacagagggtcagaggaaaacagtttggaggaagacaaagggttaagacccatgactcctcgcagcctggctgccatccgggattacagcccaggaatgaggcctgaacagaaggaggctctggcaaagcgactgctggcccctgaactgtttggggaagtgcctgcctggccccaggagctgctgtgggcagtgctgcccctgctcccccacctccctctggagaactttttgcagctcagccctcaccagatccaggccctggaggatagctggccagcagcaggtctggggccagggcatgcccgccatgtgctgcgcagcctggtaaaccagagtgtccaggatggtgaggagcaggtacgcaggtggcatatgaacttctgggtgtgttgcgctcatctggaggagcggtgctgagcccccgggagctgcgggtctgggcccctctcttctctcagctgggcctccgcttccttcaggagctgtcagagccccagcttagagccatgcttcctgtcctgcagggaactagtgttacacctgctcaggctgtcctgctgcttggacggctccttcctaggcacgatctatccctggaggaactctgctccttgcaccttctgctaccaggcctcagcccccagacactccaggccatccctaggcgagtcctggtcggggcttgttcctgcctggcccctgaactgtcacgcctctcagcctgccagaccgcagcactgctgcagacctttcgggttaaagatggtgttaaaaatatgggtacaacaggtgctggtccagctgtgtgtatccctggtcagcctattcccaccacctggccagactgcctgcttcccctgctcccattaaagctgctacaactggattccttggctcttctggcaaatcgaagacgctactgggagctgccctggtctgagcagcaggcacagtttctctggaagaagatgcaagtacccaccaaccttaccctcaggaatctgcaggctctgggcaccctggcaggaggcatgtcctgtgagtttctgcagcagatcaactccatggtagacttccttgaagtggtgcacatgatctatcagctgcccactagagttcgagggagcctgagggcctgtatctgggcagagctacagcggaggatggcaatgccagaaccagaatggacaactgtagggccagaactgaacgggctggatagcaagctactcctggacttaccgatccagttgatggacagactatccaatgaatccattatgttggtggtggagctggtgcaaagagctccagagcagctgctggcactgacccccctccaccaggcagccctggcagagagggcactacaaaacctgattcctgtctacaaggcctggcccctgttttgcctctgggttctgttccttgataatatgcttcacgttacttgtccatacctcttggagtccgagaaatctcttggagtccacctctcagtctttctgcctgctcctatctgggctcattgcttaaggaagtgaacaaaggctccaaaggagactccagtctcaggggaagtgctggagaccttaggccctttggttggattcctggggacagagagcacacgacagatccccctacagatcctgctgtcccatctcagtcagctgcaaggcttctgcctaggagagacatttgccacagagctgggatggctgctattgcaggagtctgttcttgggaaaccagagttgtggagccaggatgaagtagagcaagctggacgcctagtattcactctgtctactgaggcaatttccttgatccccagggaggccttgggtccagagaccctggagcggcttctagaaaagcagcagagctgggagcagagcagagttggacagctgtgtagggagccacagcttgctgccaagaaagcagccctggtagcaggggtggtgcgaccagctgctgaggatcttccagttgtggggtcccccccggggatttcgtcctgagcagatcctgcagcttggtaggctcttaataggtctaggagatcgggaactacaggagctgatcctagtggactggggagtgctgagcaccctggggcagatagatggctggagcaccactcagctccgcattgtggtctccagtttcctacggcagagtggtcggcatgtgagccacctggacttcgttcatctgacagcgctgggttatactctctgtggactgcggccagaggagctccagcacatcagcagttgggagttcagccaagcagctctcttcctcggcaccctgcatctccagtgctctgaggaacaactggaggttctggcccacctacttgtactgcctggtgggtttggcccaatcagtaactgggggcctgagatcttcactgaaattggcaccatagcagctgggatcccagacctggctctttcagcactgctgcggggacagatccagggcgttactcctcttgccatttctgtcatccctcctcctaaatttgctgtggtgtttagtcccatccaactatctagtctcaccagtgctcaggctgtggctgtcactcctgagcaaatggcctttctgagtcctgagcagcgacgagcagttgcatgggcccaacatgagggaaaggagagcccagaacagcaaggtcgaagtacagcctggggcctccaggactggtcacgaccttcctggtccctggtattgactatcagcttccttggccacctgctatgagcctgtctctacagtagaaggagattgtggggagagaaa

SEQ ID NO: 186796 - DNA, 5305 bp, Homo sapiens
  Payload ID: 16779
  Gene Symbol: STRC
  Gene Name: stereocilin
  ENST ID: ENST00000541030
  CDS Start-End: 2188-5196
gccctgccctcacctggctatcccacacaggtgagaataaccagaactcacctccggtaccagtgttcacttggaaacatggctctcagcctctggcccctgctgctgctgctgctgctgctgctgctgctgtcctttgcagtgactctggcccctactgggcctcattccctggaccctggtctctccttcctgaagtcattgctctccactctggaccaggctccccagggctccctgagccgctcacggttctttacattcctggccaacatttcttcttcctttgagcctgggagaatgggggaaggaccagtaggagagcccccacctctccagccgcctgctctgcggctccatgattttctagtgacactgagaggtagccccgactgggagccaatgctagggctgctaggggatatgctggcactgctgggacaggagcagactccccgagatttcctggtgcaccaggcaggggtgctgggtggacttgtggaggtgctgctgggagccttagttcctgggggcccccctaccccaactcggcccccatgcacccgtgatgggccgtctgactgtgtcctggctgctgactggttgccttctctgctgctgttgttagagggcacacgctggcaagctctggtgcaggtgcagcccagtgtggaccccaccaatgccacaggcctcgatgggagggaggcagctcctcactttttgcagggtctgttgggtttgcttaccccaacaggggagctaggctccaaggaggctctttggggcggtctgctacgcacagtgggggcccccctctatgctgcctttcaggaggggctgctccgtgtcactcactccctgcaggatgaggtcttctccattttggggcagccagagcctgataccaatgggcagtgccagggaggtaaccttcaacagctgctcttatggggcgtccggcacaacctttcctgggatgtccaggcgctgggctttctgtctggatcaccacccccaccccctgccctccttcactgcctgagcacgggcgtgcctctgcccagagcttctcagccgtcagcccacatcagcccacgccaacggcgagccatcactgtggaggccctctgtgagaaccacttaggcccagcaccaccctacagcatttccaacttctccatccacttgctctgccagcacaccaagcctgccactccacagccccatcccagcaccactgccatctgccagacagctgtgtggtatgcagtgtcctgggcaccaggtgcccaaggctggctacaggcctgccacgaccagtttcctgatgagtttttggatgcgatctgcagtaacctctccttttcagccctgtctggctccaaccgccgcctggtgaagcggctctgtgctggcctgctcccaccccctaccagctgccctgaaggcctgccccctgttcccctcaccccagacatcttttggggctgcttcttggagaatgagactctgtgggctgagcgactgtgtggggaggcaagtctacaggctgtgccccccagcaaccaggcttgggtccagcatgtgtgccagggccccaccccagatgtcactgcctccccaccatgccacattggaccctgtggggaacgctgcccggatgggggcagcttcctggtgatggtctgtgccaatgacaccatgtatgaggtcctggtgcccttctggccttggctagcaggccaatgcaggataagtcgtgggggcaatgacacttgcttcctagaagggctgctgggcccccttctgccctctctgccaccactgggaccatccccactctgtctgacccctggccccttcctccttggcatgctatcccagttgccacgctgtcagtcctctgtcccagctcttgctcaccccacacgcctacactatctcctccgcctgctgaccttcctcttgggtccaggggctgggggcgctgaggcccaggggatgctgggtcgggccctactgctctccagtctcccagacaactgctccttctgggatgcctttcgcccagagggccggcgcagtgtgctacggacgattggggaatacctggaacaagatgaggagcagccaaccccatcaggctttgaacccactgtcaaccccagctctggtataagcaagatggagctgctggcctgctttagtcctgtgctgtgggatctgctccagagggaaaagagtgtttgggccctgcagattctagtgcaggcgtacctgcatatgcccccagaaaacctccagcagctggtgctttcagcagagagggaggctgcacagggcttcctgacactcatgctgcaggggaagctgcaggggaagctgcaggtaccaccatccgaggagcaggccctgggtcgcctgacagccctgctgctccagcggtacccacgcctcacctcccagctcttcattgacctgtcaccactcatccctttcttggctgtctctgacctgatgcgcttcccaccatccctgttagccaacgacagtgtacagcagggctacagagggtcagaggaaaacagtttggaggaagacaaagggttaagacccatgactcctcgcagcctggctgccatccgggattacagcccaggaatgaggcctgaacagaaggaggctctggcaaagcgactgctggcccctgaactgtttggggaagtgcctgcctggccccaggagctgctgtgggcagtgctgcccctgctcccccacctccctctggagaactttttgcagctcagccctcaccagatccaggccctggaggatagctggccagcagcaggtctggggccagggcatgcccgccatgtgctgcgcagcctggtaaaccagagtgtccaggatggtgaggagcaggtacgcaggcttgggcccctcgcctgtttcctgagccctgaggagctgcagagcctagtgcccctgagtgatccaacggggccagtagaacgggggctgctggaatgtgcagccaatgggaccctcagcccagaaggacgggtggcatatgaacttctgggtgtgttgcgctcatctggaggagcggtgctgagcccccgggagctgcgggtctgggcccctctcttctctcagctgggcctccgcttccttcaggagctgtcagagccccagcttagagccatgcttcctgtcctgcagggaactagtgttacacctgctcaggctgtcctgctgcttggacggctccttcctaggcacgatctgctacaactggattccttggctcttctggcaaatcgaagacgctactgggagctgccctggtctgagcagcaggcacagtttctctggaagaagatgcaagtacccaccaaccttaccctcaggaatctgcaggctctgggcaccctggcaggaggcatgtcctgtgagtttctgcagcagatcaactccatggtagacttccttgaagtggtgcacatgatctatcagctgcccactagagttcgagggagcctgagggcctgtatctgggcagagctacagcggaggatggcaatgccagaaccagaatggacaactgtagggccagaactgaacgggctggatagcaagctactcctggacttaccgatccagttgatggacagactatccaatgaatccattatgttggtggtggagctggtgcaaagagctccagagcagctgctggcactgacccccctccaccaggcagccctggcagagagggcactacaaaacctggctccaaaggagactccagtctcaggggaagtgctggagaccttaggccctttggttggattcctggggacagagagcacacgacagatccccctacagatcctgctgtcccatctcagtcagctgcaaggcttctgcctaggagagacatttgccacagagctgggatggctgctattgcaggagtctgttcttgggaaaccagagttgtggagccaggatgaagtagagcaagctggacgcctagtattcactctgtctactgaggcaatttccttgatccccagggaggccttgggtccagagaccctggagcggcttctagaaaagcagcagagctgggagcagagcagagttggacagctgtgtagggagccacagcttgctgccaagaaagcagccctggtagcaggggtggtgcgaccagctgctgaggatcttccagaacctgtgccaaattgtgcagatgtacgagggacattcccagcagcctggtctgcaacccagattgcagagatggagctctcagactttgaggactgcctgacattatttgcaggagacccaggacttgggcctgaggaactgcgggcagccatgggcaaagcaaaacagttgtggggtcccccccggggatttcgtcctgagcagatcctgcagcttggtaggctcttaataggtctaggagatcgggaactacaggagctgatcctagtggactggggagtgctgagcaccctggggcagatagatggctggagcaccactcagctccgcattgtggtctccagtttcctacggcagagtggtcggcatgtgagccacctggacttcgttcatctgacagcgctgggttatactctctgtggactgcggccagaggagctccagcacatcagcagttgggagttcagccaagcagctctcttcctcggcaccctgcatctccagtgctctgaggaacaactggaggttctggcccacctacttgtactgcctggtgggtttggcccaatcagtaactgggggcctgagatcttcactgaaattggcaccatagcagctgggatcccagacctggctctttcagcactgctgcggggacagatccagggcgttactcctcttgccatttctgtcatccctcctcctaaatttgctgtggtgtttagtcccatccaactatctagtctcaccagtgctcaggctgtggctgtcactcctgagcaaatggcctttctgagtcctgagcagcgacgagcagttgcatgggcccaacatgagggaaaggagagcccagaacagcaaggtcgaagtacagcctggggcctccaggactggtcacgaccttcctggtccctggtattgactatcagcttccttggccacctgctatgagcctgtctctacagtagaaggagattgtggggagagaaatcttaagtcataatgaataaagtgcaaacagaagtgcatcctgattattttcagaagctgatgaggaata

SEQ ID NO: 186797 - DNA, 1113 bp, Homo sapiens
  Payload ID: 16780
  Gene Symbol: SARM1
  Gene Name: sterile alpha and TIR motif containing 1
  ENST ID: ENST00000579593
  CDS Start-End: 1-323
tggccagtctcctgaaggtgcacctgcagctgcatggcttcagtgtcttcattgatgtggagaagctggaagcaggcaagttcgaggacaaactcatccagagtgtcatgggtgcccgcaactttgtgttggtgctatcacctggagcactggacaagtgcatgcaagaccatgactgcaaggattgggtgcataaggagattgtgactgctttaagctgcggcaagaacattgtgcccatcattgatggcttcgagtggcctgagccccaggtcctgcctgaggacatgcaggctgtgcttactttcaacggtatcaagtgagccccagggccctgggaccaggggggtagggtacaaatcaccatgacaggcagagtgtgggcaaacagctgactagcagctccctctgcccagctgtctgaaccacattggctcctgtgcccacaggtggtcccacgaataccaggaggccaccattgagaagatcatccgcttcctgcagggccgctcctcccgggactcatctgcaggctctgacaccagtttggagggtgctgcacccatgggtccaacctaaccagtccccagttccccagccctgctgtgacttccatttccatcgtcctttctgaaggaacagctcctgaaaccagtctccctgggctgagacaacctgggctcttcttaggaaatggctctccctccccctgtcccccaccctcatggcccacctccaacccactttcctcagtatctggagagggaagggaagtcaggcttgggcacgggaggttagaactcccccaggccctgccattgggttgtctgtctccgtcatggggagggtccctgctcagttctggagacactggagttggggtgggggtggttctgcattcccttctcctgctgatagcagtcagcttgaggaggatgacggaaggcagcctcagacaggaattaaggcaatgcccaggcgggcctgggcactgtattctgagcaagggcctgggcccaggagccagccagggatgagtgccatcatggctctccactcagactgtgcctggcccctgcacttacaacttcctgccgctctgtggccttgccc

SEQ ID NO: 186798 - DNA, 897 bp, Homo sapiens
  Payload ID: 16780
  Gene Symbol: SARM1
  Gene Name: sterile alpha and TIR motif containing 1
  ENST ID: ENST00000578128
  CDS Start-End: 1-772
caacctggcggactggctgggcagcctggacccgcgcttccgccagtacacctacggcctggtcagctgcggcctggaccgctccctgctgcaccgcgtgtctgagcagcagctgctggaagactgcggcatccacctgggcgtgcaccgcgcccgcatcctcacggcggccagagtgagtgatgcggaggggccaccttcaccatgctgcctattgcccacttcagaaatgctacactccccgctgccctgtactggtggcaaacccagtggggacactccagatgtcttcatcagctaccgccggaactcaggttcccagctggccagtctcctgaaggtgcacctgcagctgcatggcttcagtgtcttcattgatgtggagaagctggaagcaggcaagttcgaggacaaactcatccagagtgtcatgggtgcccgcaactttgtgttggtgctatcacctggagcactggacaagtgcatgcaagaccatgactgcaaggattgggtgcataaggagattgtgactgctttaagctgcggcaagaacattgtgcccatcattgatggcttcgagtggcctgagccccaggtcctgcctgaggacatgcaggctgtgcttactttcaacggtatcaagtggtcccacgaataccaggaggccaccattgagaagatcatccgcttcctgcagggccgctcctcccgggactcatctgcaggctctgacaccagtttggagggtgctgcacccatgggtccaacctaaccagtccccagttccccagccctgctgtgacttccatttccatcgtcctttctgaaggaacagctcctgaaaccagtctccctgggctgagacaacctgggctcttcttaggaaatggctctccc

SEQ ID NO: 186799 - DNA, 563 bp, Homo sapiens
  Payload ID: 16780
  Gene Symbol: SARM1
  Gene Name: sterile alpha and TIR motif containing 1
  ENST ID: ENST00000582323
  CDS Start-End: 1-355
actcctcccccaggagcagcaggtggatggcgacctgcttctgcggctcacggaggaggaactccagaccgacctgggcatgaaatcgggcatcacccgcaagaggttctttagggagctcacggagctcaagaccttcgccaactattctacgtgcgaccgcagcaacctggcggactggctgggcagcctggacccgcgcttccgccagtacacctacggcctggtcagctgcggcctggaccgctccctgctgcaccgcgtgtctgagcagcagctgctggaagactgcggcatccacctgggcgtgcaccgcgcccgcatcctcacggcggccagagcaattacagactaagcacccacaagacacaagggactgagctttggctgcattcttatgcttcaaccaaagcagaaatgctacactccccgctgccctgtactggtggcaaacccagtggggacactccagatgtcttcatcagctaccgccggaactcaggttcccagctggccagtctcctgaaggtgcacctgcagctgcatggcttcagtgtcttcat

SEQ ID NO: 186800 - DNA, 10309 bp, Homo sapiens
  Payload ID: 16780
  Gene Symbol: SARM1
  Gene Name: sterile alpha and TIR motif containing 1
  Uniprot ID: Q6SZW1
  ENST ID: ENST00000585482
  CDS Start-End: 372-2546
gctgctcctccggggcgtggctgctgccgagcatctcccagctcagccgagcccgtgcccaggccacgctttgttccagccgccgcctcctctaccctacggcgtccggagccatccctcgcctgctcgctctctcctttcgcccactccctgcatctgggcctgcatcacctttgccaaccgctcccccgatcctgccgacactcctcccccaaacttctgaccggcacccttgcctggtacccttctctccattcctccccctccatcttctttccccgacccctctcgggtccctcttttcccaaaacccgggtctctccgcgtggccccgcctccaggccggggatgtcccccgcggccccgcgcccatggtcctgacgctgcttctctccgcctacaagctgtgtcgcttcttcgccatgtcgggcccacggccgggcgccgagcggctggcggtgcctgggccagatgggggcggtggcacgggcccatggtgggctgcgggtggccgcgggccccgcgaagtgtcgccgggggcaggcaccgaggtgcaggacgccctggagcgcgcgctgccggagctgcagcaggccttgtccgcgctgaagcaggcgggcggcgcgcgggccgtgggcgccggcctggccgaggtcttccaactggtggaggaggcctggctgctgccggccgtgggccgcgaggtagcccagggtctgtgcgacgccatccgcctcgatggcggcctcgacctgctgttgcggctgctgcaggcgccggagttggagacgcgtgtgcaggccgcgcgcctgctggagcagatcctggtggctgagaaccgagaccgcgtggcgcgcattgggctgggcgtgatcctgaacctggcgaaggaacgcgaacccgtagagctggcgcggagcgtggcaggcatcttggagcacatgttcaagcattcggaggagacatgccagaggctggtggcggccggcggcctggacgcggtgctgtattggtgccgccgcacggaccccgcgctgctgcgccactgcgcgctggcgctgggcaactgcgcgctgcacgggggccaggcggtgcagcgacgcatggtagagaagcgcgcagccgagtggctcttcccgctcgccttctccaaggaggacgagctgcttcggctgcacgcctgcctcgcagtagcggtgttggcgactaacaaggaggtggagcgcgaggtggagcgctcgggcacgctggcgctcgtggagccgcttgtggcctcgctggaccctggccgcttcgcccgctgtctggtggacgccagcgacacaagccagggccgcgggcccgacgacctgcagcgcctcgtgccgttgctcgactctaaccgcttggaggcgcagtgcatcggggctttctacctctgcgccgaggctgccatcaagagcctgcaaggcaagaccaaggtgttcagcgacatcggcgccatccagagcctgaaacgcctggtttcctactctaccaatggcactaagtcggcgctggccaagcgcgcgctgcgcctgctgggcgaggaggtgccacggcccatcctgccctccgtgcccagctggaaggaggccgaggttcagacgtggctgcagcagatcggtttctccaagtactgcgagagcttccgggagcagcaggtggatggcgacctgcttctgcggctcacggaggaggaactccagaccgacctgggcatgaaatcgggcatcacccgcaagaggttctttagggagctcacggagctcaagaccttcgccaactattctacgtgcgaccgcagcaacctggcggactggctgggcagcctggacccgcgcttccgccagtacacctacggcctggtcagctgcggcctggaccgctccctgctgcaccgcgtgtctgagcagcagctgctggaagactgcggcatccacctgggcgtgcaccgcgcccgcatcctcacggcggccagagaaatgctacactccccgctgccctgtactggtggcaaacccagtggggacactccagatgtcttcatcagctaccgccggaactcaggttcccagctggccagtctcctgaaggtgcacctgcagctgcatggcttcagtgtcttcattgatgtggagaagctggaagcaggcaagttcgaggacaaactcatccagagtgtcatgggtgcccgcaactttgtgttggtgctatcacctggagcactggacaagtgcatgcaagaccatgactgcaaggattgggtgcataaggagattgtgactgctttaagctgcggcaagaacattgtgcccatcattgatggcttcgagtggcctgagccccaggtcctgcctgaggacatgcaggctgtgcttactttcaacggtatcaagtggtcccacgaataccaggaggccaccattgagaagatcatccgcttcctgcagggccgctcctcccgggactcatctgcaggctctgacaccagtttggagggtgctgcacccatgggtccaacctaaccagtccccagttccccagccctgctgtgacttccatttccatcgtcctttctgaaggaacagctcctgaaaccagtctccctgggctgagacaacctgggctcttcttaggaaatggctctccctccccctgtcccccaccctcatggcccacctccaacccactttcctcagtatctggagagggaagggaagtcaggcttgggcacgggaggttagaactcccccaggccctgccattgggttgtctgtctccgtcatggggagggtccctgctcagttctggagacactggagttggggtgggggtggttctgcattcccttctcctgctgatagcagtcagcttgaggaggatgacggaaggcagcctcagacaggaattaaggcaatgcccaggcgggcctgggcactgtattctgagcaagggcctgggcccaggagccagccagggatgagtgccatcatggctctccactcagactgtgcctggcccctgcacttacaacttcctgccgctctgtggccttgccctgtaatcactcagtgcccttagctagcctgactaagtcccagatcccctacagcttccttcggtgtggtatcttttgccacatccagggcgagggttgaggcaaaccagccctccctctgacttccttgtcactgcagccagctttgctgcacttgctggtgcacaggagcctcctgtttgggcctgggtctgggcatggggaggccgtgcctcaaagcccaccctaccccatgccttggtgctgtgcctcaggctccttcctggtctggcccagctggcttccccagcccctcagccatccagggctacccactgcttactcagggaccaggcagcccccatggcagtaaaagcagcctagacagaacctgcagctctgtggaaagaggcaaagtcctgaaaaggcaaagggttgtcacttagggcagcttctccaactttaacatgcatccaagtcacctgggaatgttgttaaaatcaggagatctggggtggggcctaggactctgcatttcttacagattcccaggtgagctgatgctggtggttaagggtagcaaatctctaaagcacgaagccctcacaaatctttgccatttcccaaacactccgctccatggtctccagtcatcagagcaactctacctggtattatcatccccattttacagataatgacactgaggctcagaaaggttgaggataagcccactttcctgtcattagtggcagccccagatccagacctaggcctcctggcacccagtccactggcagtggaattgctttcctgagaatcattctgaggctgggctattgcttctcccttgcttcaaagaatctagcagcgggggataggattttgcaacaaaaagctgacccagaggccatacagagcaggaatatcccattgccccctcctccactgggttcagagggtaagaaagcaccctccaataaacccaggctccaggccgtgggggctgctgaaggctctttccccgcaagggccaggtgttgacaccttaaagctggctgcgcccccagccccactcttggctgtgctggccaggtgactcctagttcttggccacatcatcagaaagtcaaaggtctcactccaggtttggggctccttccttccactcccctccctgccagagtctgtcttggccagtgccagcctcgatgctttggttttgaccccacctgatcctcctttcctcatgcagcacaagtgctcaccggggccagagccagggcatggatatgacaagcagggcagcctggacactgccctcacaggacagcgccaataacaatacagtgtctgagtatctccaggggatgatttctggctctttgtctccaatcagtcccactccctcctgaggtccccaagggcagtattcagagaggtttcctgcgttttatttctatttggtataccctccactgttgtccactgccctgtgtggccttctggttgacctctgcccgatcttctgtctctctgagggaatcagagtccagcatccagccccagctggaacagctgaagtcacaagcctcctctaagccaaggccagtgtgttcagaggtgactgccacccatactaggacaaacacagctcagatcaccaggtcaagcacctaggcctggcttctcctgagacagaggactcagaagtggcctttcctccaaagcctgctcagacacaggtctgtagggccagggtgttctgcttggctgggctgcagctgctacccctcggttggggctgagtcagccagatcctccccctacttctccccaagggccaagaactgctcagggacattaaaggtcaaaagtccagccacactcattcatcctttccccaggcccatgaagagaggcatctcattgtagaatgtatgaggaagtgggaagtatctcagagaatcagctaagtttcctaacttgtccatccaaatgtgatcaccacgattcaacaatttggggcattgctgatctagccgttcctagtggggcttgctcaaggttgcacagcgagtcagtagaagccctggctggccccacttggtaccaatccaccaggcagctcagggctcctgcccagcccagcagcttctgttgtctaacgtatggcaggcagactgggagcaggaaaacagagggccccaaagcccaaggcaccagaaggtttgtttcagtttgctgaagctgatttgtaatgattggcactcttcagccaggggagtgggtaggccatagccaaggatcgattccccaaccacagcaaaggcaacactcttcctccagagatcaccaagcccctcttacctccctccctccttcccaaggctggcactaaccaggtaccacattcattgttaaggaatggctgatgactgctacacgtgttgggaacctggttggggctgtgcagtttgggctggaaggagagatgccagccctcgtgctgcctctggtccctgaagtgtcacctctctcaggacctctcctctggcctgtggggttataagtgatggatagcagaaagggagaactgactcctgtcccaaatagctcctctgccacctgtcctgcagtgggcctgtgtgggttatgattctagatcctagacagaggctgggtcagctgtggatggggtggtgccttggtctctcttgactacctcgtccaaagagagcactgcccttagacaagagttgcttgtcctgctgtgggctgggcttccagctgcagacctccagttgcttggtgttcactttgctcctcttgccctctgtcttctggtccaggcagatcaggggctctggggaaactgctggaactcgaggtgaggatcagccttttccagcatcctgtgagagaccagagagagagtttggatttcatgtggggaaccctcaaggcctgtctggagaagtgacacaggatttactggggtgggctggtccaggtagctctcctgaacctcctccttccccaagctgagaagctgagagctggaggacaatatccagggacatggctctggaaaataacttttttttttttaagagacagggtcttgctctgttgtccaggctggagggcagtgacataatcatagctcactgtacccttgaactcctgggctcaagtgatcctcctgcctcagcctccttagtagctgggactaccagtgcataccaccatgcctgggtgattttttaaattttttatacagacaaggtcttgctatgttgcccaggctgatcttgaattcccgggctcaagtggtcctcctgcctcagcctcccacaggatcgggattacaggcaagagcctccacgcccggccatgaaatataattcttaatatcatacaggaaaaagtcagcgggtcaagctagcctgtggcccagccacaactagctgacaaagcttcctggccttccctttaacacagttctgctgccatagttccatctataaaatgggaatggagggaaataggggaactgggagagagaacacagccttgccaagcagcaatgttagcctgatccttcctccacctagctcgccatctcgcccttggaaaatggctcctggaggattaggcagccatctgcaaggagaggggcaacctgggacaagacacccagagggtaaggattccaggaatgaagctgccatttctggttgggaggagaagaggaaacttttaagagaaagggctccattatgagcatgggttcagggccctgcattacccaatcagaacagccgggatgagcaggaggccagctcccaggaggaaggggaaccccttcataaagttcagagtggctgggtagagtgagttgaagatgccggaggccgtcagcatggccaggctattcacacaggccacagcagaaaagagagcacctgtgaagaaataaataccatactctggagtccgaaagggccatattccaactctggcaccaccacctcacagctgtgtgaccgggagtagtcacttaacctatgtctccccttcctcaccagtaaatcctgctacatcatgtactgtgacaaggattcagtaaggtcatatgtggacagtagctggcacagaggggctactaaacaaatggctgctattaaatccacattaaaagtacatgtgatctgacagaacccagcacataaaagaaaaaaaaagtacatgtgatattgtctgatgaaagcttgatggaaatggcttttttctggtttatcctctttggaatcatctcctgtttgggattaactgctggtctgatcagttccaatattcatagcggtgtcaccactgaatagcttcttatcctttgggttcctgttcctccttctgctaaataaggataatacctatttcctagattgtgagcaacattaagttcacatggaaatcacccatcactgggcctggtcccctggaagtagctagttagtaagggctgttcttttctcctgtttctcttgacatctctgggcacagagaaagtgctgggaaaaaaagtttaggtgaatgaatgaagacacatggattctggggacaccagaacccacagtgggctctgtatggcaccagagtctctgtcatcatcagatcctcattccaggacagatggaaaaagatgaatgtttccagactggggcataaagacccagaggctggagaagctgttctttatagatataccaggagaacccacagtttacaaaatgtgcaacaacccaacagaagttgagattaaattctgtcacatctagaggggtctgtgatgtcatcaaaagcaaaccacccacatcacagatgaagaaacaggcctgtggcagggctcggactaaaacccagatcctgagaccagctgcttttaaacacagacgtaggtttgcatcctagctccaccatttactgagtaaccttgggtgagccaatgtaaccccctgggtctctgtttctttatctgtcaactgtggaaaatgaaacccatgtcacaaggttgttcacttctgggcttgtacacgctgaccccagagaaacagggaactctggcatcaccacacccatcttacagacggaaaagctgaggtctgcagagagtaaatcctctgctctggttatctagaaagaacataattgtgctctgctgactgcaaatcccaactctgcggtttgaaaatccaaggtggcatgatcctctgcccattgtgggcaatttcacagaaatgtgtttgttttggccacttacttctccagggtgagaggggggaaggcaagctgttcccccagccatggctgcccatcagcccgtttcgggcagcactggacatgaggaaccagacacaggtgggttctgacactcaccctgctctgtctctctcaccagcttggagagtttagcccggatgacaggtgtgatgactaatgacaggaaaagcaacccatatcctgtggagaaacaaacactcatcaggaaaatggggctggggagaggggcgtccaagggaaaggcagcagagctcctatccataccccacgtggggcttaggttagacccaggaagaacttccttgatggtgagggtgggaagacagtagtcaaggaggaatggagactgcccttgtctgggcttggccacctgctagctctcatgaatgaatgctaattcccattgattgctttcttgtctgaacctcttgtggtcacagcaggcatcacccacccacttggcacttagtagggatatggcagggcacagaaaacaagcatgggctttggagtcagccctgagttcaaaacctgatgccattacatattatctgtgtggcctggggtacttaccctctctgatcctgactccctgtatgaggaagataataaggccttcatcacaggatggttctgaggcataggaggctgaataatggtgcccaatggcatcagattcatagccctggaacctgtaaatactaccttatttggaaaatgagtctatgcaggtgtgcagttaagcctcctgagagagcagagttatcctggattaggttgggccctaaatgccgtcacacatatctttataagaggaaagcagacggagatttggcaccgacagaattgagaaggcacaaagaggaggagagtcaatgtgagcacagaggcagagactggtgatggccgccccaagccaaggaatgccagcagccccagaagctggaagaaatgagaaacacgttctctcctggaggcttgcaagggagcactgcctgctgactgcttccattcagcccggtggtactgactttggacttctggcctccagaactgtgagagaatatgtttctgttgtgttaagcccccaagtttgtggtatgtcattacagcaatctcagggaaccaatacatgaggtaaaaaggtaacatctatgaagagcatggcatagggacacagcaaatgggagttccttttccctttgcattcagttacttacaggcttcctgttttcttcataaccatttctctccctgtgcgactgctgactcctcagcaaaactgcaaactcctacaggacagtggatcctccaaagaaggtatacgatgaggcatccagggaccctagcagtgtcaggcccctcaaatcccactctgttgagacctccccccgacccagagcaatgacagcatctttatcatctctgcatcccccagggccatcagcaggagggaaaggttcccttctgcttaattgtcagacaagcagttgagttaagaaatctgtgattattgtattgttgactatacacagcacattttagggctctatcaaaataaatctgtccctttaaaaaaagttaactaaagccgggcacggtggctcatgcctgtaatcccaacactttgggaggctgaggcaggcggatccttgagctcaggagttagagacctggactgggcaaaatggtgaggaccccatctctataaaaaatacaaaaattagcaaggtgtggtaatgtgcaccagtggtcccagctactagagaggccaaggtgggaggatcatctgggcccgggggatgaggctgcagtgagccatgatcgtgccactgcactctagcctgggtaacaaagcgagaccctgtctctaaatacatcaatcaaataaaaattttaaaaagttaa

SEQ ID NO: 186801 - DNA, 750 bp, Homo sapiens
  Payload ID: 16781
  Gene Symbol: SAMD1
  Gene Name: sterile alpha motif domain containing 1
  ENST ID: ENST00000269724
  CDS Start-End: 364-750
cccgcccccgccccgggccaactccgcggcgcctccttaaaaagcgcgcgggagttgtaagggggggccggagcgagccggagtgagcgagagcgcaggagaggtggagaagagcgagtacttgagaaagaagaggaagaagatgatgatgaagatgaagatgaagaagatgatgtgtcagagggctctgaagtgcccgagagtgaccgtcctgcaggtgcccagcaccaccagcttaacggcgagcggggacctcagagtgccaaggagagggtcaaggagtggaccccctgcggaccgcaccagggccaggatgaagggcgggggccagccccgggcagcggcacccgccaggtgttctccatggcagccatgaacaaggaagggggaacagcttctgttgccaccgggccagactccccgtcccccgtgcctttgcccccaggcaaaccagccctacctggggccgacgggaccccctttggctgtcctcccgggcgcaaagagaagccatctgatcccgtcgagtggaccgtgatggatgtcgtcgaatattttactgaggctggattcccggagcaggcgacagctttccaagagcaggaaattgatggcaaatctttgctgctcatgcagcgcacagatgtgctcaccggcctgtccatccgcctcgggccagccctgaaaatctacgagcaccacatcaaggtgcttcagcaaggccactttgaggatgatgaccccgatggc

SEQ ID NO: 186802 - DNA, 2164 bp, Homo sapiens
  Payload ID: 16781
  Gene Symbol: SAMD1
  Gene Name: sterile alpha motif domain containing 1
  ENST ID: ENST00000533683
  CDS Start-End: 289-1587
ggtctgtgtgtgcgtgcgtgcgagtgagtgagtgtgtgcatatttttttctctcttttctttctctctcactgttttttcctctctctctctctccctctctctctcttttttttttttttttttttgcaaagaaacagcagcgccgccgccgctccgccgaggcgctgcgccccccggggggggaggcggaggaggcgggcagcggcggagggaggggagccggggaggggggcgccgcgctgggagggaggcagcgcgcacggtgcagccgggccgggcgggaggcatggcggggcccccggccctacccccgccggagacggcggcggccgccaccacggcggccgccgcctcgtcgtccgccgcttccccgcactaccaagagtggatcctggacaccatcgactcgctgcgctcgcgcaaggcgcggccggacctggagcgcatctgccggatggtgcggcggcggcacggcccggagccggagcgcacgcgcgccgagctcgagaaactgatccagcagcgcgccgtgctccgggtcagctacaaggggagcatctcgtaccgcaacgcggcgcgcgtccagccgccccggcgcggagccaccccgccggccccgccggcgccgccacagcagcagcagccgccgccgccgcagccacagccgccgccggaggggggcgcggtgcgggccggcggcgcggcgcggcccgtgagcctgcgggaagtcgtgcgctacctcgggggcagcggcggcgccggcggtcgcctaacccgcggccgcgtgcaggggctgctggaggaggaggcggcggctcgaggccgtctggagcgcacccgtctcggagcgcttgcgctgccccgcggggacaggcccggacgggcgccgccggccgccagcgcccgcccgtctcgcagcaagagaggtggagaagagcgagtacttgagaaagaagaggaagaagatgatgatgaagatgaagatgaagaagatgatgtgtcagagggctctgaagtgcccgagagtgaccgtcctgcaggtgcccagcaccaccagcttaacggcgagcggggacctcagagtgccaaggagagggtcaaggagtggaccccctgcggaccgcaccagggccaggatgaagggcgggggccagccccgggcagcggcacccgccaggtgttctccatggcagccatgaacaaggaagggggaacagcttctgttgccaccgggccagactccccgtcccccgtgcctttgcccccaggcaaaccagccctacctggggccgacgggaccccctttggctgtcctcccgggcgcaaagagaagccatctgatcccgtcgagtggaccgtgatggatgtcgtcgaatattttactgaggctggattcccggagcaggcgacagctttccaagagcaggaaattgatggcaaatctttgctgctcatgcagcgcacagatgtgctcaccggcctgtccatccgcctcgggccagccctgaaaatctacgagcaccacatcaaggtgcttcagcaaggccactttgaggatgatgaccccgatggcttcttaggctgagcgcccagcctcacccctgccccagcccattccggcccccatctcacccaagatcccccagagtccaggagctggacggggacaccctcagccctcataacagattccaaggagagggcaccctcttgtccttatctttgccccttgtgtctgtctcacacacatctgctcctcagcacgtcggtgtggggaggggattgctccttaaaccccaggtggctgaccctccccacccagtccaggacattttaggaaaaaaaaaatgaaatgtggggggcttctcatctccccaagatcctcttccgttcagccagatgtttcctgtataaatgtttggatctgcctgtttattttggtgggtggtctttcctccctcccctaccacccatgccccccttctcagtctgcccctggcctccagcccctaggggactagctgggttggggttcctcgggccttttctctcctccctcttttctttctgttgattgtcgctccagctggctgtattgctttttaatattgcaccgaaggttttttaaataaaattttaaaaaaagaaaaagggaaaaaaaa

SEQ ID NO: 186803 - DNA, 2181 bp, Homo sapiens
  Payload ID: 16782
  Gene Symbol: SAMD10
  Gene Name: sterile alpha motif domain containing 10
  Uniprot ID: Q9BYL1
  ENST ID: ENST00000369886
  CDS Start-End: 176-784
acacagggctcggcggcaggtgcctcgtcgcgcacactcgcgggccgcggggaccggctcgggcgcggggccggctggggcggggcggggcggcggcgcgcgttccccgccggccacaccggccgccctgcactcggcgaggggcgtgtgcgcgggcctggcacccgcgggccccatgttcaccgagctgaggtccaagctgagccccccgcgtggccgcgccggggccgtgcgcgcgggcttcggggagcgccgggatgtggacgccactgcccacttcagcttctgccggaccctcctggagcacacggtgtcagctgagagcatcccctgccacttgcctcggacacctggcaccagcctcacgtggcatgactcccgcagccagagggcggccagcagcaggccaatcaagctcctgcagcagcccggcacagacaccccccagggccggctgtactctgaccactatggcctgtaccatacaagcccctcgctgggtggcctgacccggcccgtggtcctgtggagtcagcaggacgtctgcaagtggctcaagaagcactgtccccacaactacctcgtctacgtggaggccttctcccagcatgccatcaccggccgggcactgctgcggctgaatgcggagaagctgcagcggatggggctggcccaggaggcccagaggcaggaggtgctgcagcaggtgctccgcctgcaggtgcgtgaggaggggcggagcctgcagctgctcagccaagcttccttcgggaaaatgtcctagctgctgctgaggcttgaacccagaccccagcactgtgatgggagtccacggctagggaggaggccaagctggccccgcagcgcctcttggaccctgcgggatgccggggcggccaggctggcccaacggacagacaggaccaggatcacacctccaggcgcctctggttggacattccaggtcgtgccctggggctgggtgggtagggggctgcttgagtgtggccccacctcctgggacctgagcccaagccctcccctggtgcagctggcagcatgtggggcagctgcctggagccagaaccggtttggatgtcccccctagactcccagggagtctgtttatttacattcccctctccacgtgatgtcggtcccccatcgcctgctgagtcacttgtctgtccacccacccagcccagttctaggtcgttccccagcacctccaggttggcccacacaggtaccataagctgcctcggctccctgtggcttgtgcccatgcacctgccagggcccagcaggccaacccatcatctagagtagtggccatcagcacccgcctaacgggcaccatgccaagcactttcatcattatttatacatcgtcaccacaccccctctattcatgagaagtaaagctgagaaaggaccagattgaccaagcgccagagacaaaatgtggcacaacgagaaccccagccctgtccaggtggctccgcgcccagggcccaggcttagcagtgctccctgccctatctttgggaaaatcttgcttttatggtcttcccccctcgccctcaagaacaagggccttgtgcgtgggccttcccattgctgctttcccaagaaggcctggattcaggggagaggccttcccagggccactccccttacaccctcccagaggcctgagcaacccctctctgggtggtttggggctggtgctgcctggcggaaggacagtgagggcggccctagccgcctccaccctcttgcgcctctgccctctcccagtccccctgtggcttctgaaaatctcagggacagatgaggctgagcccctagtcccctctgtgtgctttgagcctccagactcgaggctggtcactgcaggtcccaggtggaatttggacaactggcctggccgctcccatcctgtaagcccccaccacggggagaccctcatccctgcccctgtgtggctgcgcaagtattctgcccgcctcccaccatcagccttcgcccaaggggcccttctgcctctgcttccctcccttctcctctgtcttgccctggcccacgcacgcctgtctcgtcttccttgttttgctgcactcacttttttatactctgacaaaaaaaaaaaatcagaaataaagctggttcccaagtgct

SEQ ID NO: 186804 - DNA, 493 bp, Homo sapiens
  Payload ID: 16782
  Gene Symbol: SAMD10
  Gene Name: sterile alpha motif domain containing 10
  ENST ID: ENST00000450107
  CDS Start-End: 176-493
acacagggctcggcggcaggtgcctcgtcgcgcacactcgcgggccgcggggaccggctcgggcgcggggccggctggggcggggcggggcggcggcgcgcgttccccgccggccacaccggccgccctgcactcggcgaggggcgtgtgcgcgggcctggcacccgcgggccccatgttcaccgagctgaggtccaagctgagccccccgcgtggccgcgccggggccgtgcgcgcgggcttcggggagcgccgggatgtggacggctctgttcacttgcagataccatacagagccttcattcattcattcattgacaatgaatgtggggtgcccctctgtaaccagacctggatcaagacgcctgcctccccagactcagccactgcccacttcagcttctgccggaccctcctggagcacacggtgtcagctgagagcatcccctgccacttgcctcggacacctggcaccagcctcacgtggcatgac

SEQ ID NO: 186805 - DNA, 2551 bp, Homo sapiens
  Payload ID: 16783
  Gene Symbol: SAMD11
  Gene Name: sterile alpha motif domain containing 11
  Uniprot ID: Q96NU1
  ENST ID: ENST00000342066
  CDS Start-End: 84-2129
ccagcagatccctgcggcgttcgcgagggtgggacgggaagcgggctgggaagtcgggccgagggaaaagtctgaagacgcttatgtccaaggggatcctgcaggtgcatcctccgatctgcgactgcccgggctgccgaatatcctccccggtgaaccgggggcggctggcagacaagaggacagtcgccctgcctgccgcccggaacctgaagaaggagcgaactcccagcttctctgccagcgatggtgacagcgacgggagtggccccacctgtgggcggcggccaggcttgaagcaggaggatggtccgcacatccgtatcatgaagagaagagtccacacccactgggacgtgaacatctctttccgagaggcgtcctgcagccaggacggcaaccttcccaccctcatatccagcgtccaccgcagccgccacctcgttatgcccgagcatcagagccgctgtgaattccagagaggcagcctggagattggcctgcgacccgccggtgacctgttgggcaagaggctgggccgctccccccgtatcagcagcgactgcttttcagagaagagggcacgaagcgaatcgcctcaagaggcgctgctgctgccgcgggagctggggcccagcatggccccggaggaccattaccgccggcttgtgtcagcactgagcgaggccagcacctttgaggaccctcagcgcctctaccacctgggcctccccagccacggtgaggacccaccctggcatgatccccctcatcacctccccagccacgatctcctgagggtccggcaggaggtggcggctgcagctctgaggggccccagtggcctggaagcccacctgccctcctccacggcaggtcagcgtcggaagcagggcctggctcagcaccgggagggcgccgccccagctgccgccccgtccttctcggagagggagctgcctcagccgccccccttgctgtcgccgcagaatgcccctcacgtcgccctgggcccccatctcaggccccccttcctgggggtgccctcggctctgtgccagaccccaggctacggcttcctgccccccgcgcaggcggagatgttcgcctggcagcaggagctcctgcggaagcagaacctggcccggctggagctgcccgccgacctcctgcggcagaaggagctggagagcgcgcgcccacagctgctggcgcccgagaccgccctgcgccccaacgacggcgccgaggagctgcagcggcgcggggccctgctggtgctgaaccacggcgcggcgccactgctggccctgcccccccaggggcccccgggctccggaccccccaccccgtcccgggactctgcccggcgagccccccggaaggggggtcccggccctgcctcagcgcggcccagcgagtccaaggagatgacgggggctaggctctgggcacaagatggctcggaagacgagccccccaaagactcggacggagaggaccccgagacggcagctgttgggtgcagggggcccactccgggccaagctccagctggaggggccggcgccgaggggaaggggcttttcccagggtccacactgcccctgggcttcccttatgccgtcagcccctacttccacacaggcgcggtagggggactctccatggatggggaggaggccccagcccctgaggacgtcaccaagtggaccgtggatgacgtctgcagcttcgtggggggcctgtctggctgtggagagtacactcgggtcttcagggagcaggggatcgacggggagaccctgccactgctgacggaggagcacctgctgaccaacatggggctgaagctggggcccgccctcaagatccgggcccaggtggccaggcgcctgggccgagttttctacgtggccagcttccccgtggctctgccactgcagccaccaaccctgcgggccccggagcgagaactcggcacaggagagcagcccttgtcccccacgacggccacgtccccctatggagggggccacgcccttgccggtcaaacttcacccaagcaggagaatgggaccttggctctacttccaggggcccccgacccttcccagcctctgtgttgaggttgccgggggtaggggtggggccacacaaatctccaggagccaccactcaacacaatggccctgcctcccaccgctttatttctttcggtttcggatgcaaaacaaaaaattttaaaagaaaatgtgacttcaaaggaaaggaacaaattttcaaagacttgggggagtgaaggcagagcctggtgcagatggacgaggtctgcagacggagggcagaggtggtggaaggggccaggggcctgcaggcctccccctggaactgggactggtctcggtctgctgacgtcagggtcagctcccccgcggagctgacttcagcagcccacagctgtggggcttcagcagccacaccagcccagcccagcccagctctcgatacgtttggtctttcatgctgaaaaataaataataaagcctgt

SEQ ID NO: 186806 - DNA, 2191 bp, Homo sapiens
  Payload ID: 16783
  Gene Symbol: SAMD11
  Gene Name: sterile alpha motif domain containing 11
  ENST ID: ENST00000341065
  CDS Start-End: 1-1769
cgcacatccgtatcatgaagagaagagtccacacccactgggacgtgaacatctctttccgagaggcgtcctgcagccaggacggcaaccttcccaccctcatatccagcgtccaccgcagccgccacctcgttatgcccgagcatcagagccgctgtgaattccagagaggcagcctggagattggcctgcgacccgccggtgacctgttgggcaagaggctgggccgctccccccgtatcagcagcgactgcttttcagagaagagggcacgaagcgaatcgcctcaagaggcgctgctgctgccgcgggagctggggcccagcatggccccggaggaccattaccgccggcttgtgtcagcactgagcgaggccagcacctttgaggaccctcagcgcctctaccacctgggcctccccagccacgatctcctgagggtccggcaggaggtggcggctgcagctctgaggggccccagtggcctggaagcccacctgccctcctccacggcaggtcagcgtcggaagcagggcctggctcagcaccgggagggcgccgccccagctgccgccccgtccttctcggagagggagctgcctcagccgccccccttgctgtcgccgcagaatgcccctcacgtcgccctgggcccccatctcaggccccccttcctgggggtgccctcggctctgtgccagaccccaggctacggcttcctgccccccgcgcaggcggagatgttcgcctggcagcaggagctcctgcggaagcagaacctggcccggctggagctgcccgccgacctcctgcggcagaaggagctggagagcgcgcgcccacagctgctggcgcccgagaccgccctgcgccccaacgacggcgccgaggagctgcagcggcgcggggccctgctggtgctgaaccacggcgcggcgccactgctggccctgcccccccaggggcccccgggctccggaccccccaccccgtcccgggactctgcccggcgagccccccggaaggggggtcccggccctgcctcagcgcggcccagcgagtccaaggagatgacgggggctaggctctgggcacaagatggctcggaagacgagccccccaaagactcggacggagaggaccccgagacggcagctgttgggtgcagggggcccactccgggccaagctccagctggaggggccggcgccgaggggaaggggcttttcccagggtccacactgcccctgggcttcccttatgccgtcagcccctacttccacacaggcgcggtagggggactctccatggatggggaggaggccccagcccctgaggacgtcaccaagtggaccgtggatgacgtctgcagcttcgtggggggcctgtctggctgtggagagtacactcgggtcttcagggagcaggggatcgacggggagaccctgccactgctgacggaggagcacctgctgaccaacatggggctgaagctggggcccgccctcaagatccgggcccaggtggccaggcgcctgggccgagttttctacgtggccagcttccccgtggctctgccactgcagccaccaaccctgcgggccccggagcgagaactcggcacaggagagcagcccttgtcccccacgacggccacgtccccctatggagggggccacgcccttgccggtcaaacttcacccaagcaggagaatgggaccttggctctacttccaggggcccccgacccttcccagcctctgtgttgaggttgccgggggtaggggtggggccacacaaatctccaggagccaccactcaacacaatggccctgcctcccaccgctttatttctttcggtttcggatgcaaaacaaaaaattttaaaagaaaatgtgacttcaaaggaaaggaacaaattttcaaagacttgggggagtgaaggcagagcctggtgcagatggacgaggtctgcagacggagggcagaggtggtggaaggggccaggggcctgcaggcctccccctggaactgggactggtctcggtctgctgacgtcagggtcagctcccccgcggagctgacttcagcagcccacagctgtggggcttcagcagccacaccagcccagcccagcccagctctcgatacgtttggtctttcatgctgaaaaataaataataaagcctgt

SEQ ID NO: 186807 - DNA, 387 bp, Homo sapiens
  Payload ID: 16783
  Gene Symbol: SAMD11
  Gene Name: sterile alpha motif domain containing 11
  ENST ID: ENST00000437963
  CDS Start-End: 61-387
cagcgcttggggctcgcgggccgctccctccgctcggaagggaaaagtctgaagacgcttatgtccaaggggatcctgcaggtgcatcctccgatctgcgactgcccgggctgccgaatatcctccccggtgaaccgggggcggctggcagacaagaggacagtcgccctgcctgccgcccggaacctgaagaaggagcgaactcccagcttctctgccagcgatggtgacagcgacgggagtggccccacctgtgggcggcggccaggcttgaagcaggaggatggtccgcacatccgtatcatgaagagaagagtccacacccactgggacgtgaacatctctttccgagaggcgtcctgcagccaggacggcaaccttcccacc

SEQ ID NO: 186808 - DNA, 626 bp, Homo sapiens
  Payload ID: 16783
  Gene Symbol: SAMD11
  Gene Name: sterile alpha motif domain containing 11
  ENST ID: ENST00000420190
  CDS Start-End: 90-626
ccaacgagttccagttcgtcagcggccgcgagacggccaaggactggaagcgcagcatccgccacaaagggaaaagtctgaagacgcttatgtccaaggggatcctgcaggtgcatcctccgatctgcgactgcccgggctgccgaatatcctccccggtgaaccgggggcggctggcagacaagaggacagtcgccctgcctgccgcccggaacctgaagaaggagcgaactcccagcttctctgccagcgatggtgacagcgacgggagtggccccacctgtgggcggcggccaggcttgaagcaggaggatggtccgcacatccgtatcatgaagagaagagtccacacccactgggacgtgaacatctctttccgagaggcgtcctgcagccaggacggcaaccttcccaccctcatatccagcgtccaccgcagccgccacctcgttatgcccgagcatcagagccgctgtgaattccagagaggcagcctggagattggcctgcgacccgccggtgacctgttgggcaagaggctgggccgctccccccgtatcagcagcgactgcttttcagagaagagggcacgaagcgaatcgcctcaagaggcgctgctgctgccg

SEQ ID NO: 186809 - DNA, 1731 bp, Homo sapiens
  Payload ID: 16783
  Gene Symbol: SAMD11
  Gene Name: sterile alpha motif domain containing 11
  ENST ID: ENST00000455979
  CDS Start-End: 1-1625
aggcgctgctgctgccgcgggagctggggcccagcatggccccggaggaccattaccgccggcttgtgtcagcactgagcgaggccagcacctttgaggaccctcagcgcctctaccacctgggcctccccagccacggtgaggacccaccctggcatgatccccctcatcacctccccagccacgatctcctgagggtccggcaggaggtggcggctgcagctctgaggggccccagtggcctggaagcccacctgccctcctccacggcaggtcagcgtcggaagcagggcctggctcagcaccgggagggcgccgccccagctgccgccccgtccttctcggagagggagctgcctcagccgccccccttgctgtcgccgcagaatgcccctcacgtcgccctgggcccccatctcaggccccccttcctgggggtgccctcggctctgtgccagaccccaggctacggcttcctgccccccgcgcaggcggagatgttcgcctggcagcaggagctcctgcggaagcagaacctggcccggctggagctgcccgccgacctcctgcggcagaaggagctggagagcgcgcgcccacagctgctggcgcccgagaccgccctgcgccccaacgacggcgccgaggagctgcagcggcgcggggccctgctggtgctgaaccacggcgcggcgccactgctggccctgcccccccaggggcccccgggctccggaccccccaccccgtcccgggactctgcccggcgagccccccggaaggggggtcccggccctgcctcagcgcggcccagcgagtccaaggagatgacgggggctaggctctgggcacaagatggctcggaagacgagccccccaaagactcggacggagaggaccccgagacggcagctgttgggtgcagggggcccactccgggccaagctccagctggaggggccggcgccgaggggaaggggcttttcccagggtccacactgcccctgggcttcccttatgccgtcagcccctacttccacacaggcgcggtagggggactctccatggatggggaggaggccccagcccctgaggacgtcaccaagtggaccgtggatgacgtctgcagcttcgtggggggcctgtctggctgtggagagtacactcgggtcttcagggagcaggggatcgacggggagaccctgccactgctgacggaggagcacctgctgaccaacatggggctgaagctggggcccgccctcaagatccgggcccaggtgagacgctggggagtgaggtcagggtctccagaccacagctgggcagaaagctctgggtgggtgtgcgacagcccccaccaggccatctctctgcaggtggccaggcgcctgggccgagttttctacgtggccagcttccccgtggctctgccactgcagccaccaaccctgcgggccccggagcgagaactcggcacaggagagcagcccttgtcccccacgacggccacgtccccctatggagggggccacgcccttgccggtcaaacttcacccaagcaggagaatgggaccttggctctacttccaggggcccccgacccttcccagcctctgtgttgaggttgccgggggtaggggtggggccacacaaatctccaggagccaccactcaacacaatggccctgcctcccaccgctttatttctttcggtttcggatgcaaaac

SEQ ID NO: 186810 - DNA, 2391 bp, Homo sapiens
  Payload ID: 16783
  Gene Symbol: SAMD11
  Gene Name: sterile alpha motif domain containing 11
  ENST ID: ENST00000616016
  CDS Start-End: 81-1118
gcagatccctgcggcgttcgcgagggtgggacgggaagcgggctgggaagtcgggccgagggaaaagtctgaagacgcttatgtccaaggggatcctgcaggtgcatcctccgatctgcgactgcccgggctgccgaatatcctccccggtgaaccgggggcggctggcagacaagaggacagtcgccctgcctgccgcccggaacctgaagaaggagcgaactcccagcttctctgccagcgatggtgacagcgacgggagtggccccacctgtgggcggcggccaggcttgaagcaggaggatggtccgcacatccgtatcatgaagagaagagtccacacccactgggacgtgaacatctctttccgagaggcgtcctgcagccaggacggcaaccttcccaccctcatatccagcgtccaccgcagccgccacctcgttatgcccgagcatcagagccgctgtgaattccagagaggcagcctggagattggcctgcgacccgccggtgacctgttgggcaagaggctgggccgctccccccgtatcagcagcgactgcttttcagagaagagggcacgaagcgaatcgcctcaagaggcgctgctgctgccgcgggagctggggcccagcatggccccggaggaccattaccgccggcttgtgtcagcactgagcgaggccagcacctttgaggaccctcagcgcctctaccacctgggcctccccagccacggtgaggacccaccctggcatgatccccctcatcacctccccagccacgggagctgcctcagccgccccccttgctgtcgccgcagaatgcccctcacgtcgccctgggcccccatctcaggccccccttcctgggggtgccctcggctctgtgccagaccccaggctacggcttcctgccccccgcgcaggcggagatgttcgcctggcagcaggagctcctgcggaagcagaacctggcccggctggagctgcccgccgacctcctgcggcagaaggagctggagagcgcgcgcccacagctgctggcgcccgagaccgccctgcgccccaacgacggcgccgaggagctgcagcggcgcggggccctgctggtgctgaaccacggcgcggcgccactgctggccctgcccccccaggggcccccgggctccggaccccccaccccgtcccgggactctgcccggcgagccccccggaaggggggtcccggccctgcctcagcgcggcccagcgagtccaaggagatgacgggggctaggctctgggcacaagatggctcggaagacgagccccccaaagactcggacggagaggaccccgagacggcagctgttgggtgcagggggcccactccgggccaagctccagctggaggggccggcgccgaggggaaggggcttttcccagggtccacactgcccctgggcttcccttatgccgtcagcccctacttccacacaggcgcggtagggggactctccatggatggggaggaggccccagcccctgaggacgtcaccaagtggaccgtggatgacgtctgcagcttcgtggggggcctgtctggctgtggagagtacactcgggtcttcagggagcaggggatcgacggggagaccctgccactgctgacggaggagcacctgctgaccaacatggggctgaagctggggcccgccctcaagatccgggcccaggtggccaggcgcctgggccgagttttctacgtggccagcttccccgtggctctgccactgcagccaccaaccctgcgggccccggagcgagaactcggcacaggagagcagcccttgtcccccacgacggccacgtccccctatggagggggccacgcccttgccggtcaaacttcacccaagcaggagaatgggaccttggctctacttccaggggcccccgacccttcccagcctctgtgttgaggttgccgggggtaggggtggggccacacaaatctccaggagccaccactcaacacaatggccctgcctcccaccgctttatttctttcggtttcggatgcaaaacaaaaaattttaaaagaaaatgtgacttcaaaggaaaggaacaaattttcaaagacttgggggagtgaaggcagagcctggtgcagatggacgaggtctgcagacggagggcagaggtggtggaaggggccaggggcctgcaggcctccccctggaactgggactggtctcggtctgctgacgtcagggtcagctcccccgcggagctgacttcagcagcccacagctgtggggcttcagcagccacaccagcccagcccagcccagctctcgatacgtttggtctttcatgctgaaaaataaataataaagcctgtcccgtg

SEQ ID NO: 186811 - DNA, 2159 bp, Homo sapiens
  Payload ID: 16783
  Gene Symbol: SAMD11
  Gene Name: sterile alpha motif domain containing 11
  ENST ID: ENST00000618323
  CDS Start-End: 81-1046
gcagatccctgcggcgttcgcgagggtgggacgggaagcgggctgggaagtcgggccgagggaaaagtctgaagacgcttatgtccaaggggatcctgcaggtgcatcctccgatctgcgactgcccgggctgccgaatatcctccccggtgaaccgggggcggctggcagacaagaggacagtcgccctgcctgccgcccggaacctgaagaaggagcgaactcccagcttctctgccagcgatggtgacagcgacgggagtggccccacctgtgggcggcggccaggcttgaagcaggaggatggtccgcacatccgtatcatgaagagaagagtccacacccactgggacgtgaacatctctttccgagaggcgtcctgcagccaggacggcaaccttcccaccctcatatccagcggctgcagctctgaggggccccagtggcctggaagcccacctgccctcctccacggcaggtcagcgtcggaagcagggcctggctcagcaccgggagggcgccgccccagctgccgccccgtccttctcggagagggagctgcctcagccgccccccttgctgtcgccgcagaatgcccctcacgtcgccctgggcccccatctcaggccccccttcctgggggtgccctcggctctgtgccagaccccaggctacggcttcctgccccccgcgcaggcggagatgttcgcctggcagcaggagctcctgcggaagcagaacctggcccggctggagctgcccgccgacctcctgcggcagaaggagctggagagcgcgcgcccacagctgctggcgcccgagaccgccctgcgccccaacgacggcgccgaggagctgcagcggcgcggggccctgctggtgctgaaccacggcgcggcgccactgctggccctgcccccccaggggcccccgggctccggaccccccaccccgtcccgggactctgcccggcgagccccccggaaggggggtcccggccctgcctcagcgcggcccagcgagtccaaggagatgacgggggctaggctctgggcacaagatggctcggaagacgagccccccaaagactcggacggagaggaccccgagacggcagctgttgggtgcagggggcccactccgggccaagctccagctggaggggccggcgccgaggggaaggggcttttcccagggtccacactgcccctgggcttcccttatgccgtcagcccctacttccacacaggcgcggtagggggactctccatggatggggaggaggccccagcccctgaggacgtcaccaagtggaccgtggatgacgtctgcagcttcgtggggggcctgtctggctgtggagagtacactcgggtcttcagggagcaggggatcgacggggagaccctgccactgctgacggaggagcacctgctgaccaacatggggctgaagctggggcccgccctcaagatccgggcccaggtggccaggcgcctgggccgagttttctacgtggccagcttccccgtggctctgccactgcagccaccaaccctgcgggccccggagcgagaactcggcacaggagagcagcccttgtcccccacgacggccacgtccccctatggagggggccacgcccttgccggtcaaacttcacccaagcaggagaatgggaccttggctctacttccaggggcccccgacccttcccagcctctgtgttgaggttgccgggggtaggggtggggccacacaaatctccaggagccaccactcaacacaatggccctgcctcccaccgctttatttctttcggtttcggatgcaaaacaaaaaattttaaaagaaaatgtgacttcaaaggaaaggaacaaattttcaaagacttgggggagtgaaggcagagcctggtgcagatggacgaggtctgcagacggagggcagaggtggtggaaggggccaggggcctgcaggcctccccctggaactgggactggtctcggtctgctgacgtcagggtcagctcccccgcggagctgacttcagcagcccacagctgtggggcttcagcagccacaccagcccagcccagcccagctctcgatacgtttggtctttcatgctgaaaaataaataataaagcctgtcccgtg

SEQ ID NO: 186812 - DNA, 2179 bp, Homo sapiens
  Payload ID: 16783
  Gene Symbol: SAMD11
  Gene Name: sterile alpha motif domain containing 11
  ENST ID: ENST00000618181
  CDS Start-End: 81-1751
gcagatccctgcggcgttcgcgagggtgggacgggaagcgggctgggaagtcgggccgagggaaaagtctgaagacgcttatgtccaaggggatcctgcaggtgcatcctccgatctgcgactgcccgggctgccgaatatcctccccggtgaaccgggggcggctggcagacaagaggacagtcgccctgcctgccgcccggaacctgaagaaggagcgaactcccagcttctctgccagcgatggtgacagcgacgggagtggccccacctgtgggcggcggccaggcttgaagcaggaggatggtccgcacatccgtatcatgaagagaagccaggacggcaaccttcccaccctcatatccagcgtccaccgcagccgccacctcgttatgcccgagcatcagagccgctgtgaattccagagaggcagcctggagattggcctgcgacccgccggtgacctgttgggcaagaggctgggccgctccccccgtatcagcagcgactgcttttcagagaagagggcacgaagcgaatcgcctcaagcagaggcgctgctgctgccgcgggagctggggcccagcatggccccggaggaccattaccgccggcttgtgtcagcactgagcgaggccagcacctttgaggaccctcagcgcctctaccacctgggcctccccagccacggctacggcttcctgccccccgcgcaggcggagatgttcgcctggcagcaggagctcctgcggaagcagaacctggcccggctggagctgcccgccgacctcctgcggcagaaggagctggagagcgcgcgcccacagctgctggcgcccgagaccgccctgcgccccaacgacggcgccgaggagctgcagcggcgcggggccctgctggtgctgaaccacggcgcggcgccactgctggccctgcccccccaggggcccccgggctccggaccccccaccccgtcccgggactctgcccggcgagccccccggaaggggggtcccggccctgcctcagcgcggcccagcgagtccaaggagatgacgggggctaggctctgggcacaagatggctcggaagacgagccccccaaagactcggacggagaggaccccgagacggcagctgttgggtgcagggggcccactccgggccaagctccagctggaggggccggcgccgaggggaaggggcttttcccagggtccacactgcccctgggcttcccttatgccgtcagcccctacttccacacaggcgcggtagggggactctccatggatggggaggaggccccagcccctgaggacgtcaccaagtggaccgtggatgacgtctgcagcttcgtggggggcctgtctggctgtggagagtacactcgggtcttcagggagcaggggatcgacggggagaccctgccactgctgacggaggagcacctgctgaccaacatggggctgaagctggggcccgccctcaagatccgggcccaggtggccaggcgcctgggccgagttttctacgtggccagcttccccgtggctctgccactgcagccaccaaccctgcgggccccggagcgagaactcggcacaggagagcagcccttgtcccccacgacggccacgtccccctatggagggggccacgcccttgccggtcaaacttcacccaagcaggagaatgggaccttggctctacttccaggggcccccgacccttcccagcctctgtgttgaggttgccgggggtaggggtggggccacacaaatctccaggagccaccactcaacacaatggccctgcctcccaccgctttatttctttcggtttcggatgcaaaacaaaaaattttaaaagaaaatgtgacttcaaaggaaaggaacaaattttcaaagacttgggggagtgaaggcagagcctggtgcagatggacgaggtctgcagacggagggcagaggtggtggaaggggccaggggcctgcaggcctccccctggaactgggactggtctcggtctgctgacgtcagggtcagctcccccgcggagctgacttcagcagcccacagctgtggggcttcagcagccacaccagcccagcccagcccagctctcgatacgtttggtctttcatgctgaaaaataaataataaagcctgtcccgtg

SEQ ID NO: 186813 - DNA, 2314 bp, Homo sapiens
  Payload ID: 16783
  Gene Symbol: SAMD11
  Gene Name: sterile alpha motif domain containing 11
  ENST ID: ENST00000617307
  CDS Start-End: 81-1886
gcagatccctgcggcgttcgcgagggtgggacgggaagcgggctgggaagtcgggccgagggaaaagtctgaagacgcttatgtccaaggggatcctgcaggtgcatcctccgatctgcgactgcccgggctgccgaatatcctccccggtgaaccgggggcggctggcagacaagaggacagtcgccctgcctgccgcccggaacctgaagaaggagcgaactcccagcttctctgccagcgatggtgacagcgacgggagtggccccacctgtgggcggcggccaggcttgaagcaggaggatggtccgcacatccgtatcatgaagagaagagtccacacccactgggacgtgaacatctctttccgagaggcgtcctgcagccaggacggcaaccttcccaccctcatatccagcgtccaccgcagccgccacctcgttatgcccgagcatcagagccgctgtgaattccagagaggcagcctggagattggcctgcgacccgccggtgacctgttgggcaagaggctgggccgctccccccgtatcagcagcgactgcttttcagagaagagggcacgaagcgaatcgcctcaagaggcgctgctgctgccgcgggagctggggcccagcatggccccggaggaccattaccgccggcttgtgtcagcactgagcgaggccagcacctttgaggaccctcagcgcctctaccacctgggcctccccagccacgatctcctgagggtccggcaggaggtggcggctgcagctctgaggggccccagtggcctggaagcccacctgccctcctccacggcaggctacggcttcctgccccccgcgcaggcggagatgttcgcctggcagcaggagctcctgcggaagcagaacctggcccggctggagctgcccgccgacctcctgcggcagaaggagctggagagcgcgcgcccacagctgctggcgcccgagaccgccctgcgccccaacgacggcgccgaggagctgcagcggcgcggggccctgctggtgctgaaccacggcgcggcgccactgctggccctgcccccccaggggcccccgggctccggaccccccaccccgtcccgggactctgcccggcgagccccccggaaggggggtcccggccctgcctcagcgcggcccagcgagtccaaggagatgacgggggctaggctctgggcacaagatggctcggaagacgagccccccaaagactcggacggagaggaccccgagacggcagctgttgggtgcagggggcccactccgggccaagctccagctggaggggccggcgccgaggggaaggggcttttcccagggtccacactgcccctgggcttcccttatgccgtcagcccctacttccacacaggcgcggtagggggactctccatggatggggaggaggccccagcccctgaggacgtcaccaagtggaccgtggatgacgtctgcagcttcgtggggggcctgtctggctgtggagagtacactcgggtcttcagggagcaggggatcgacggggagaccctgccactgctgacggaggagcacctgctgaccaacatggggctgaagctggggcccgccctcaagatccgggcccaggtggccaggcgcctgggccgagttttctacgtggccagcttccccgtggctctgccactgcagccaccaaccctgcgggccccggagcgagaactcggcacaggagagcagcccttgtcccccacgacggccacgtccccctatggagggggccacgcccttgccggtcaaacttcacccaagcaggagaatgggaccttggctctacttccaggggcccccgacccttcccagcctctgtgttgaggttgccgggggtaggggtggggccacacaaatctccaggagccaccactcaacacaatggccctgcctcccaccgctttatttctttcggtttcggatgcaaaacaaaaaattttaaaagaaaatgtgacttcaaaggaaaggaacaaattttcaaagacttgggggagtgaaggcagagcctggtgcagatggacgaggtctgcagacggagggcagaggtggtggaaggggccaggggcctgcaggcctccccctggaactgggactggtctcggtctgctgacgtcagggtcagctcccccgcggagctgacttcagcagcccacagctgtggggcttcagcagccacaccagcccagcccagcccagctctcgatacgtttggtctttcatgctgaaaaataaataataaagcctgtcccgtg

SEQ ID NO: 186814 - DNA, 2557 bp, Homo sapiens
  Payload ID: 16783
  Gene Symbol: SAMD11
  Gene Name: sterile alpha motif domain containing 11
  ENST ID: ENST00000622503
  CDS Start-End: 81-2129
gcagatccctgcggcgttcgcgagggtgggacgggaagcgggctgggaagtcgggccgagggaaaagtctgaagacgcttatgtccaaggggatcctgcaggtgcatcctccgatctgcgactgcccgggctgccgaatatcctccccggtgaaccgggggcggctggcagacaagaggacagtcgccctgcctgccgcccggaacctgaagaaggagcgaactcccagcttctctgccagcgatggtgacagcgacgggagtggccccacctgtgggcggcggccaggcttgaagcaggaggatggtccgcacatccgtatcatgaagagaagagtccacacccactgggacgtgaacatctctttccgagaggcgtcctgcagccaggacggcaaccttcccaccctcatatccagcgtccaccgcagccgccacctcgttatgcccgagcatcagagccgctgtgaattccagagaggcagcctggagattggcctgcgacccgccggtgacctgttgggcaagaggctgggccgctccccccgtatcagcagcgactgcttttcagagaagagggcacgaagcgaatcgcctcaagcagaggcgctgctgctgccgcgggagctggggcccagcatggccccggaggaccattaccgccggcttgtgtcagcactgagcgaggccagcacctttgaggaccctcagcgcctctaccacctgggcctccccagccacggtgaggacccaccctggcatgatccccctcatcacctccccagccacgatctcctgagggtccggcaggaggtggcggctgcagctctgaggggccccagtggcctggaagcccacctgccctcctccacggcaggtcagcgtcggaagcagggcctggctcagcaccgggagggcgccgccccagctgccgccccgtccttctcggagagggagctgcctcagccgccccccttgctgtcgccgcagaatgcccctcacgtcgccctgggcccccatctcaggccccccttcctgggggtgccctcggctctgtgccagaccccaggctacggcttcctgccccccgcgcaggcggagatgttcgcctggcagcaggagctcctgcggaagcagaacctggcccggctggagctgcccgccgacctcctgcggcagaaggagctggagagcgcgcgcccacagctgctggcgcccgagaccgccctgcgccccaacgacggcgccgaggagctgcagcggcgcggggccctgctggtgctgaaccacggcgcggcgccactgctggccctgcccccccaggggcccccgggctccggaccccccaccccgtcccgggactctgcccggcgagccccccggaaggggggtcccggccctgcctcagcgcggcccagcgagtccaaggagatgacgggggctaggctctgggcacaagatggctcggaagacgagccccccaaagactcggacggagaggaccccgagacggcagctgttgggtgcagggggcccactccgggccaagctccagctggaggggccggcgccgaggggaaggggcttttcccagggtccacactgcccctgggcttcccttatgccgtcagcccctacttccacacaggcgcggtagggggactctccatggatggggaggaggccccagcccctgaggacgtcaccaagtggaccgtggatgacgtctgcagcttcgtggggggcctgtctggctgtggagagtacactcgggtcttcagggagcaggggatcgacggggagaccctgccactgctgacggaggagcacctgctgaccaacatggggctgaagctggggcccgccctcaagatccgggcccaggtggccaggcgcctgggccgagttttctacgtggccagcttccccgtggctctgccactgcagccaccaaccctgcgggccccggagcgagaactcggcacaggagagcagcccttgtcccccacgacggccacgtccccctatggagggggccacgcccttgccggtcaaacttcacccaagcaggagaatgggaccttggctctacttccaggggcccccgacccttcccagcctctgtgttgaggttgccgggggtaggggtggggccacacaaatctccaggagccaccactcaacacaatggccctgcctcccaccgctttatttctttcggtttcggatgcaaaacaaaaaattttaaaagaaaatgtgacttcaaaggaaaggaacaaattttcaaagacttgggggagtgaaggcagagcctggtgcagatggacgaggtctgcagacggagggcagaggtggtggaaggggccaggggcctgcaggcctccccctggaactgggactggtctcggtctgctgacgtcagggtcagctcccccgcggagctgacttcagcagcccacagctgtggggcttcagcagccacaccagcccagcccagcccagctctcgatacgtttggtctttcatgctgaaaaataaataataaagcctgtcccgtg

SEQ ID NO: 186815 - DNA, 2368 bp, Homo sapiens
  Payload ID: 16783
  Gene Symbol: SAMD11
  Gene Name: sterile alpha motif domain containing 11
  ENST ID: ENST00000618779
  CDS Start-End: 81-1940
gcagatccctgcggcgttcgcgagggtgggacgggaagcgggctgggaagtcgggccgagggaaaagtctgaagacgcttatgtccaaggggatcctgcaggtgcatcctccgatctgcgactgcccgggctgccgaatatcctccccggtgaaccgggggcggctggcagacaagaggacagtcgccctgcctgccgcccggaacctgaagaaggagcgaactcccagcttctctgccagcgatggtgacagcgacgggagtggccccacctgtgggcggcggccaggcttgaagcaggaggatggtccgcacatccgtatcatgaagagaagagtccacacccactgggacgtgaacatctctttccgagaggcgtcctgcagccaggacggcaaccttcccaccctcatatccagcgtccaccgcagccgccacctcgttatgcccgagcatcagagccgctgtgaattccagagaggcagcctggagattggcctgcgacccgccggtgacctgttgggcaagaggctgggccgctccccccgtatcagcagcgactgcttttcagagaagagggcacgaagcgaatcgcctcaagatctcctgagggtccggcaggaggtggcggctgcagctctgaggggccccagtggcctggaagcccacctgccctcctccacggcaggtcagcgtcggaagcagggcctggctcagcaccgggagggcgccgccccagctgccgccccgtccttctcggagagggagctgcctcagccgccccccttgctgtcgccgcagaatgcccctcacgtcgccctgggcccccatctcaggccccccttcctgggggtgccctcggctctgtgccagaccccaggctacggcttcctgccccccgcgcaggcggagatgttcgcctggcagcaggagctcctgcggaagcagaacctggcccggctggagctgcccgccgacctcctgcggcagaaggagctggagagcgcgcgcccacagctgctggcgcccgagaccgccctgcgccccaacgacggcgccgaggagctgcagcggcgcggggccctgctggtgctgaaccacggcgcggcgccactgctggccctgcccccccaggggcccccgggctccggaccccccaccccgtcccgggactctgcccggcgagccccccggaaggggggtcccggccctgcctcagcgcggcccagcgagtccaaggagatgacgggggctaggctctgggcacaagatggctcggaagacgagccccccaaagactcggacggagaggaccccgagacggcagctgttgggtgcagggggcccactccgggccaagctccagctggaggggccggcgccgaggggaaggggcttttcccagggtccacactgcccctgggcttcccttatgccgtcagcccctacttccacacaggcgcggtagggggactctccatggatggggaggaggccccagcccctgaggacgtcaccaagtggaccgtggatgacgtctgcagcttcgtggggggcctgtctggctgtggagagtacactcgggtcttcagggagcaggggatcgacggggagaccctgccactgctgacggaggagcacctgctgaccaacatggggctgaagctggggcccgccctcaagatccgggcccaggtggccaggcgcctgggccgagttttctacgtggccagcttccccgtggctctgccactgcagccaccaaccctgcgggccccggagcgagaactcggcacaggagagcagcccttgtcccccacgacggccacgtccccctatggagggggccacgcccttgccggtcaaacttcacccaagcaggagaatgggaccttggctctacttccaggggcccccgacccttcccagcctctgtgttgaggttgccgggggtaggggtggggccacacaaatctccaggagccaccactcaacacaatggccctgcctcccaccgctttatttctttcggtttcggatgcaaaacaaaaaattttaaaagaaaatgtgacttcaaaggaaaggaacaaattttcaaagacttgggggagtgaaggcagagcctggtgcagatggacgaggtctgcagacggagggcagaggtggtggaaggggccaggggcctgcaggcctccccctggaactgggactggtctcggtctgctgacgtcagggtcagctcccccgcggagctgacttcagcagcccacagctgtggggcttcagcagccacaccagcccagcccagcccagctctcgatacgtttggtctttcatgctgaaaaataaataataaagcctgtcccgtg

SEQ ID NO: 186816 - DNA, 2230 bp, Homo sapiens
  Payload ID: 16783
  Gene Symbol: SAMD11
  Gene Name: sterile alpha motif domain containing 11
  ENST ID: ENST00000616125
  CDS Start-End: 81-1802
gcagatccctgcggcgttcgcgagggtgggacgggaagcgggctgggaagtcgggccgagggaaaagtctgaagacgcttatgtccaaggggatcctgcaggtgcatcctccgatctgcgactgcccgggctgccgaatatcctccccggtgaaccgggggcggctggcagacaagaggacagtcgccctgcctgccgcccggaacctgaagaaggagcgaactcccagcttctctgccagcgatggtgacagcgacgggagtggccccacctgtgggcggcggccaggcttgaagcaggaggatggtccgcacatccgtatcatgaagagaagagtccacacccactgggacgtgaacatctctttccgagaggcgtcctgcagccaggacggcaaccttcccaccctcatatccagcgtccaccgcagccgccacctcgttatgcccgagcatcagagccgctgtgaattccagagaggcagcctggagattggcctgcgacccgccggtgacctgttgggcaagaggctgggccgctccccccgtatcagcagcgactgcttttcagagaagagggcacgaagcgaatcgcctcaagcagaggcgctgctgctgccgcgggagctggggcccagcatggccccggaggaccattaccgccggcttgtgtcagcactgagcgaggccagcacctttgaggaccctcagcgcctctaccacctgggcctccccagccacggctacggcttcctgccccccgcgcaggcggagatgttcgcctggcagcaggagctcctgcggaagcagaacctggcccggctggagctgcccgccgacctcctgcggcagaaggagctggagagcgcgcgcccacagctgctggcgcccgagaccgccctgcgccccaacgacggcgccgaggagctgcagcggcgcggggccctgctggtgctgaaccacggcgcggcgccactgctggccctgcccccccaggggcccccgggctccggaccccccaccccgtcccgggactctgcccggcgagccccccggaaggggggtcccggccctgcctcagcgcggcccagcgagtccaaggagatgacgggggctaggctctgggcacaagatggctcggaagacgagccccccaaagactcggacggagaggaccccgagacggcagctgttgggtgcagggggcccactccgggccaagctccagctggaggggccggcgccgaggggaaggggcttttcccagggtccacactgcccctgggcttcccttatgccgtcagcccctacttccacacaggcgcggtagggggactctccatggatggggaggaggccccagcccctgaggacgtcaccaagtggaccgtggatgacgtctgcagcttcgtggggggcctgtctggctgtggagagtacactcgggtcttcagggagcaggggatcgacggggagaccctgccactgctgacggaggagcacctgctgaccaacatggggctgaagctggggcccgccctcaagatccgggcccaggtggccaggcgcctgggccgagttttctacgtggccagcttccccgtggctctgccactgcagccaccaaccctgcgggccccggagcgagaactcggcacaggagagcagcccttgtcccccacgacggccacgtccccctatggagggggccacgcccttgccggtcaaacttcacccaagcaggagaatgggaccttggctctacttccaggggcccccgacccttcccagcctctgtgttgaggttgccgggggtaggggtggggccacacaaatctccaggagccaccactcaacacaatggccctgcctcccaccgctttatttctttcggtttcggatgcaaaacaaaaaattttaaaagaaaatgtgacttcaaaggaaaggaacaaattttcaaagacttgggggagtgaaggcagagcctggtgcagatggacgaggtctgcagacggagggcagaggtggtggaaggggccaggggcctgcaggcctccccctggaactgggactggtctcggtctgctgacgtcagggtcagctcccccgcggagctgacttcagcagcccacagctgtggggcttcagcagccacaccagcccagcccagcccagctctcgatacgtttggtctttcatgctgaaaaataaataataaagcctgtcccgtg

SEQ ID NO: 186817 - DNA, 1874 bp, Homo sapiens
  Payload ID: 16783
  Gene Symbol: SAMD11
  Gene Name: sterile alpha motif domain containing 11
  ENST ID: ENST00000620200
  CDS Start-End: 81-761
gcagatccctgcggcgttcgcgagggtgggacgggaagcgggctgggaagtcgggccgagggaaaagtctgaagacgcttatgtccaaggggatcctgcaggtgcatcctccgatctgcgactgcccgggctgccgaatatcctccccggtgaaccgggggcggctggcagacaagaggacagtcgccctgcctgccgcccggaacctgaagaaggagcgaactcccagcttctctgccagcgatggtgacagcgacgggagtggccccacctgtgggcggcggccaggcttgaagcaggaggatggtccgcacatccgtatcatgaagagaagagtccacacccactgggacgtgaacatctctttccgagaggcgtcctgcaggctacggcttcctgccccccgcgcaggcggagatgttcgcctggcagcaggagctcctgcggaagcagaacctggcccggctggagctgcccgccgacctcctgcggcagaaggagctggagagcgcgcgcccacagctgctggcgcccgagaccgccctgcgccccaacgacggcgccgaggagctgcagcggcgcggggccctgctggtgctgaaccacggcgcggcgccactgctggccctgcccccccaggggcccccgggctccggaccccccaccccgtcccgggactctgcccggcgagccccccggaaggggggtcccggccctgcctcagcgcggcccagcgagtccaaggagatgacgggggctaggctctgggcacaagatggctcggaagacgagccccccaaagactcggacggagaggaccccgagacggcagctgttgggtgcagggggcccactccgggccaagctccagctggaggggccggcgccgaggggaaggggcttttcccagggtccacactgcccctgggcttcccttatgccgtcagcccctacttccacacaggcgcggtagggggactctccatggatggggaggaggccccagcccctgaggacgtcaccaagtggaccgtggatgacgtctgcagcttcgtggggggcctgtctggctgtggagagtacactcgggtcttcagggagcaggggatcgacggggagaccctgccactgctgacggaggagcacctgctgaccaacatggggctgaagctggggcccgccctcaagatccgggcccaggtggccaggcgcctgggccgagttttctacgtggccagcttccccgtggctctgccactgcagccaccaaccctgcgggccccggagcgagaactcggcacaggagagcagcccttgtcccccacgacggccacgtccccctatggagggggccacgcccttgccggtcaaacttcacccaagcaggagaatgggaccttggctctacttccaggggcccccgacccttcccagcctctgtgttgaggttgccgggggtaggggtggggccacacaaatctccaggagccaccactcaacacaatggccctgcctcccaccgctttatttctttcggtttcggatgcaaaacaaaaaattttaaaagaaaatgtgacttcaaaggaaaggaacaaattttcaaagacttgggggagtgaaggcagagcctggtgcagatggacgaggtctgcagacggagggcagaggtggtggaaggggccaggggcctgcaggcctccccctggaactgggactggtctcggtctgctgacgtcagggtcagctcccccgcggagctgacttcagcagcccacagctgtggggcttcagcagccacaccagcccagcccagcccagctctcgatacgtttggtctttcatgctgaaaaataaataataaagcctgtcccgtg

SEQ ID NO: 186818 - DNA, 2172 bp, Homo sapiens
  Payload ID: 16784
  Gene Symbol: SAMD12
  Gene Name: sterile alpha motif domain containing 12
  Uniprot ID: Q8N8I0
  ENST ID: ENST00000314727
  CDS Start-End: 138-743
gcgtgaccgcggcaggttggtcctggagcagataagcgcagaatatttaggcgaaagcgagaggaaggggggagcgcggggcaggaggagtacctcggccaagaaaattatgcatgcgttagggaagctctgagagaatggctgtggaagctctccactgtggtttgaatccacggggtattgatcaccctgcccatgctgaaggtattaaactgcaaattgaaggtgaaggtgtggaatctcaatccattaaaaataaaaatttccagaaggtgcctgaccagaaaggaactcccaagcgactgcaggcagaagctgagacggctaagtcagctacggtgaagctatctaaaccggtggctctatggacccagcaggatgtctgcaagtggttgaagaaacattgtccgaatcagtatcagatctacagtgagtcattcaaacagcatgacataactgggcgagccctgctgagacttactgacaaaaagctcgagcgaatggggattgcccaggagaacctccggcagcacatcttacaacaggtgctccagctgaaggtgcgagaagaagtcagaaatctacagttactcacacaaggtaccctattgcttcctgatgggtggatggatggggagattagaagaaagaccaccttactattaggacagacaggagtcagggagaatttgttattgtttcttcacagaatttccatcatagaaaatagtatacagatttaagattacttccctttgaaaacttttttcatagctcactagggagaaggatgcacaaataagtaatggatgagcaaacagaattacctgagctaacttcaaggtggtcacgtacagttgtatggattgtgtactgcacaaccccagagaataccagtcacatcaatcagggtacgattgcactcactagagttgtataatgtgcagcctgcacaactgtacagtccagctgtagctatcttcacctgcgccaattgtgagggcgctttagcatttgagtgattcaatagttacgatgaccagtgatataagtggagtttttgttgtatttttgttttgcttttcaccggttagtgggagaaaaacattttagatatgtattactatacatgaatgtattatacacacacactttagagattgtaagaaccccatttagcttcttgaaagtggaataatttttataatagactatagtgaatctaaaactacactgttaagagtatataattcttaacaggaattataaataacttcaatatgatgagagcacttaagatctcaataactgtggaagtgacaaaataaagctagaattcgaagaaagccttaagttacactatatgtaactgatatgtctacatgagatttggatgctatcaaccttcattggctataaactttatttgttttattttagcgtccattgtacatcgttttaaatgaaaggatgataaaatatgtgtttttgagagccttgagtatttgtcattctgcagaatattgtaattgcatgcataccgatattggagaaatctgggtcagccaagtttcatgttattgcatttagattaacctagtaatagtccatttgcctagaggaaataatgtgctccctgaaagatgactattctagaaggataaatatagatttcaagtgatcgtaaaatagtattgtttgtctcatatgcattatttgcattttgtcctcagagatttccaatggtgaatttactggtatactaagtgatttaaatttgaatgtgaaatactgataggcttttaagcttcttttaagaagtagatagaaatacgaagattatgataagaaagtctgtcacagtgctatttggaaaacggaaaatttacaagcaacctagaggtccagcaatgtgaaaagaatcaagtaattctgcttaaattcataagattcagtataatgcccagttattaaaattacatctttaaagaatacatgacaacatgggaaattacgtaagtcatacaaggtgggaggaaaggtcatgtgtaaaattgtatgcataatataagcccaattttgtaaaaaccatatattcttatatgtacagaaaaaaaggactgcaagtaaatatgccaaccattttaataaaggatctctctggattgtggg

SEQ ID NO: 186819 - DNA, 8866 bp, Homo sapiens
  Payload ID: 16784
  Gene Symbol: SAMD12
  Gene Name: sterile alpha motif domain containing 12
  ENST ID: ENST00000409003
  CDS Start-End: 130-615
gcggcaggttggtcctggagcagataagcgcagaatatttaggcgaaagcgagaggaaggggggagcgcggggcaggaggagtacctcggccaagaaaattatgcatgcgttagggaagctctgagagaatggctgtggaagctctccactgtggtttgaatccacggggtattgatcaccctgcccatgctgaaggtattaaactgcaaattgaaggtgaaggtgtggaatctcaatccattaaaaataaaaatttccagaaggtgcctgaccagaaaggaactcccaagcgactgcaggcagaagctgagacggctaagtcagctacggtgaagctatctaaaccggtggctctatggacccagcaggatgtctgcaagtggttgaagaaacattgtccgaatcagtatcagatctacagtgagtcattcaaacagcatgacataactgggcgagccctgctgagacttactgacaaaaagctcgagcgaatggggattgcccaggagaacctccggcagcacatcttacaacaggtgctccagctgaaggtgcgagaagaagtcagaaatctacagttactcacacaagcatcatctgagggttctccataaacacggttagccttccaagctgctgtcctgccagttgatatgaacatggcctgttcctcacagaaagactaacccatggcactgccagaagatatccttggatcgtggacagattaactggattaactgaaaaaagcacccattcagtcaatattatgggttttggaaaaatcttgctttgctgtggatttaaaatgaggtgcataatataatgccaactcattccaagtggtcattggcagaccattagctggaaaattgcttccagttttcatcactgtgcataactcaagttccctttggggagctgtctgtgcccttcactagaagtcctgttttagcatggcaactactggattattttattatgtgtgcagatggcatgatgttttagaaaaaaaaaattacagcaattctgcaatctcagtggaagtgttcacaatattatgccctggtaggaatgtaaacacgtctcgattatgttagttatgatgtctaaaggtatactgtccaactcttaagcactttatatgagaacactacaccaagatgaatcagcacattcagcacatgtgagaaatcaagtattttctttttatttttataaatcttagtggtttttttttttccggctcagactgtccaagacaaactccactactcgcatatccccagttgtttgtggtaggttgatgtaaatatggccacaatactgttagacttcacctccagatactttattgaacaactggtttacttctagcaccaaagggaagaagaagggggtccagtgatggtgatatcttagcttgcttctttgttcacaggcactattgaccacatgaacatacaggtactcaaatacaggaggcttctatttggctcctccaagggaggagttcctccaagggaaaaaaggggatggtattcttttaatcaaagaccatggtggatggatggtaagggcaacagaatgcaattcttttgtgtggtctgacgttaacacttcggaaaaaattctaagtcaagttgaaatcgccattctctcaagagagaaacatcaagagagaaacatcaagtgaccccactatgtgcctagagaaggaaaagggtcaagtcctatactaggttccttacttagggtagaacctactagtcccttgttaatcctttctgggattatacctgtgactaatttttttttttttaactatgtcttacgacaaagcacagtcctgggaaaccagtcaacttaattattgcttgtctttgagcattagagacatgttcatattgacttgctacataacactgtagcatgttttttcctgaaaatatcaagttggttgaatggaaagctcagcaaagtatgttctgtgtgcccactgtcccagcctgggactgacgggcatcagaggctttgctttaaaatatgggtaaccagttctggaagacttccaacgcaagcaagcttggtgttttagggtgtctccagatacataagcattgtctgcctccgctcagggtctcaggaaatacacagcccattggaaaccacccacgcctgagatttggaaacctgacggaaagggaggaaggtccaaatgagtcagcagcaggatgactcaccacaagcctggcaggctgcagagccagagaagggggcttccaacaaggaactcagagaagttgcagtcaccaccaagatctggcccttcggcaggtcagcaccaggactgccaggccctctgcagaccgtaattctcttcacatctataattaggaggccaaactccagctgccaacacccttggacacaatattccagtctccactgcccatctcatgtggttcagttctaatagcaggtcttcttcttcctttcattccttcctttattcagcaagcatttgttgagcatctactatgtgccaagcattgtgcttgggcaacaacagtccacaaagcagactccccacctgcccttatgaaactgtatctcctcctccccaacattatcaccaccccaccatttccacaatgaaaactgaattcagacagcattctccattctgccagagtaacctaggaagaagaacatggcagcagacggatcctcagggaggaggcagcagagtgacagatggtaaactgcatcaggccacatatttgcacctttcagatacagccaactcttccagggcctagactgagctggttggagctccccaaagcagcattcagttgcttttccttgatatccaccctggctacctatattccctttctttatataggcacaaccattcaccactacgctggattatctaacactccaattctataactcatccaggggacacacagttgagtctgatgaagcctaagaactgccaggtgctgagatattgtaactgggaattaagatttagccaaggacattgtgagactactgctgactctcttggaaaactggacatgctttgtagtgcaaatgttcactaaatgatggtggttcattgttacttactttggcctttgcaaaatattctgaacaattcaataagtagagtttcctagtttgtttgtttttttaagtcaaaggaacgctgtgaaattattgaaagatgatgggtgaagagggacctaggagaaggcaaaatgaagaccattaaagagccccattgaagactgtatctctaaaaatgccttaatgcctggcacatattccatatttgcatatgaactactattcttttccaaactgtcaacttctgtttgaaatcattgtgggggatagtttggaaatatggtggcataaaatccaagcagtcaagagctaaaccagcaaaaaagaggaatgacttcattcacaggctttggcttctttattatgtggtggtcctctgtgatctcccatggttaacttcaactgtgctgtactttcttcccaagatgcatgtacggaatgttacctcctagaaatccagaaatagttgtggtgagttttgtttgataggaagcaagaggtggggaagtaaaggatacatatttttatgtctaaggactgtaaactgttgatgcttgacttttccttttacctacacctgtgctacacctttattaaaaggctgacacccagacttgtgcaggaaaggcactcttgggaatgaacagaaatgaataattatgagactttccatggtgccaaggggattcgcttatttccactccagaactgaatatgcagagcattgccagtcctgctagtgtgaaaagcaaattacttcaatagtttgagacgtacctaggggaagagagatcctatcaactttctttgcgggtagtggcgtaccttcaaatccttgctcaggctctgtgaggtgtgcacccgcagatttcacttctacctccggaatcctggcaaacaagccaggaatctctccagagtcacttcgcagttgctcagaaagaggctaacggtccttagtcctgaggaaattctgccatttttaacattcaaggagaaaaggcgtatcagctgtacgtgagaatatcaactaaggataaaaacctctaatggatcccccttgttacttgcaaatgctttctttgtctgcaaatgtcacataattgattttgcataggaacaacaaaagtctcaaggaattgaagtttttaataccccccttagcactttactttcaccaaaacctcctctttctagtacatgagcagttttgttctttgtgatgttttcctctacattctttagaataattttgttacttgacaactagacttgtcaatcgtcttagactcttttgaaaaatctaatctttgaaaatgacacaaattcctttattgctttaaggctgttttcattcacccctcccacagccccctccactgcacttttttgttttttgcggggatttttttctttcatctctcttcttttaacatgatgctgtgggtagttttcaagaattctataaagaactcaacaaaaagtgtatttgttacctttttccccagtcctaatatttcttcttaagcttgatcttggtgaaaatttgttgcccaaaaagcagtgaggtagggattaataacgctgaccagtcatctggaagattaattaatcccagtgcagccctgagatcaggaaggaggacaggccaggagatgtttctactccaggcaccactaaggactctatttcaaaggcagatcctgctccttagtctttttagatctgaatctaatcctgaatccagaaaattatcctatgaattctggtttatcaacgcacatgattcctggcaccattgcatagcttcaaggtaaaagagagccttgtttccattattttgctatggtggcttttgggaagacagagagcattcttttgaaagcgggaaacttaaggaaaagttggccaagtacacaggaaagttctaccacaccttaatataaagaacaaaatagatgcttctcatttggggaaagtagctaaaaggacagtaacagtactgatggccttctgtccatcaccttagctccacagggaaaattctgggtgagagcaagcactgtttctaaaatctaaattttttcaggtgaaatttaccagcaacaaatgtaaaagggaactgccatcaggcatagggctagttttatacttcctgcctaacggcaaaatgactgagacatgacttccatggaacagcagaaaatggatgccaaagatatcataaaactgaagttcaatttgccacgtaaggctatttaaaaaccctgatgcactccaagcattcttccttcagagctttcctcctacaattatatcaagcacaagaaggcaccaacagcatatacttaatgtaatgtaaaagtaaacatatgacttgtgttgaattaccattggctggttgacataataagtgtcatagatatttagacattatttctgatcatacaaaattattttcataatttcatattcttttcaattttcataaattcttttcaattttcataaattggagccaatggtttgggaggttttttgtttgtttgtttgtttggttggttggttatttgttgcgttgttgttttccaaacctcagatattttgagaagccttagaaaggctcttaagcccaggcctttttgcctcatgtgcagagtattaataacagccctactgatgtgaacctcaaggaaggaggctattaaattaatccatcactggagatactaatacctcaaacaattaaaacactgaagactctgctggttgccttccacattgtttataacctttttaaattcagtcatttggatcaagagaaataaatggttggtttcatatggcttttgccacattagcacagacacatctaccaaatgtagaagtccagactgagtggatgcatgagagcaaacagatctgtaatatgattgcatttaatcaccgccaccgcccaaattctgtaaaaatatattcaaatatgtaatgctaaaaaaaatgcaaaacaggagactcttactagatcatgctttcacttagggtaggataactgatcttgaagataacttcatagaaaaatttgctggctgaaatgccccaggcacctcagggttggtcctgtcctattccacaaactgatcatggtcttctcccatcttctcagaggagttagccttgcctctaaaatagcaaaaatgccatgaaattatctttctaacctctatagagacttcttatccaagtataattccaaaaatatgatttgagtttgagcatgcctgtggtccttgattctatgatccctaaatcagttctacttttctcactctctctctctctctctctctctctctctctctctctctatatatatatatatatatatatatatatatatatatatatatatatatatatataatctccagtattttttttcaaccacaatttagtgcatttagcgtgttaatgttgggaactgcctgctggctctatgtctacttttgacaatgcttatgtccagataccatacagtgcatttgagagaggaccaaggttatgttttcccacataccagctgctgcagaggtttcgaagtgcctgacccagttctttttcacatcaaaaaggccttcggttgcagatggaaaccttaaagatgaatgtagagtggggtaggaaattcatgtttgaatgctgaaacccttgtcttttttagttttattcaattcccacctcagatcaccagaaagggaggcctctttggtgggtgttggccctcactgggggtaaaaggggttctatttgcttaaactcatgctcgtaggcaattttagggctctctggggctctgaatggtttctccaccaccacctttcttccaccaatagaaagatgttgtccttacaaggccatgtctgagaagaccatggtttaactagtaaaagaagctcacattgcagagagctgaataataccaggctcttgactttgtactgtgtgtcacagtcatgattgggacagaaggaaccagtctgctgaaaagtcaagccagcacaaatatttggaaactaattccactgaaactcttgtatcattaaatcatactattgtagtttcagttaatgtaattatttaatatcaggcactaaattaaatagctttgcacaaaattttagaaaagatcaatcttgtaacaaaatttaatattaacagtaaaaagcacctgagaaaagaaaatatcgatctgttgtggtttatatacttgagttattcttagaactttgtggagattgacactgctctgataaaaaggaagaaaatgttttgaattcaagaatgctagactaatagaaatagcccagtctctctgggccactgctcttcagtatggggtgctctctgtccctccttagcagatggggttgtttggaggctaaaatgagctaagggaagaagctatactgtgcctccaatatcccttatgtgtaattagagtgccgatctgggctgcaggctttattcaatgattcctttcccttacttgaggctttctctgtagagctgttatttctgagcctccattctgggatttacaaaggaaacagaatgatgaagaagtaacaatcagcattttacacacacgcacacacacacacacacacacactttttctaatatatgaggctagtctgcagagtccacagcccaggtgtccatttatttccacttcttcacctcccaaagatttagagctccatgatctaccaaggtgaagactgccaatcccaggttggagaagacccgtcagagtgtggaggtgccaaactgagaggcacaggaagcagacagccacatcaaacttttttgatgaactactgcaaattggtgtttgttctaggaaagaaagaggaagaaaaattacacaatgtgaattgaacataagagcagtgctctttacagagtatgagaagggaggatgggggagaatctgattaaaaaaatgattcattccttcacagacactaacaaacatggctaaaaagcacatgtcagaacacagaagcctaggtagatggttgacatttttataacttccttaagtgagtagttaaaccagcagtcttaattctgttggtcttccaagagtgtttaattacataagtattacctgtattcatttcccacaactgttgggtttttctttctttttttttttttttttttttttcctctgtgcatcctagaaaaactcccaggactagacttaggaggaggcaatcaagttatgtggtaaaacaagagtgccttttctgttggatatccactttagtttcctggcttccagggcataagatgtttagaaactttttttctctaaacataagaattattgtgtaccacaattttgaaccaccgatttccatatcttcagcagctatcaacttgccaattccctttgggtctcctttgtatattcttatgtttccttctgtttccagttgtcctcaaaaagagttgaggggggcatgactcttataaaatggataaaaatgaaactgtacagatgtttgcctcccttgtatctgtgagcatgatctctatcaggctggaaaatctgctttatcattttgtatatttgactattttgtattcagcattacttgactccttatgtgcatggcaatgtattaaaatgtgggatttctattaccgtgt

SEQ ID NO: 186820 - DNA, 520 bp, Homo sapiens
  Payload ID: 16784
  Gene Symbol: SAMD12
  Gene Name: sterile alpha motif domain containing 12
  ENST ID: ENST00000445741
  CDS Start-End: 78-284
gaggaaggggggagcgcggggcaggaggagtacctcggccaagaaaattatgcatgcgttagggaagctctgagagaatggctgtggaagctctccactgtggtttgaatccacggggtattgatcaccctgcccatgctgaaggtattaaactgcaaattgaaggtgaaggtgtggaatctcaatccattaaaaataaaaatttccagaaggtgcctgaccagaaaggaactcccaagcgactgcaggcagaagctgagacggctaagggcgagccctgctgagacttactgacaaaaagctcgagcgaatggggattgcccaggagaacctccggcagcacatcttacaacaggtgctccagctgaaggtgcgagaagaagtcagaaatctacagttactcacacaaggatattcaggaatatggagatatccctgactcttccaaaagaatgaccaagatcatgcctaattacctccatgtcctgggaaagccccgctgtaatggagatggcatctt

SEQ ID NO: 186821 - DNA, 1982 bp, Homo sapiens
  Payload ID: 16784
  Gene Symbol: SAMD12
  Gene Name: sterile alpha motif domain containing 12
  ENST ID: ENST00000453675
  CDS Start-End: 1-445
agctctccactgtggtttgaatccacggggtattgatcaccctgcccatgctgaaggtattaaactgcaaattgaaggtgaaggtgtggaatctcaatccattaaaaataaaaatttccagaaggtgcctgaccagaaaggaactcccaagcgactgcaggcagaagctgagacggctaagtcagctacggtgaagctatctaaaccggtggctctatggacccagcaggatgtctgcaagtggttgaagaaacattgtccgaatcagtatcagatctacaggcgagccctgctgagacttactgacaaaaagctcgagcgaatggggattgcccaggagaacctccggcagcacatcttacaacaggtgctccagctgaaggtgcgagaagaagtcagaaatctacagttactcacacaagcatcatctgagggttctccataaacacggttagccttccaagctgctgtcctgccagttgatatgaacatggcctgttcctcacagaaagactaacccatggcactgccagaagatatccttggatcgtggacagattaactggattaactgaaaaaagcacccattcagtcaatattatgggttttggaaaaatcttgctttgctgtggatttaaaatgaggtgcataatataatgccaactcattccaagtggtcattggcagaccattagctggaaaattgcttccagttttcatcactgtgcataactcaagttccctttggggagctgtctgtgcccttcactagaagtcctgttttagcatggcaactactggattattttattatgtgtgcagatggcatgatgttttagaaaaaaaaaattacagcaattctgcaatctcagtggaagtgttcacaatattatgccctggtaggaatgtaaacacgtctcgattatgttagttatgatgtctaaaggtatactgtccaactcttaagcactttatatgagaacactacaccaagatgaatcagcacattcagcacatgtgagaaatcaagtattttctttttatttttataaatcttagtggtttttttttttccggctcagactgtccaagacaaactccactactcgcatatccccagttgtttgtggtaggttgatgtaaatatggccacaatactgttagacttcacctccagatactttattgaacaactggtttacttctagcaccaaagggaagaagaagggggtccagtgatggtgatatcttagcttgcttctttgttcacaggcactattgaccacatgaacatacaggtactcaaatacaggaggcttctatttggctcctccaagggaggagttcctccaagggaaaaaaggggatggtattcttttaatcaaagaccatggtggatggatggtaagggcaacagaatgcaattcttttgtgtggtctgacgttaacacttcggaaaaaattctaagtcaagttgaaatcgccattctctcaagagagaaacatcaagagagaaacatcaagtgaccccactatgtgcctagagaaggaaaagggtcaagtcctatactaggttccttacttagggtagaacctactagtcccttgttaatcctttctgggattatacctgtgactaatttttttttttttaactatgtcttacgacaaagcacagtcctgggaaaccagtcaacttaattattgcttgtctttgagcattagagacatgttcatattgacttgctacataacactgtagcatgttttttcctgaaaatatcaagttggttgaatggaaagctcagcaaagtatgttctgtgtgcccactgtcccagcctgggactgacgggcatcagaggctttgctttaaaatatgggtaaccagttctggaagacttccaacgcaagcaagcttggtgttttagggtgtctccagatacataagcattgtctgcctccgctcagggtctcaggaaat

SEQ ID NO: 186822 - DNA, 592 bp, Homo sapiens
  Payload ID: 16784
  Gene Symbol: SAMD12
  Gene Name: sterile alpha motif domain containing 12
  ENST ID: ENST00000526328
  CDS Start-End: 130-592
gcggcaggttggtcctggagcagataagcgcagaatatttaggcgaaagcgagaggaaggggggagcgcggggcaggaggagtacctcggccaagaaaattatgcatgcgttagggaagctctgagagaatggctgtggaagctctccactgtggtttgaatccacggggtattgatcaccctgcccatgctgaaggtattaaactgcaaattgaaggtgaaggtgtggaatctcaatccattaaaaataaaaatttccagaaggtgcctgaccagaaaggaactcccaagcgactgcaggcagaagctgagacggctaagtcagctacggtgaagctatctaaaccggtggctctatggacccagcaggatgtctgcaagtggttgaagaaacattgtccgaatcagtatcagatctacagtgagtcattcaaacagcatgacataactgggcgagccctgctgagacttactgacaaaaagctcgagcgaatggggattgcccaggagaacctccggcagcacatcttacaacaggtgctccagctgaaggtgcgagaagaagtcagaaatctacagttactcacacaag

SEQ ID NO: 186823 - DNA, 507 bp, Homo sapiens
  Payload ID: 16784
  Gene Symbol: SAMD12
  Gene Name: sterile alpha motif domain containing 12
  ENST ID: ENST00000526765
  CDS Start-End: 1-507
acgccctgcgcgcgccgagccgggagccggctgcctcgctttgcgtgaccgcggcagctctccactgtggtttgaatccacggggtattgatcaccctgcccatgctgaaggtattaaactgcaaattgaaggtgaaggtgtggaatctcaatccattaaaaataaaaatttccagaaggtgcctgaccagaaaggaactcccaagcgactgcaggcagaagctgagacggctaagtcagctacggtgaagctatctaaaccggtggctctatggacccagcaggatgtctgcaagtggttgaagaaacattgtccgaatcagtatcagatctacagtgagtcattcaaacagcatgacataactgggcgagccctgctgagacttactgacaaaaagctcgagcgaatggggattgcccaggagaacctccggcagcacatcttacaacaggtgctccagctgaaggtgcgagaagaagtcagaaatctacagttactcacacaag

SEQ ID NO: 186824 - DNA, 625 bp, Homo sapiens
  Payload ID: 16784
  Gene Symbol: SAMD12
  Gene Name: sterile alpha motif domain containing 12
  ENST ID: ENST00000524796
  CDS Start-End: 1-462
ggtttgaatccacggggtattgatcaccctgcccatgctgaaggtattaaactgcaaattgaaggtgaaggtgtggaatctcaatccattaaaaataaaaatttccagaaggtgcctgaccagaaaggaactcccaagcgactgcaggcagaagctgagacggctaagtcagctacggtgaagctatctaaaccggtggctctatggacccagcaggatgtctgcaagtggttgaagaaacattgtccgaatcagtatcagatctacagtgagtcattcaaacagcatgacataactgggcgagccctgctgagacttactgacaaaaagctcgagcgaatggggattgcccaggagaacctccggcagcacatcttacaacaggtgctccagctgaaggtgcgagaagaagtcagaaatctacagttactcacacaagcatcatctgagggttctccataaacacggttagccttccaagctgctgtcctgccagttgatatgaacatggcctgttcctcacagaaagactaacccatggcactgccagaagatatccttggatcgtggacagattaactggattaactgaaaaaagcacccattcagtcaatattatgggttt

SEQ ID NO: 186825 - DNA, 1403 bp, Homo sapiens
  Payload ID: 16785
  Gene Symbol: SAMD13
  Gene Name: sterile alpha motif domain containing 13
  Uniprot ID: Q5VXD3
  ENST ID: ENST00000370668
  CDS Start-End: 73-381
ctcacagacgggtttttgaggctttcgttgagaatgtgagttgctgaagtaaaggaaccctgcagccttcccatgctatctgttgacatggaaaacaaggaaaatggctctgtcggtgtaaaaaattccatggaaaatgggagaccacctgatcctgcagactgggccgtgatggatgtcgtcaattatttccgaaccgtgggatttgaggagcaagctagtgcttttcaggaacaggaaattgatggaaaatccctgctattgatgacaagaaatgatgtgttgacaggacttcagttaaaattggggcctgctctgaaaatctacgaatatcatgtaaaacctctgcagacaaagcatttaaagaacaactcttcatagtacagtcaaattggggtcttcgacctcaaaaaatacataatgacataatttagtttcatgtaatgaaactttgtaaacagaatacatacatgtgtatatgtaaagaatttcaatcaaatgaaacgttatcctattggatagactaggcaattcatcagctcacctgaaatcagccaggaggagcaaggacaagatgcgcacagggtggttttcctcatggattttgtcaaatagatgatctttgacacgattagacactcctccccacaaaggctttgaaatcataaggattttcctcatctctttatagctttcccaaaatcttttaaaaaagaatttaattaaatgacagtcttttggttacagacttaggatgagtaaaaacaagaaaatttggggagggggagaaagaagaaagggattgctgtctcccttgaattcctctgttccttagagcttgtgttacttggacggaattgccaacacccttttttatagagggttctccacttgaccttattaaggttttattgggatatgctgcagtgtttgaaatgaacatgcatcatggccccttcaggagcagaatcatagctctgaaaagagaagctccgttgtgtactgaggatatccatccatattcagctagctttcaaatggggtaacgatattttctgcatagattttcttttaaattggttctttgtttctgaagaaagaattttttttaacttcatggttttatttataataatttgtttctgaagaaatttgccgagagttacaggtcaaaaagccttgttactagtacagaatatttttatatatattccttcatgatggtgtaattttttttaattgtcctatgctttgttcggttcctgggttaagtacttgtttttaagagcttggaaaaagtgggcttgctacatctctgttcaaagagacatttgttcaatctctgtgtgtcaacgccttgttgaattggtgctttgtggttgcaataaagcattgcttcagtt

SEQ ID NO: 186826 - DNA, 856 bp, Homo sapiens
  Payload ID: 16785
  Gene Symbol: SAMD13
  Gene Name: sterile alpha motif domain containing 13
  Uniprot ID: Q5VXD3
  ENST ID: ENST00000370669
  CDS Start-End: 328-636
tactttgtgaaagaaaacattggggtttctttggctgttcttgataagcctataaaaaatgatattttttagttgcttataggtaggttttctttttactcttccacagaaaagaaaataatagtaataataataagacaatgtagtgtggtgttgcagagtatcattgtgagtgttttgttttgttttctgagatgcttagaaaatggtgaatgtgtaacagtttccaactgaagtgaaatcatattctgttagcatggagcagcagcactatcttcctgtctactctctaacgttgctgaagtaaaggaaccctgcagccttcccatgctatctgttgacatggaaaacaaggaaaatggctctgtcggtgtaaaaaattccatggaaaatgggagaccacctgatcctgcagactgggccgtgatggatgtcgtcaattatttccgaaccgtgggatttgaggagcaagctagtgcttttcaggaacaggaaattgatggaaaatccctgctattgatgacaagaaatgatgtgttgacaggacttcagttaaaattggggcctgctctgaaaatctacgaatatcatgtaaaacctctgcagacaaagcatttaaagaacaactcttcatagtacagtcaaattggggtcttcgacctcaaaaaatacataatgacataatttagtttcatgtaatgaaactttgtaaacagaatacatacatgtgtatatgtaaagaatttcaatcaaatgaaacgttatcctattggatagactaggcaattcatcagctcacctgaaatcagccaggaggagcaaggacaagatgcgcacagggtggttttcctcatgg

SEQ ID NO: 186827 - DNA, 565 bp, Homo sapiens
  Payload ID: 16785
  Gene Symbol: SAMD13
  Gene Name: sterile alpha motif domain containing 13
  Uniprot ID: Q5VXD3
  ENST ID: ENST00000370670
  CDS Start-End: 101-409
ctttaggtttaatcacatctctccaatcgccgagggaactggagatttaaacaaacatacgtgaactgttgctgaagtaaaggaaccctgcagccttcccatgctatctgttgacatggaaaacaaggaaaatggctctgtcggtgtaaaaaattccatggaaaatgggagaccacctgatcctgcagactgggccgtgatggatgtcgtcaattatttccgaaccgtgggatttgaggagcaagctagtgcttttcaggaacaggaaattgatggaaaatccctgctattgatgacaagaaatgatgtgttgacaggacttcagttaaaattggggcctgctctgaaaatctacgaatatcatgtaaaacctctgcagacaaagcatttaaagaacaactcttcatagtacagtcaaattggggtcttcgacctcaaaaaatacataatgacataatttagtttcatgtaatgaaactttgtaaacagaatacatacatgtgtatatgtaaagaatttcaatcaaatgaaacgttatcctattggatagactaggcaattcatc

SEQ ID NO: 186828 - DNA, 724 bp, Homo sapiens
  Payload ID: 16785
  Gene Symbol: SAMD13
  Gene Name: sterile alpha motif domain containing 13
  Uniprot ID: Q5VXD3
  ENST ID: ENST00000370671
  CDS Start-End: 60-428
cacactcacatactttatgctacatactacacacacaactttttatcagcagaggattgatggcaaacagtttgttggagggagtgtttgctgaagtaaaggaaccctgcagccttcccatgctatctgttgacatggaaaacaaggaaaatggctctgtcggtgtaaaaaattccatggaaaatgggagaccacctgatcctgcagactgggccgtgatggatgtcgtcaattatttccgaaccgtgggatttgaggagcaagctagtgcttttcaggaacaggaaattgatggaaaatccctgctattgatgacaagaaatgatgtgttgacaggacttcagttaaaattggggcctgctctgaaaatctacgaatatcatgtaaaacctctgcagacaaagcatttaaagaacaactcttcatagtacagtcaaattggggtcttcgacctcaaaaaatacataatgacataatttagtttcatgtaatgaaactttgtaaacagaatacatacatgtgtatatgtaaagaatttcaatcaaatgaaacgttatcctattggatagactaggcaattcatcagctcacctgaaatcagccaggaggagcaaggacaagatgcgcacagggtggttttcctcatggattttgtcaaatagatgatctttgacacgattagacactcctccccacaaaggctttgaaatcataaggattttcc

SEQ ID NO: 186829 - DNA, 1567 bp, Homo sapiens
  Payload ID: 16785
  Gene Symbol: SAMD13
  Gene Name: sterile alpha motif domain containing 13
  Uniprot ID: Q5VXD3
  ENST ID: ENST00000370673
  CDS Start-End: 193-543
ccttgtcctgcccagatcttgtcccttctagtactggccttccccattcctgggggcccccgcccctccgacccccgccgaccggcgctggactacaactcccggcgtgccgcgcgcgtccggccggctgcaccggggctttgcgcgtggcggccgccgagctccgcgcggggcaaacctcccggcgcggccatgcggggagttgctgaagtaaaggaaccctgcagccttcccatgctatctgttgacatggaaaacaaggaaaatggctctgtcggtgtaaaaaattccatggaaaatgggagaccacctgatcctgcagactgggccgtgatggatgtcgtcaattatttccgaaccgtgggatttgaggagcaagctagtgcttttcaggaacaggaaattgatggaaaatccctgctattgatgacaagaaatgatgtgttgacaggacttcagttaaaattggggcctgctctgaaaatctacgaatatcatgtaaaacctctgcagacaaagcatttaaagaacaactcttcatagtacagtcaaattggggtcttcgacctcaaaaaatacataatgacataatttagtttcatgtaatgaaactttgtaaacagaatacatacatgtgtatatgtaaagaatttcaatcaaatgaaacgttatcctattggatagactaggcaattcatcagctcacctgaaatcagccaggaggagcaaggacaagatgcgcacagggtggttttcctcatggattttgtcaaatagatgatctttgacacgattagacactcctccccacaaaggctttgaaatcataaggattttcctcatctctttatagctttcccaaaatcttttaaaaaagaatttaattaaatgacagtcttttggttacagacttaggatgagtaaaaacaagaaaatttggggagggggagaaagaagaaagggattgctgtctcccttgaattcctctgttccttagagcttgtgttacttggacggaattgccaacacccttttttatagagggttctccacttgaccttattaaggttttattgggatatgctgcagtgtttgaaatgaacatgcatcatggccccttcaggagcagaatcatagctctgaaaagagaagctccgttgtgtactgaggatatccatccatattcagctagctttcaaatggggtaacgatattttctgcatagattttcttttaaattggttctttgtttctgaagaaagaattttttttaacttcatggttttatttataataatttgtttctgaagaaatttgccgagagttacaggtcaaaaagccttgttactagtacagaatatttttatatatattccttcatgatggtgtaattttttttaattgtcctatgctttgttcggttcctgggttaagtacttgtttttaagagcttggaaaaagtgggcttgctacatctctgttcaaagagacatttgttcaatctctgtgtgtcaacgccttgttgaattggtgctttgtggttgcaataaagcattgcttcagttta

SEQ ID NO: 186830 - DNA, 785 bp, Homo sapiens
  Payload ID: 16785
  Gene Symbol: SAMD13
  Gene Name: sterile alpha motif domain containing 13
  Uniprot ID: Q5VXD3
  ENST ID: ENST00000394834
  CDS Start-End: 229-537
gaaggcagttggtgcagcttgtgtgtgattcctaacgtcatgttggctgagagccagcctggttttatttcactgtgtcaaattgtacctccttattgaattcctttgccagcctactttgtgaaagaaaacattggggtttctttggctgttcttgataagcctataaaaaatgatattttttagttgcttatagttgctgaagtaaaggaaccctgcagccttcccatgctatctgttgacatggaaaacaaggaaaatggctctgtcggtgtaaaaaattccatggaaaatgggagaccacctgatcctgcagactgggccgtgatggatgtcgtcaattatttccgaaccgtgggatttgaggagcaagctagtgcttttcaggaacaggaaattgatggaaaatccctgctattgatgacaagaaatgatgtgttgacaggacttcagttaaaattggggcctgctctgaaaatctacgaatatcatgtaaaacctctgcagacaaagcatttaaagaacaactcttcatagtacagtcaaattggggtcttcgacctcaaaaaatacataatgacataatttagtttcatgtaatgaaactttgtaaacagaatacatacatgtgtatatgtaaagaatttcaatcaaatgaaacgttatcctattggatagactaggcaattcatcagctcacctgaaatcagccaggaggagcaaggacaagatgcgcacagggtggttttcctcatggattttgtcaaatagatgatctttgacac

SEQ ID NO: 186831 - DNA, 362 bp, Homo sapiens
  Payload ID: 16785
  Gene Symbol: SAMD13
  Gene Name: sterile alpha motif domain containing 13
  ENST ID: ENST00000454967
  CDS Start-End: 1-153
gtgatggatgtcgtcaattatttccgaaccgtgggatttgaggagcaagctagtgcttttcaggaacaggataaagttactgacagagataaatacctagaatgcacaccaatcgagagctggagtggtcaaatcaaagggctgctgctatgataaggcctacttctgcctgcctaccctcagaaacaggatctcactatgttgcccaggctggagcatagtggttattcacaggcgtgatcccactactgatcagtacaggagtttcatctctttttgataaagaagactgaggatcccacacaggtgcacactgttttgtgctatagatgtacaactaataaaacaaatccttgtcaata

SEQ ID NO: 186832 - DNA, 2874 bp, Homo sapiens
  Payload ID: 16786
  Gene Symbol: SAMD14
  Gene Name: sterile alpha motif domain containing 14
  ENST ID: ENST00000285206
  CDS Start-End: 1-1290
agccggtttcccagcgggattccggtggaggagtcaggaggagtcctgagcaaaggaacttggaggaatgagggagaggacctggacttggctgtgccagagacggccagactggacagcagtttacacaaggcccgggcccaactgttggccaagggccggagacaccggccatcccgctccaggcttcgggacagtgccagctccgcggaggatggtgaaggctcggatgggcccggaggcaaggtgaccgatggctgcgggagccccctgcaccggctgcgctcgcctttgcactcaggcccggggtccccggccgggggctctttctgcctggatcctccggggttgcggcgcagcctggacgaggacgagccgccgccctcgccgctcacacgctaccggcccctgcacaacgctgcgtcgcacgagggcctggccgccgcctcctgctctccgccgcgctccgcgccctcctccgacagctcccccagcttcgtgcgccgccacccgcgcgcagagccgcacagcgaagatgacagccgtgacgccagtcctcctgagcccgccagccccaccatcggcctcgataagaagactcgccgaaagttcctggacctgggggtcaccctgcgccgagcatccacgggcaagagccggaaggagaaaggcagcaaccgactgtccatgggcagcagggagtcagtggaggggtccggcaggtcagggggctccccgttcctgcctttttcctggttcacggacagcggcaagggctcagcatcctcgggtagcaccacctcccccacctgctcccctaaacacgagggcttcagccctaagaagtcagcttcccaggaatccactctgagtgatgactccacgccccccagcagcagccccaagatccccagtgggccctggcaggaggccaaatgttcttacccctaccacacgctgtctcagtcttcagatgagttcctggatgaacccctcccccctgtccaccactggaccagccagcaggtgggccagtggctgcagagcctcaacctggaacagtatgctgctgagtttgctgcacggcaggtagacgggccgcagctgctgcagctggacggaagcaaactaaagagcctggggctcagcaactctcatgaccgggcactggtgaagcgcaagttgaaggagatggcagcagctgccgagaaggagcgcaaggcccaggagaaggctgcgcggcagcgggagaagctccggcgccgagagcaggaggccaagaagagctaggggagggtgcacaggcgctggcacccggcaggggcagccactggctccgcgggcacaggcctcaccagggaggctggacctgggcgctgcacttgggctagcctggtcccacgctctcaggggggacatgctctctcttaccctgtcacttggtctagacccagagaccccagaaagggagaccccagggagagggcctagtaataaatcctattttgaggacttgtttggcacagagttcctgggggaggagcagatgaaggggagagggcagagaggccagggctgaggcaagtctgggaggctgggtcaggctgtcccattgccctcaggccatcgtggggctggggtggaggggagctaggaggcctgcctgcctgcttgcctgccagaggccctgaggccgggccccagggctcagagctgggctgggcatttcagcaggagcccatgtgggagcggctcctctccactcttccagggggctgtgtggtgggagagctctgtcctgctcccccaagaggccagtgggcgctgcagcaagtcgcactcagggtagactcccagccaaactcctcaacaggagcgcagagaaagcagcctggggcgagtgcagtctttgccaggactcaagaggggaggatgaacatccccttctccctctcccctcctctgtcctgtgggtcccagggggcgagatgacaccacacaggtctgcctctcagggcccattcaagacctggtctttgacccattctccaagccaggactcccttcacttcctgctgcttcctcagagggcacctaagtcctctttgggagctgagcaaacaggaactgatagggacagaggacaccacttccaccagccaaggcctaggagctgctgacctggtcagccctcaccccagccaggcagagaggcaaaacctgggggtccccggcagctacgagattggaaaggttcatcagccctcccccatctgccccaggcattgtcagggaatcagtgggctcagaactggcaggcggtgcaagctctgcttccctgggccacactgagggctggggccagctccctggatgggggtggagtttaccagcagcctggggacagcatgtgtcctttttaggaaatgtccttggaggaagtgttcatgtgtggcgctggtcagcagctagtcccgcttccaggacactggtcagagttaccgatgaggcctgggggctcccgcttggaaacccctccagctcctcccatctgcccagacagagcggcagatggcaccaatgcatgctggctccctcattcctgcccaggggctgtggcttacggccagcaccctgtacctgggactcagcccttatcccccctctgctatctgtgctgggagaggggcttcggagggaaacagatatgaggacactggcaccatctgggcctggtggcagggccatgggaggttggaaggcacccacatccttaaagccatcagtagctatagtgggtgcccacctgcatgtgaaggggaggcagttctcaatttatttcaataaatccttatgatgtgccagtgaccagaa

SEQ ID NO: 186833 - DNA, 4425 bp, Homo sapiens
  Payload ID: 16786
  Gene Symbol: SAMD14
  Gene Name: sterile alpha motif domain containing 14
  Uniprot ID: Q8IZD0
  ENST ID: ENST00000330175
  CDS Start-End: 319-1572
cgcacacgcacacacacacggagcatcctcccgtcaggtctcctggtccagccccgcccgcgcctcctgcttccagcgaacctgttccctctccccacatcccccgccctccatctcccccggctctgggacccttcccgccgacctcacccccacccccgggatggagcggctcgagcccgcccggagccccccgcggccggggtgacggtccccccacccctctcctgcccggcccccgcctcgagcaccatgggcctgaggggttcccggggcgccagacgctgaagatgaccgatgccggagctctcttgagtcatggcttcttcaaagctccgagaacccgtggatgaagtttttgacctggacttggctgtgccagagacggccagactggacagcagtttacacaaggcccgggcccaactgttggccaagggccggagacaccggccatcccgctccaggcttcgggacagtgccagctccgcggaggatggtgaaggctcggatgggcccggaggcaaggtgaccgatggctgcgggagccccctgcaccggctgcgctcgcctttgcactcaggcccggggtccccggccgggggctctttctgcctggatcctccggggttgcggcgcagcctggacgaggacgagccgccgccctcgccgctcacacgctaccggcccctgcacaacgctgcgtcgcacgagggcctggccgccgcctcctgctctccgccgcgctccgcgccctcctccgacagctcccccagcttcgtgcgccgccacccgcgcgcagagccgcacagcgaagatgacagccgtgacgccagtcctcctgagcccgccagccccaccatcggcctcgataagaagactcgccgaaagttcctggacctgggggtcaccctgcgccgagcatccacgggcaagagccggaaggagaaaggcagcaaccgactgtccatgggcagcagggagtcagtggaggggtccggcaggtcagggggctccccgttcctgcctttttcctggttcacggacagcggcaagggctcagcatcctcgggtagcaccacctcccccacctgctcccctaaacacgagggcttcagccctaagaagtcagcttcccaggaatccactctgagtgatgactccacgccccccagcagcagccccaagatccccagtgggccctggcaggaggccaaatgttcttacccctaccacacgctgtctcagtcttcagatgagttcctggatgaacccctcccccctgtccaccactggaccagccagcaggtgggccagtggctgcagagcctcaacctggaacagtatgctgctgagtttgctgcacggcaggtagacgggccgcagctgctgcagctggacggaagcaaactaaagagcctggggctcagcaactctcatgaccgggcactggtgaagcgcaagttgaaggagatggcagcagctgccgagaaggagcgcaaggcccaggagaaggctgcgcggcagcgggagaagctccggcgccgagagcaggaggccaagaagagctaggggagggtgcacaggcgctggcacccggcaggggcagccactggctccgcgggcacaggcctcaccagggaggctggacctgggcgctgcacttgggctagcctggtcccacgctctcaggggggacatgctctctcttaccctgtcacttggtctagacccagagaccccagaaagggagaccccagggagagggcctagtaataaatcctattttgaggacttgtttggcacagagttcctgggggaggagcagatgaaggggagagggcagagaggccagggctgaggcaagtctgggaggctgggtcaggctgtcccattgccctcaggccatcgtggggctggggtggaggggagctaggaggcctgcctgcctgcttgcctgccagaggccctgaggccgggccccagggctcagagctgggctgggcatttcagcaggagcccatgtgggagcggctcctctccactcttccagggggctgtgtggtgggagagctctgtcctgctcccccaagaggccagtgggcgctgcagcaagtcgcactcagggtagactcccagccaaactcctcaacaggagcgcagagaaagcagcctggggcgagtgcagtctttgccaggactcaagaggggaggatgaacatccccttctccctctcccctcctctgtcctgtgggtcccagggggcgagatgacaccacacaggtctgcctctcagggcccattcaagacctggtctttgacccattctccaagccaggactcccttcacttcctgctgcttcctcagagggcacctaagtcctctttgggagctgagcaaacaggaactgatagggacagaggacaccacttccaccagccaaggcctaggagctgctgacctggtcagccctcaccccagccaggcagagaggcaaaacctgggggtccccggcagctacgagattggaaaggttcatcagccctcccccatctgccccaggcattgtcagggaatcagtgggctcagaactggcaggcggtgcaagctctgcttccctgggccacactgagggctggggccagctccctggatgggggtggagtttaccagcagcctggggacagcatgtgtcctttttaggaaatgtccttggaggaagtgttcatgtgtggcgctggtcagcagctagtcccgcttccaggacactggtcagagttaccgatgaggcctgggggctcccgcttggaaacccctccagctcctcccatctgcccagacagagcggcagatggcaccaatgcatgctggctccctcattcctgcccaggggctgtggcttacggccagcaccctgtacctgggactcagcccttatcccccctctgctatctgtgctgggagaggggcttcggagggaaacagatatgaggacactggcaccatctgggcctggtggcagggccatgggaggttggaaggcacccacatccttaaagccatcagtagctatagtgggtgcccacctgcatgtgaaggggaggcagttctcaatttatttcaataaatccttatgatgtgccagtgaccagaatttctgtctgctccagttgttgggttggccggactctgctgggccctgagtatggtgggacaacaggtctgtcaccaggtgctgggccatccggcgttctgaacagatggctttgcccagtgttttactcacagtcctgagctgggccggacgtccccggtgcgtcatgtggtggtcacagggcaccgcagtgtgcgtgtgtacgtgcgcacgtgtgggtcccctcccccagggatgcagccaggccagtctcattcagtctcctctttactgtgggtgtgggtgtcactgtcactgccacagccactgggagggacacacagctttaacccctgtgtgcttaggggaagggtgggggcattcagggttataaaactaactatatacacagaaggtcctagggagaaagccaccctgagcacacatgtctgggcacagtgggggctgggggctggagctcaggcaggatggactaggcttgtggaggagcgggtgggcatgagcatgtgaggacatgctgggagggctcaggaggtggcacagacattgccaaggccactgcagggcctcgagcagcttggctggatggcaagctctcggtctaacaaggttcttccactttagagttgggccctgtgagagccaccccctccgccaccgaccttcaagccctgagcggagggagaggctgcaggaccagcctcattccccactcacgggtgtaactcctttccccactcagtccccaggtctggagggcacccaccctcttcctaacacttcagcaggccaaggccagggtgcctttgtgggctgggggaataaggcaacgggacatccacttggaaggcctgtgctgtggagggtgctgagggggacccagtacccctggcagaaaagtgacagccctggtctcagagaggaggactgccatgggaaaatgtctctgggacaccccatcagggtggagacatccctaaccctcaggcatcgcccacagagatagggaggccaccgaggggtctccacagagatggactggcacttagggaccatcacagacctatcaccgcagtgacttccatagagacagaacctggtcatcagggagaacccaccccctgctcccccaggaggatggtgaggggcaccacggtggggggacccagaggcggcagtccgtcctctcaggtgcagatgcacggcggcccttagctgacgcggtacgtggacgtgttcttgggctccgtgctgggcacacaccagtcg

SEQ ID NO: 186834 - DNA, 560 bp, Homo sapiens
  Payload ID: 16786
  Gene Symbol: SAMD14
  Gene Name: sterile alpha motif domain containing 14
  ENST ID: ENST00000511964
  CDS Start-End: 521-560
gcttccagcgaacctgttccctctccccacatcccccgccctccatctcccccggctctgggacccttcccgccgacctcacccccacccccgggatggagcggctcgagcccgcccggagccccccgcggccggggtgacggtccccccacccctctcctgcccggcccccgcctcgagcaccatgggcctgaggggttcccggggcgccagacgctgaagatgaccgatgccggagatttgattggacagttgatgattgaaagcttttaggggatgctaatgatgcgaaggcccaagacagtgaaggggagaagttcagtgacccacgtgaaggcacacagcaaatcagtggaccaggataccaggaccacagggctcagcctgtgtctgtgccttggttttgcgtctgcccccaccctcctactatactgcctgccccggcgcccaccatctgggttatgattccagtggcttctcttccaggggacagaagaagggttctaagctctcttgagtcatggcttcttcaaagctccgagaacccgtggatgaagttt

SEQ ID NO: 186835 - DNA, 1938 bp, Homo sapiens
  Payload ID: 16786
  Gene Symbol: SAMD14
  Gene Name: sterile alpha motif domain containing 14
  Uniprot ID: Q8IZD0
  ENST ID: ENST00000503131
  CDS Start-End: 379-1716
ggcgctcgctcttcgctcttctctctctctctctctctgtcacacacacacacacgcacacgcacacgcacacacacacggagcatcctcccgtcaggtctcctggtccagccccgcccgcgcctcctgcttccagcgaacctgttccctctccccacatcccccgccctccatctcccccggctctgggacccttcccgccgacctcacccccacccccgggatggagcggctcgagcccgcccggagccccccgcggccggggtgacggtccccccacccctctcctgcccggcccccgcctcgagcaccatgggcctgaggggttcccggggcgccagacgctgaagatgaccgatgccggagctctcttgagtcatggcttcttcaaagctccgagaacccgtggatgaagtttttgacctggacttggctgtgccagagacggccagactggacagcagtttacacaaggcccgggcccaactgttggccaagggccggagacaccggccatcccgctccaggcttcgggacagtgccagctccgcggaggatggtgaaggctcggatgggcccggaggcaaggtgaccgatggctgcgggagccccctgcaccggctgcgctcgcctttgcactcaggcccggggtccccggccgggggctctttctgcctggatcctccggggttgcggcgcagcctggacgaggacgagccgccgccctcgccgctcacacgctaccggcccctgcacaacgctgcgtcgcacgagggcctggccgccgcctcctgctctccgccgcgctccgcgccctcctccgacagctcccccagcttcgtgcgccgccacccgcgcgcagagccgcacagcgaagatgacagccgtgacgccagtcctcctgagcccgccagccccaccatcggcctcgataagaagactcgccgaaagttcctggacctgggggtcaccctgcgccgagcatccacgggcaagagccggaaggagaaaggcagcaaccgactgtccatgggcagcagggagtcagtggaggggtccggcaggtcagggggctccccgttcctgcctttttcctggttcacggacagcggcaagggctcagcatcctcgggtagcaccacctcccccacctgctcccctaaacacgagggcttcagccctaagaagtcagcttcccaggcccagctcctggctcatgcacaggaggcactgagcaactcctggtgcctagtccaggacttcggctccacccagatagggatggaatccactctgagtgatgactccacgccccccagcagcagccccaagatccccagtgggccctggcaggaggccaaatgttcttacccctaccacacgctgtctcagtcttcagatgagttcctggatgaacccctcccccctgtccaccactggaccagccagcaggtgggccagtggctgcagagcctcaacctggaacagtatgctgctgagtttgctgcacggcaggtagacgggccgcagctgctgcagctggacggaagcaaactaaagagcctggggctcagcaactctcatgaccgggcactggtgaagcgcaagttgaaggagatggcagcagctgccgagaaggagcgcaaggcccaggagaaggctgcgcggcagcgggagaagctccggcgccgagagcaggaggccaagaagagctaggggagggtgcacaggcgctggcacccggcaggggcagccactggctccgcgggcacaggcctcaccagggaggctggacctgggcgctgcacttgggctagcctggtcccacgctctcaggggggacatgctctctcttaccctgtcacttggtctagacccagagaccccagaaagggagaccccagggagagggcctagtaataaatcctattttgagga

SEQ ID NO: 186836 - DNA, 2564 bp, Homo sapiens
  Payload ID: 16787
  Gene Symbol: SAMD15
  Gene Name: sterile alpha motif domain containing 15
  Uniprot ID: Q9P1V8
  ENST ID: ENST00000216471
  CDS Start-End: 287-2311
acagccgagcgcagcctgcaggccggaagaagcggcgcggcggccgcttgaaaagctagctgacccaggggcggccacaggagctctggcccgctgaggctggcgatgaggccgcagggagggttactgcgtgcttgtgacagacgatttttaaagtcagggcttgaaagaacaaacaaaacctggggaagagtcaggaagacactgccggaaatcgtggtatccatagagacgctatcggaagttggggttgctaggaagccgcggcgcgtctgctaagctgcaaatggctgaagtcccggaggattatgattccggcccagatgaagatggagagctggagcctgagaggcctgaactgcctggacttcataaattgtatgaaaatgccgaaccagacaccatggcaaaggcagactcgaagctaccagcagagatttaccaagagccacagccagagaccgaggaagaggacttcaaagagggggagccagacagtgctaagaacgtgcagctgaaacctggcgggacgtcccaggaaggaattgccaaggagtccaagagagacgtaccaagcgaaactgaaccagggatacaccaagaggtaaagtcggaaacatccagagagatgggagagtttttcaaagatttggaggcccctatggatgaaacgcataaagagtcagacctagagccaccagaggaggctaaaccaaatgttacagaggatgtgttcctagagtcagctatggaaacagatccagatccagtgccaccaacggaaaccatgtctgaggtttcgggggccacagtcagagagagaaatttagaattactagaggaggagactgaaccgggggttccagaggaatcacttagagtgcaacatgaagagacaggtctagagcctccagagcagaccaaacaagattttccaagtgagaaactaggagaatcacttgaagagacagatcttcagccaccaaagatgaccaaaccagagactccagaggagacacaaagagagtcaactgagaagaaaaggacagagccacccgagcaggctagactggaatttctggagaaggaaccaagaaagtctagtgaggaggcaggtctagagcctccagaagagactcaaccagaggttccagaggagatgcaaagaaaggcaactgaggagaaagggacagaactacctgagcggactaaaccagactttccagaccacaagccaagaaagtctactgatgagaacgttcctgagccactagaagagatcaaattagagtttcctgaggaagaatcaagaaaaacaaatgaggaaacaattctagaacaatcagaaatgatgaaaccagaaagtccagaagagataagaaagtcaaatgagaaaaaaaatccacagccaccagaggagactggtccagtgctaccacaggagatcaacccacaagttgaagagaaaacacaaacaaagccaactgagaaaattctagagttaccagatgaaaccaaaccaagggagacacatgtagaattttccaaggaagacaggccagaaccaataaagtctaagtattctgtaggaaacgatgagctagagcaccgtgagcctaaaagaggaaagttgtcactaagtgacaaatttagaaaagaatattacgcattaggatctctcagagaaagtgaagaatcaattggtacacattatgagtttttgcaaccactccaaaaattgcttaatgtcagtgaagaatgctcatactcagatccctcagagtctcagacagaattaagtgagttcgttcatgaaaaggaagttgtagatttgtcccaagagttgaaggaacgggtctctgaagatgacgaaacccagccagaaaaagggactgagttacaatttgagcatcttaattgggatccagaggaagttgcagagtggattagccagctaggcttccctcaatacaaggagtgttttatcacaaacttcatcagtggccgaaaactcattcacgtcaactgctcaaacctccctcagatggggataacaaactttgaggacatgaaggcaatttctcggcatacgcaggagctcctggaaattgaagagccattattcaaacgctccatcagccttccctatagggatattatcggcttatatttagagcaaaaaggtcatactgggataaaatctgattccttgactttatctgaatttgtcaaagcagcaggattacaggattatgctccagaaataactgcccctgaagagaatgaggaattaccttgcactgaaccataggggaaatccacttcacagagcttgaaagatcaaactaaattacttgagggaagaggtatggtcttttttggttttctttttctccttttttttttttttatttttttgagacagagtcttgctctgtcgcccaggctggagtgcaatggcacagtctcagctcactgcaaccttgcgattctcctgtctcagcctcccgagtagctgggattacaggcatccgccatcatgcccagctaatttttgtattttt

SEQ ID NO: 186837 - DNA, 412 bp, Homo sapiens
  Payload ID: 16787
  Gene Symbol: SAMD15
  Gene Name: sterile alpha motif domain containing 15
  ENST ID: ENST00000533095
  CDS Start-End: 122-388
ggcagatctcagaaaggaagcggggcaggaatcaaggcatttcgaaacaggagagtgttttatcacaaacttcatcagtggccgaaaactcattcacgtcaactgctcaaacctccctcagatggggataacaaactttgaggacatgaaggcaatttctcggcatacgcaggagctcctggaaattgaagagccattattcaaacgctccatcagccttccctatagggatattatcggcttatatttagagcaaaaaggtcatactgggataaaatctgattccttgactttatctgaatttgtcaaagcagcaggattacaggattatgctccagaaataactgcccctgaagagaatgaggaattaccttgcactgaaccataggggaaatccacttcacagagcttg

SEQ ID NO: 186838 - DNA, 993 bp, Homo sapiens
  Payload ID: 16788
  Gene Symbol: SAMD3
  Gene Name: sterile alpha motif domain containing 3
  Uniprot ID: Q8N6K7
  ENST ID: ENST00000324172
  CDS Start-End: 18-683
atttacaggagacagcaatggaaacctggtcagttgagcaggtctgcagttggttggtggagaaaaatttaggagagctagttcatagatttcaagaggaagaagtaagtggggccgctcttcttgcacttaatgatcggatggttcagcaactggtaaagaaaattgggcaccaggctgttctgatggatttaattaaaaaatacaagcagaacactcaaggactgaagtccccagaaaaccccaaaaaggcagccctggtcatgcaaacagaagcagctcgagattacagggatgaagagtcctccagtccagccaggcatggggagcagatgccatctttctatccagctgaaaaccttgataatggactaattgaccaaagagtattgaaacagagaagaaatgtgaaacaaattctagcaagaagcaaagcattacagtggacgaagtcctatgttttaccagagtttccctatgatgtcaaatgcatgttagcagagcagaagtgcccggatcacagcatgaggataaggatcattgagtttctccaggccgacatgactaagtatctggaaggctcactgtaccccagcacccagcagtacaatgacgtggttaatgccctgctgcaggcccaccctttcctggatgaggatggctgtggcttcgctggagtatagtggcgcgatctcagctcactgcaacctccgcctcctgggttcaagcaattctctggggcagcagttctaagctctggttgcacattaggattcctagagattcagattgaattaatttgaggatgggattattctaatgtacaaccacggctgagaaccactgccgctgacgtttcaacacaaagtttgctgtttgaacctgcctgtctcctggatttcaaagaccactgtcttcattgcacaacaatgtgaatataatcaacactattgaactgtacctaagaatagttaataaaaaactgagtgttta

SEQ ID NO: 186839 - DNA, 2377 bp, Homo sapiens
  Payload ID: 16788
  Gene Symbol: SAMD3
  Gene Name: sterile alpha motif domain containing 3
  Uniprot ID: Q8N6K7
  ENST ID: ENST00000368134
  CDS Start-End: 610-2172
aaaagacgcggccaaggcccgctccgtccacgcttcccgccggcccggcaaggggttccggagaacggcttgggggggcgagaaccatgggcgggggaaatggaagacagagggaactgaagcacgggggtcttcgatgagcagtgcggatgttcgactccaaacatcaaagccaacgagaggttcaggttactcctccttgaccccaaacatccagtgagtggagactggcctgttcacagagtaaaatatgtcgtctctaattcggcaaagacggtgatgactgtatatatgcaggccaattccgctctccaagagattctaactcagtcacagtttgaaccactactgaaccactgctgttaggaagctacaacccaaaagaaaagccccacagatgctgagagctggtgatcctcaggataaaacaaaggaaccagaaccacatccactgatcggatttgcctggggaggaggggtgctctctcctttgatcttctcttctggaagagatggaccaaaagcctctccagcaataatccgaaatgattcttgaagactatctttccagcttgtcacatatgcaaggtgtatttacaggagacagcaatggaaacctggtcagttgagcaggtctgcagttggttggtggagaaaaatttaggagagctagttcatagatttcaagaggaagaagtaagtggggccgctcttcttgcacttaatgatcggatggttcagcaactggtaaagaaaattgggcaccaggctgttctgatggatttaattaaaaaatacaagcagaacactcaaggactgaagtccccagaaaaccccaaaaaggcagccctggtcatgcaaacagaagcagctcgagattacagggatgaagagtcctccagtccagccaggcatggggagcagatgccatctttctatccagctgaaaaccttgataatggactaattgaccaaagagtattgaaacagagaagaaatgtgaaacaaattctagcaagaagcaaagcattacagtggacgaagtcctatgttttaccagagtttccctatgatgtcaaatgcatgttagcagagcagaagtgcccggatcacagcatgaggataaggatcattgagtttctccaggccgacatgactaagtatctggaaggctcactgtaccccagcacccagcagtacaatgacgtggttaatgccctgctgcaggcccaccctttcctggatgaggatggctgtggcttctttttatggaaacgagccctcaaagatcgctttaaatatgttcgaagacccatagaagatgatgagcaagtgattagaaataagtgtaaatttggacaccgaagaggccagacaaggaaatctcttgctgatataagatttgatgaaattaaacttgtccagataaaagaagaagctgtttgttttgattctgagctagatgaacatattaagtggttccagcaagaatacgtgaaaacagaaaaggactggagagaaattgacaagagaatgagccaaactttggaaataagaagaaagatgattggcagccgaacacctctgaaggacattcttaaactgtttcctttcttgaagtgcccttatcagatgttcagagaattccaacttcttacaagaacagatatttataagaaaacaaggcacattttggaatcctattcagaaaatatactgacttctttttcagtggtggacaatccaatcaatattgtattgcaagaaaaaatgaaacattacacagatgaagacatgttgaaatacatgaagatgacagccacatgtttactcctcccagatgtttttggggatgatcccagcctttttgtcatcatgaatgaacaggtgcaagtgtccacacctgtgttggaagttaaaaaccctttcaacatggaggtctgcgaattttctttatatttagaaagggagaggctcacaaaggtggacgactgtgttacagccttggctgcgctagtagctgcctttcatgtatttaggattgagtgtccaagaagactgtcccaaactttcaacttcctagaaacgctgattttcgatatgcacagtccttattttccttctttgaaagaaaaggaaaacgaagtaggatttcagcacccactcacttaatagcatgccaaatattgtactggaatttacctctgggaaaactgaagcttcataagaaattgttttgatttagggttgtggtagaggtaggtatgagaaaatcatcttgtatttatagatgctaatgaatttcaatgctttctatctttacacttagatattaagttctttgtgaaattctgtaataaaattctacttcattaaa

SEQ ID NO: 186840 - DNA, 2028 bp, Homo sapiens
  Payload ID: 16788
  Gene Symbol: SAMD3
  Gene Name: sterile alpha motif domain containing 3
  Uniprot ID: Q8N6K7
  ENST ID: ENST00000437477
  CDS Start-End: 327-1889
ataaaacaaaggaaccagaaccacatccactgatcggatttgcctggggaggaggggtgctctctcctttgatcttctcttctggaagagatggaccaaaagcctctccagcaataatccgtccacttacatgcagattttcttctgcctctgccacccctgagacagcaagaccaactctcctcttcctcctcctcctcctcagcctactcactgcaagacgacgagtatgaagatctttatgatgatccacttccatgaaatgattcttgaagactatctttccagcttgtcacatatgcaaggtgtatttacaggagacagcaatggaaacctggtcagttgagcaggtctgcagttggttggtggagaaaaatttaggagagctagttcatagatttcaagaggaagaagtaagtggggccgctcttcttgcacttaatgatcggatggttcagcaactggtaaagaaaattgggcaccaggctgttctgatggatttaattaaaaaatacaagcagaacactcaaggactgaagtccccagaaaaccccaaaaaggcagccctggtcatgcaaacagaagcagctcgagattacagggatgaagagtcctccagtccagccaggcatggggagcagatgccatctttctatccagctgaaaaccttgataatggactaattgaccaaagagtattgaaacagagaagaaatgtgaaacaaattctagcaagaagcaaagcattacagtggacgaagtcctatgttttaccagagtttccctatgatgtcaaatgcatgttagcagagcagaagtgcccggatcacagcatgaggataaggatcattgagtttctccaggccgacatgactaagtatctggaaggctcactgtaccccagcacccagcagtacaatgacgtggttaatgccctgctgcaggcccaccctttcctggatgaggatggctgtggcttctttttatggaaacgagccctcaaagatcgctttaaatatgttcgaagacccatagaagatgatgagcaagtgattagaaataagtgtaaatttggacaccgaagaggccagacaaggaaatctcttgctgatataagatttgatgaaattaaacttgtccagataaaagaagaagctgtttgttttgattctgagctagatgaacatattaagtggttccagcaagaatacgtgaaaacagaaaaggactggagagaaattgacaagagaatgagccaaactttggaaataagaagaaagatgattggcagccgaacacctctgaaggacattcttaaactgtttcctttcttgaagtgcccttatcagatgttcagagaattccaacttcttacaagaacagatatttataagaaaacaaggcacattttggaatcctattcagaaaatatactgacttctttttcagtggtggacaatccaatcaatattgtattgcaagaaaaaatgaaacattacacagatgaagacatgttgaaatacatgaagatgacagccacatgtttactcctcccagatgtttttggggatgatcccagcctttttgtcatcatgaatgaacaggtgcaagtgtccacacctgtgttggaagttaaaaaccctttcaacatggaggtctgcgaattttctttatatttagaaagggagaggctcacaaaggtggacgactgtgttacagccttggctgcgctagtagctgcctttcatgtatttaggattgagtgtccaagaagactgtcccaaactttcaacttcctagaaacgctgattttcgatatgcacagtccttattttccttctttgaaagaaaaggaaaacgaagtaggatttcagcacccactcacttaatagcatgccaaatattgtactggaatttacctctgggaaaactgaagcttcataagaaattgttttgatttagggttgtggtagaggtaggtatgagaaaatcatcttgtatttatagatgctaatgaatttcaatgct

SEQ ID NO: 186841 - DNA, 1877 bp, Homo sapiens
  Payload ID: 16788
  Gene Symbol: SAMD3
  Gene Name: sterile alpha motif domain containing 3
  Uniprot ID: Q8N6K7
  ENST ID: ENST00000457563
  CDS Start-End: 41-1675
aaatgtgggtcctacttcctcttcttgctaacggaaaacaatgagaagcagcaagttacaatctccttctcctagccaggagaagcaaggggtgtatttacaggagacagcaatggaaacctggtcagttgagcaggtctgcagttggttggtggagaaaaatttaggagagctagttcatagatttcaagaggaagaagtaagtggggccgctcttcttgcacttaatgatcggatggttcagcaactggtaaagaaaattgggcaccaggctgttctgatggatttaattaaaaaatacaagcagaacactcaaggactgaagtccccagaaaaccccaaaaaggcagccctggtcatgcaaacagaagcagctcgagattacagggatgaagagtcctccagtccagccaggcatggggagcagatgccatctttctatccagctgaaaaccttgataatggactaattgaccaaagagtattgaaacagagaagaaatgtgaaacaaattctagcaagaagcaaagcattacagtggacgaagtcctatgttttaccagagtttccctatgatgtcaaatgcatgttagcagagcagaagtgcccggatcacagcatgaggataaggatcattgagtttctccaggccgacatgactaagtatctggaaggctcactgtaccccagcacccagcagtacaatgacgtggttaatgccctgctgcaggcccaccctttcctggatgaggatggctgtggcttctttttatggaaacgagccctcaaagatcgctttaaatatgttcgaagacccatagaagatgatgagcaagtgattagaaataagtgtaaatttggacaccgaagaggccagacaaggaaatctcttgctgatataagatttgatgaaattaaacttgtccagataaaagaagaagctgtttgttttgattctgagctagatgaacatattaagtggttccagcaagaatacgtgaaaacagaaaaggactggagagaaattgacaagagaatgagccaaactttggaaataagaagaaagatgattggcagccgaacacctctgaaggacattcttaaactgtttcctttcttgaagtgcccttatcagatgttcagagaattccaacttcttacaagaacagatatttataagaaaacaaggcacattttggaatcctattcagaaaatatactgacttctttttcagtggtggacaatccaatcaatattgtattgcaagaaaaaatgaaacattacacagatgaagacatgttgaaatacatgaagatgacagccacatgtttactcctcccagatgtttttggggatgatcccagcctttttgtcatcatgaatgaacaggtgcaagtgtccacacctgtgttggaagttaaaaaccctttcaacatggaggtctgcgaattttctttatatttagaaagggagaggctcacaaaggtggacgactgtgttacagccttggctgcgctagtagctgcctttcatgtatttaggattgagtgtccaagaagactgtcccaaactttcaacttcctagaaacgctgattttcgatatgcacagtccttattttccttctttgaaagaaaaggaaaacgaagtaggatttcagcacccactcacttaatagcatgccaaatattgtactggaatttacctctgggaaaactgaagcttcataagaaattgttttgatttagggttgtggtagaggtaggtatgagaaaatcatcttgtatttatagatgctaatgaatttcaatgctttctatctttacacttagatattaagttctttgtgaaattctgtaataaaattctacttcatt

SEQ ID NO: 186842 - DNA, 2093 bp, Homo sapiens
  Payload ID: 16788
  Gene Symbol: SAMD3
  Gene Name: sterile alpha motif domain containing 3
  Uniprot ID: Q8N6K7
  ENST ID: ENST00000439090
  CDS Start-End: 329-1891
cccagtcttgctgtctttcaatggggcagccactgctcagttgctgccattcagaaatatgaacccagtatcaccagaacttttgatttttcaagagaaaccaagattccagatttgtaggtgatatcttccatttttcagataaaacaaaggaaccagaaccacatccactgatcggatttgcctggggaggaggggtgctctctcctttgatcttctcttctggaagagatggaccaaaagcctctccagcaataatccgaaatgattcttgaagactatctttccagcttgtcacatatgcaaggtgtatttacaggagacagcaatggaaacctggtcagttgagcaggtctgcagttggttggtggagaaaaatttaggagagctagttcatagatttcaagaggaagaagtaagtggggccgctcttcttgcacttaatgatcggatggttcagcaactggtaaagaaaattgggcaccaggctgttctgatggatttaattaaaaaatacaagcagaacactcaaggactgaagtccccagaaaaccccaaaaaggcagccctggtcatgcaaacagaagcagctcgagattacagggatgaagagtcctccagtccagccaggcatggggagcagatgccatctttctatccagctgaaaaccttgataatggactaattgaccaaagagtattgaaacagagaagaaatgtgaaacaaattctagcaagaagcaaagcattacagtggacgaagtcctatgttttaccagagtttccctatgatgtcaaatgcatgttagcagagcagaagtgcccggatcacagcatgaggataaggatcattgagtttctccaggccgacatgactaagtatctggaaggctcactgtaccccagcacccagcagtacaatgacgtggttaatgccctgctgcaggcccaccctttcctggatgaggatggctgtggcttctttttatggaaacgagccctcaaagatcgctttaaatatgttcgaagacccatagaagatgatgagcaagtgattagaaataagtgtaaatttggacaccgaagaggccagacaaggaaatctcttgctgatataagatttgatgaaattaaacttgtccagataaaagaagaagctgtttgttttgattctgagctagatgaacatattaagtggttccagcaagaatacgtgaaaacagaaaaggactggagagaaattgacaagagaatgagccaaactttggaaataagaagaaagatgattggcagccgaacacctctgaaggacattcttaaactgtttcctttcttgaagtgcccttatcagatgttcagagaattccaacttcttacaagaacagatatttataagaaaacaaggcacattttggaatcctattcagaaaatatactgacttctttttcagtggtggacaatccaatcaatattgtattgcaagaaaaaatgaaacattacacagatgaagacatgttgaaatacatgaagatgacagccacatgtttactcctcccagatgtttttggggatgatcccagcctttttgtcatcatgaatgaacaggtgcaagtgtccacacctgtgttggaagttaaaaaccctttcaacatggaggtctgcgaattttctttatatttagaaagggagaggctcacaaaggtggacgactgtgttacagccttggctgcgctagtagctgcctttcatgtatttaggattgagtgtccaagaagactgtcccaaactttcaacttcctagaaacgctgattttcgatatgcacagtccttattttccttctttgaaagaaaaggaaaacgaagtaggatttcagcacccactcacttaatagcatgccaaatattgtactggaatttacctctgggaaaactgaagcttcataagaaattgttttgatttagggttgtggtagaggtaggtatgagaaaatcatcttgtatttatagatgctaatgaatttcaatgctttctatctttacacttagatattaagttctttgtgaaattctgtaataaaattctacttcatt

SEQ ID NO: 186843 - DNA, 545 bp, Homo sapiens
  Payload ID: 16788
  Gene Symbol: SAMD3
  Gene Name: sterile alpha motif domain containing 3
  ENST ID: ENST00000529723
  CDS Start-End: 49-545
agaaacattcagattctccagagaaatgtgtatttacaggagacagcaatggaaacctggtcagttgagcaggtctgcagttggttggtggagaaaaatttaggagagctagttcatagatttcaagaagtaagtggggccgctcttcttgcacttaatgatcggatggttcagcaactggtaaagaaaattgggcaccaggctgttctgatggatttaattaaaaaatacaagcagaacactcaaggactgaagtccccagaaaaccccaaaaaggcagccctggtcatgcaaacagaagcagctcgagattacagggatgaagagtcctccagtccagccaggcatggggagcagatgccatctttctatccagctgaaaaccttgataatggactaattgaccaaagagtattgaaacagagaaatgtgaaacaaattctagcaagaagcaaagcattacagtggacgaagtcctatgttttaccagagtttccctatgatgtcaaatgcatgttagcagagcagaagtgcccggatcacag

SEQ ID NO: 186844 - DNA, 592 bp, Homo sapiens
  Payload ID: 16788
  Gene Symbol: SAMD3
  Gene Name: sterile alpha motif domain containing 3
  ENST ID: ENST00000531544
  CDS Start-End: 73-592
aagaatagtattggaaggaaggacagaaacattcagattctccagagaaatgtgtatttacaggagacagcaatggaaacctggtcagttgagcaggtctgcagttggttggtggagaaaaatttaggagagctagttcatagatttcaagaggaagaagtaagtggggccgctcttcttgcacttaatgatcggatggttcagcaactggtaaagaaaattgggcaccaggctgttctgatggatttaattaaaaaatacaagcagaacactcaaggactgaagtccccagaaaaccccaaaaaggcagccctggtcatgcaaacagaagcagctcgagattacagggatgaagagtcctccagtccagccaggcatggggagcagatgccatctttctatccagctgaaaaccttgataatggactaattgaccaaagagtattgaaacagagaagaaatgtgaaacaaattctagcaagaagcaaagcattacagtggacgaagtcctatgttttaccagagtttccctatgatgtcaaatgcatgttagcagagcagaagtgcccggatcacagcatgaggataagga

SEQ ID NO: 186845 - DNA, 322 bp, Homo sapiens
  Payload ID: 16788
  Gene Symbol: SAMD3
  Gene Name: sterile alpha motif domain containing 3
  ENST ID: ENST00000463253
  CDS Start-End: 1-233
tgtttcctttcttgaagtgcccttatcagatgttcagagaattccaacttcttacaagaacagatatttataagaaaacaaggcacattttggaatcctattcagaaaatatactgacttctttttcagtggtggacaatccaatcaatattgtattgcaagaaaaaatgaaacattacacagatgaagacatgttgaaatgtgcaagtgtccacacctgtgttggaagttaaaaaccctttcaacatggaggtctgcgaattttctttatatttagaaagggagaggctcacaaaggtggacgactgtgttacagccttgg

SEQ ID NO: 186846 - DNA, 3690 bp, Homo sapiens
  Payload ID: 16788
  Gene Symbol: SAMD3
  Gene Name: sterile alpha motif domain containing 3
  ENST ID: ENST00000532763
  CDS Start-End: 131-958
ctttgtgaagaaacctgggtgttaatggtacaggattgggtaccattgtatgtccctggctgtctgttagtaaagcttagagatgcctgtggaaaaaaagtaggagaaggtgtatttacaggagacagcaatggaaacctggtcagttgagcaggtctgcagttggttggtggagaaaaatttaggagagctagttcatagatttcaagaggaagaagtaagtggggccgctcttcttgcacttaatgatcggatggttcagcaactggtaaagaaaattgggcaccaggctgttctgatggatttaattaaaaaatacaagcagaacactcaaggactgaagtccccagaaaaccccaaaaaggcagccctggtcatgcaaacagaagcagctcgagaggatgaagagtcctccagtccagccaggcatggggagcagatgccatctttctatccagctgaaaaccttgataatggactaattgaccaaagagtattgaaacagagaagaaatgtgaaacaaattctagcaagaagcaaagcattacagtggacgaagtcctatgttttaccagagtttccctatgatgtcaaatgcatgttagcagagcagaagtgcccggatcacagcatgaggataaggatcattgagtttctccaggccgacatgactaagtatctggaaggctcactgtaccccagcacccagcagtacaatgacgtggttaatgccctgctgcaggcccaccctttcctggatgaggatggctgtggcttctttttatggaaacgagccctcaaagatcgctttaaatatgttcgaagacccatagaagatgatgagcaagtgattagaaataagtgtaaatttggacaccgaagaggccagacaaggaaatctcttgctgatataagatttgatgaaattaaacttgtccagataaaactgtcagcttaaactaaaagttggctagaactatgctctgctattacaaccaactctgtgagagcttaggttactgtggtgttggagtagagagaccacactctatgttgccaaaactggtgtggtaaaggaagcatagcatacgctctttatacaatttgtttggctttaactcaagttaatgttctggttaatttacgctgattcctctaaagtcacacatctcaaaggtgagtcctacacttcccttcagtgtatttcttggcctgaagtgatctctttcgtgcttcatgtctactttctttgattcctccttgagcacggccctccattaactttgtctgctgagacagacatcttgaagtcaacagtcagcagctgtttccagctgctgttctgtaagattcagacatttcttactcactagttgcctcatttcaacgtgcactgttaaagaaatcagcctgttagagaagtgaggaaataccctaaaagaaacctgcacacctgagcatctctgtgcttggaaaagtcacttcccctttgagggtctcaatttgcccatcagtaaagtgtgaggcatggactaggtggtttctaagttctttccagctttaataatatataaatcattaacagtatatctaacaatatataaatctaacaatatgtaaatcattaaaatggtgagaattttaaattctgatgtagctttttaataattaggaaaatcacttcagtctagaatacaacccaccaacactgtgttaatcccatcagtctgatcaggtggaagttatctagaaactttattttcatgattgggtaagagttttggaggaagtagtacattataaatacagtaatatctaaatgtcaatatcagcaattatataacttctactatatttcagtagatgaaagaaagccatttagataattaaaacattttttctgtactttaaaaaattaaaatgttttcttacttaagaaattgtcattctatgcatttgagacatacagaagaaaaactacatacgtaacatatatgtagtttatgagacaaaataaacactgttaactcagcatttaactttagaactagaacactgcctgcaccattgtgtgtgcctgagttttcctcccctctcctgtcacctgcctttccaacaccacaggcctctagaactaatcactattctgaattttatgtttatcattcacctgttttaaaaataaatgacattgtcacatatgcatgaattcttaagggatatattgcttagttttgcttgtttttttttcaagcacatattttatttgaataaatcctctgtagtccatttttatgttcaacagtttaaaacatatacaaacaaagcttgaaagtaaatgaagatctgacatatctgaagcttaaagatttttatttttcttttcaccaccttccacattttacatttgaaactccttggcttcgttgacaatccattatcctggttctcctgctcctataattttctccctttctatatatctaaatctagataatttaaaagaaatatcaaatctctatctctgcattcacaagtttcctagctattcttccaacctcaattaaaagatttcatcgcctttaagtcccagctttaaaccctggccgtctatggttttccacaatcttcagatttgctctgctaaacattcccgtaacatgctctgcccttcctgtctctccacccagaactgtcctttcttctttcaaattctattatcccttaaaatctgatcagttcctcatcttccacgaattttccttcactaccccagcctaaaacaaattctagttttgcttgtttttaaggtttacaaaatgatatgaaaactatatgttggctttgataagttcctttttttcaatcaatgtaatgtcactggaattcatccaggttgttcagttgagtgtagtttattcgttttcctgttggtttaatctattgtgacaggcaaccagtttatttggctcttctcttcttaacggatatttgatttgtttccagtgttggctgttatgaactatgctgctgtgattattcttgtatgtgtgtcttgaagcatatgtgaagatttttttcaaggatttatacttaggagtggatttgctggctcactggctcacagggtgtgcagatattcaactctgtaagacagtgccaaattattttcctggatgattaagctccctgagcagcactcgttaatcatctgatttcttttccactcaccccacccccatgcaatgccaccaccccacttccaatctattgggaatacaatggtactgtgtttggcttccattttagttatgtatgagggtgatcatcttttcatatgtttatgaaatattcatgtttcctcctctgtaaagtgtctgttcatgtcttttgcttatttttctatgaggctgcctttttttcaatttacttgtaaaaatcctttgtatattctgtattctactcctttactaattatatttgttcccaatatcttctcacagtttgtgccttgccttttaaatttctttctggtgtcttttgacaaggaaagacaaggttgcaattttaatgtagttagagttatcaatcatttgtcttatgatcagtgcttctgaggcaggagaatagggtctgaaggcaggaagcctaaggccaatttgcaccaacttcctcgaactgaatcaaaag

SEQ ID NO: 186847 - DNA, 679 bp, Homo sapiens
  Payload ID: 16788
  Gene Symbol: SAMD3
  Gene Name: sterile alpha motif domain containing 3
  ENST ID: ENST00000532309
  CDS Start-End: 49-679
agaaacattcagattctccagagaaatgtgtatttacaggagacagcaatggaaacctggtcagttgagcaggtctgcagttggttggtggagaaaaatttaggagagctagttcatagatttcaagaggaagaagtaagtggggccgctcttcttgcacttaatgatcggatggttcagcaactggtaaagaaaattgggcaccaggctgttctgatggatttaattaaaaaatacaagcagaacactcaaggactgaagtccccagaaaaccccaaaaaggcagccctggtcatgcaaacagaagcagctcgagattacagggatgaagagtcctccagtccagccaggcatggggagcagatgccatctttctatccagctgaaaaccttgataatggactaattgaccaaagagtattgaaacagagaaatgtgaaacaaattctagcaagaagcaaagcattacagtggacgaagtcctatgttttaccagagtttccctatgatgtcaaatgcatgttagcagagcagaagtgcccggatcacagcatgaggataaggatcattgagtttctccaggccgacatgactaagtatctggaaggctcactgtaccccagcacccagcagtacaatgacgtggttaatgccctgctgcaggcccaccctttcctgg

SEQ ID NO: 186848 - DNA, 929 bp, Homo sapiens
  Payload ID: 16788
  Gene Symbol: SAMD3
  Gene Name: sterile alpha motif domain containing 3
  ENST ID: ENST00000524930
  CDS Start-End: 18-131
atttacaggagacagcaatggaaacctggtcagttgagcaggtctgcagttggttggtggagaaaaatttaggagagctagttcatagatttcaaggaagaagtaagtggggccgctcttcttgcacttaatgatcggatggttcagcaactggtaaagaaaattgggcaccaggctgttctgatggatttaattaaaaaatacaagcagaacactcaaggactgaagtccccagaaaaccccaaaaaggcagccctggtcatgcaaacagaagcagctcgagattacagggatgaagagtcctccagtccagccaggcatggggagcagatgccatctttctatccagctgaaaaccttgataatggactaattgaccaaagagtattgaaacagagaagaaatgtgaaacaaattctagcaagaagcaaagcattacagtggacgaagtcctatgttttaccagagtttccctatgatgtcaaatgcatgttagcagagcagaagtgcccggatcacagcatgaggataaggatcattgagtttctccaggccgacatgactaagtatctggaaggctcactgtaccccagcacccagcagtacaatgacgtggttaatgccctgctgcaggcccaccctttcctggatgaggatggctgtggcttcacccagtggagctgttgtctggctttgaggtctgggcctccagccttacctggccctgtcagatctctgctttctgtcctgataaaaacagaccctcaggatgctctggggcagcagttcttttttttttttttcctttttttttttttgagacggagtctcgctctctcactcaggctggagtatagtggcgcgatctcagctcactgcaacctccgcctcctgggttcaagcaattctctggggcagcagttctaagc

SEQ ID NO: 186849 - DNA, 6565 bp, Homo sapiens
  Payload ID: 16789
  Gene Symbol: SAMD4A
  Gene Name: sterile alpha motif domain containing 4A
  Uniprot ID: Q9UPU9
  ENST ID: ENST00000251091
  CDS Start-End: 306-2198
attcttcattcagttgtgtgccttgtgggggatttttaaaaagtcgtttttttttttaaagaaacatttccgtgctactgtctgtcatcgtctctggggaaatcagccagaaccaccggaacgtaactgaaaccagacaagagaggcaggagcccaggcagtacctgcagcgtccgggcaccagagccaccttggaacaggaacgcgtctccggccgcggggctgcggctccgccaaactttggggcgggcggggcgggctggggcgcccagggggctctgtagaccgagggcggccccctaaccatgatgtttcgcgaccaggtcggggtgctggcgggctggtttaagggctggaacgagtgcgagcagactgttgcgctgctgtcgctgctcaagcgcgtgagccagacccaggcccgcttcctccagctctgcctggagcactcgctggccgactgcgccgagctgcacgtcctcgaacgcgaggccaacagccccggaatcattaaccaatggcaacaggaatccaaggataaagtgatttccctcctgttaactcatctgcctttgctgaagccaggaaacctcgacgcgaaagtagaatatatgaaactgctgcccaaaatcctggctcactctattgaacacaaccagcacattgaggagagcaggcagctgctgtcctatgctttgatacatccagccacttcgttagaagaccgtagtgctttagccatgtggctgaatcacttggaggaccgcacgtcgaccagctttggtggccagaaccgaggccgctcagactctgtggattatggacagacacactactatcaccaaagacagaactctgatgacaagctcaatgggtggcagaactctcgggattctgggatttgcatcaatgcctccaactggcaggacaaaagcatggggtgtgagaatggccatgtgcccctctactcctcctcatctgtccccaccacaatcaatacgattggaaccagcacaagtacaaatgttccagcctggctgaaaagcctccgcctgcacaaatatgccgcgcttttctcccagatgacctatgaggagatgatggccctcaccgagtgccagctggaggcgcagaatgttaccaaaggtgcaagacacaaaattgtcatcagtattcagaagctcaaagaaagacaaaatctcctgaagtctttggaaagggacatcatcgaggggggcagcctgcgcatcccgctccaggaactgcaccagatgatcctgactccgatcaaggcctacagctccccgagcaccacccccgaggctcgccgccgggagccccaggccccgcgtcagccctcactgatgggccccgagagccagagccccgactgcaaagatggggccgcagccactggcgccacggccaccccctcggccggggccagcggggggctccagccgcaccagctgagcagctgcgatggggagctggccgtcgcccccctgccagagggggacctccccgggcagttcacacgcgtcatggggaaagtgtgcacacagctcttggtctccagacctgatgaggaaaatataagttcctatttacagctcatagacaagtgtctaattcatgaggcatttacagagacacagaaaaaaagattgttgtcatggaaacagcaggtgcagaagctctttcggtctttccctcggaaaacccttctagacatatcaggatatcgacagcaaagaaatcgaggctttgggcaatccaactccctcccgacggctggctctgtgggcggtggcatgggcagacggaacccgcgccagtaccagatcccctctcggaacgtcccttccgcccgcctgggcctcttgggcaccagtggattcgtcagctccaaccagcgcaacaccacagctacccccaccatcatgaaacaaggaagacagaacctgtggtttgccaaccccgggggcagcaatagcatgccaagccgcacccacagctcagtccagaggacccgctcgctgcccgtgcacacttccccacagaacatgctgatgttccagcagccagaattccagcttcccgtgaccgaacctgacatcaacaacaggctggagtcgttgtgcctcagtatgaccgaacacgccctgggagacggggttgaccggacctccaccatctagaagctgaagacgagagtgaccgcgctggccgtgaaatcgactgctgcgggtccagtgtccgccatcttcagggttgcacagaatcctccaagatactttgcagccttttttccccctggtccctctcccgttttgattttgtgagagcgtaggtcatcctcgtaaacatatcagtagacctggggttggttattttgtcatttgtttctgtcatgggatggtttggtgtgtggggtggggaggggtctctagggaattatgagactgggaggggggtggagggaatgcaggtagctctctggatggaacggggacaggggaaagagtactgccatgaaagagataggagacacataagaggacagcagaagccctggccctggggaggcttctcggaaggcctggcttcacaggcaggccacagaaggatatcgcgggcacgtgcacccaaagcaagatagtggcttcccttttatatccaatctaatcctgattggatgtccctgaggcccctgctggaaacagccataggagagggcccatggcagtaggggaaagaaggaagaaattccctgcaacaaaacttcagctaaactttgatttgtgtattgtttacataataattttaaagggtacataatgtgtaaagagtttggatagaacctctcttcatactatggttttcgtaaaggatctgttgttgttacggattcattttttccctctatttttataagagcagcagagttgtcttctcaaaacggctgccaagctctgcttcttgggaagatggatgcagtcatgtaggcctgagctgtccgtctttcaccgttaggtgggaggagcgtatgggtggacttgaaggacatggacgtggctggaatgagcacagcattgggtgagcgcacaaggatgaggacatcatgtgatcagttatgggtttgctcgcagggcacccagagattctcaaagaatcctgcagcctctttctgtgctggatttgcttgtcacggagaggcctccctccctttccaccccacccatggggcattatcctgtcactcccagccttgctccacacacacacaggtgggtacaagttccactggaggagaaaaggcaaggatggactttttccccttgtgagaggtttgatacccagaaaatgagctcaaaacctttacattagggttgcttgtaggaactggagcctggaggctgcatctacttcacctgtcactgctgagggagaggaggggagaaaggcccagcaacagcgtacagaggggtcagtcagcaagtccagagagcacatgcagggagatgtttggcccacaccgcacagccccgccatctccagtgggcgatgaaagatgtaggaaaggttgatttcaagatggaaatgacagcgctatccgcacagtatgaattagggatttgctgtgttagttgatttatccatccacacagaggggaggaaaaagacactcgttacttggtgggagattgagaaactgtggtacctaccacaaagtaatagctctgtttatgaagggcaagaaaggctacatttcagaatttgacacagtggagggtattagaggaaatcaaagaggagttgtgtggaaaatcaggttgtgtaaatgaaggtatgaatgctcagccagaggcaagatcagggagatggtacaaggcctgtttgttacatggatgagtcgggtgcctggttgtgtgtgtgtgtgtgtgtgtgtgtgtgtgtgtgtgaagtcagagttgaaattcagaagatcagactatggaaatcactgcccttttttttttaaaagctaatgaactacatacagacctaaaaggccttaatgaaatccgaacaattttcttttactttcaagatcaaaaacatgcacccaacccagccttggatgccaccaccaggtttttgaagcccttttgagtctaagaaggtgagaacaatgtaaccatagaaagcctttcgtgagcagagaaggcttgaatccacaatttcattcgctgaattaaaaaaaaaaggttcagacctctccttgggtgactaagttctaaagatgcaaatccatgtgcagaaagagatggcattttttagttgattatttttaaccaagtgccattaacattcatcccccacatcccttttctaaacaagcttagtgttacttggggaatgtgttgggatggacgatcacatgtaaggcaggaagaataggtcaaaggttgaaggccaaaggtaagaccagagggtttgcgaatgtgggtttgtaggatactgagaaagtgaataaagaggagaaaaaaccatggtattacacatcttgctgagaaaggaaagcattcggatctgctgcaaaaacacatatatccataaagactcatgttattcagaaaacagattgtgaacacaatcacattcgcatgaatcctttaaaaggaagaagaccttaaagtatctgcaaatctgaatttctatttattccttcactgaatatagaaacaatggttatctgattattagagatattattttggatatgttacttattaacttgctatggctggtaaccatgataaagtctgttattaataacaacataattctttttttaaagaagaaaagcttatttttcattgacagtgtatagatttatctacttagttgtgttttgctattagtgttttaattttttttttaagttgagtgtttgataaattttaagaccctgtccccaccttgttttgagtcctgtgttgactacaggtatatagctcaatttaaaaatcctaaagcaaaagaattttatttataaaagaatcaaacagttgcatgcatgaggctgtgaagtcagatatttagtaataaaagcagcagtgcctttttttgtatttacccattgacccccaccaaatgcaactgttttatattaagaaaatagtaacaattttaaaatctcagagtaaaatctatttcactacatgcttttccccccttgttctgatttaagcagtgtgtacttggcatctctacattgtcctagggacagtggtgttctacaatattatcatgtatgatgttttattggtgctttttattcatagtggcttcttaccagaaacagtaggaagaaacacatgaactgtgtacaagacatgaaacattgctgctgatatgttgttttttcacatgcttttgagttttcactttttaaacgagagccagcaagcaaaatagatgtggctgggtctgcctgtccgggcggctctttgcaccgagctctcaaatcctgtgtattgagggttcctttttggtactcaggattggagctacagctgggcccccctctctcccattcgtttgaagagacactgagggaaacaagggtttcttttgaggtgtccttggctgccttttacgggatgggagccttctccggatcttttgttcttctgcacctcttgtagctactgccggtgcaaggttgtagatgttattccccaggagcctgggcttgggggctgagctgggctgaatgcaaaagcatgcaaccagaaggcgggcaaggggaggaaaagcaggcctggcctcattggtcccctggagatgtctgtagcagtcagctccagcttgggcctggggaagcagcctgaccaaggcgctcaggtgtgcctgttacaagaagaacctgcagaaggataatttgcacatggagctgtgataacactaatgttgattttttttttttttacaagtcatcagagatgtttgcaaagtgagttttatttttttgtaattcctttatctttacttaaaggtgaatgtgtattcctctgggaggaataggaagaaaacaggaatgttaataatgtcgaacagaaaacttcctcccttattaatatataatcctcatgtatttatgcctaatgtaagctgacttttaaaaagctttcttttgttgcatgccctgtgcaggcatctgtattgtacatgcatgcctttcgtcctgttttcctgtataaagttagtgaacaaagaaatatttttgcctagttcatgttgccaagcaatgcatattttttaaatttgtcatatatggaaagagcatgtttgttacatgtaaaagctttactgatatacagatatactaatgtttgaagatgctgttctttgcaagtgtacagttttcaaatgttgttaccagtgaaacacccttgtggtttaaacttgctacaatgtatttattattcatttcctcccatgtaactaagaatcatggctatatttcatatcaacgttatattgaaagtgaagggaaatgattaatacaaggttttgtaac

SEQ ID NO: 186850 - DNA, 6833 bp, Homo sapiens
  Payload ID: 16789
  Gene Symbol: SAMD4A
  Gene Name: sterile alpha motif domain containing 4A
  Uniprot ID: Q9UPU9
  ENST ID: ENST00000392067
  CDS Start-End: 306-2462
attcttcattcagttgtgtgccttgtgggggatttttaaaaagtcgtttttttttttaaagaaacatttccgtgctactgtctgtcatcgtctctggggaaatcagccagaaccaccggaacgtaactgaaaccagacaagagaggcaggagcccaggcagtacctgcagcgtccgggcaccagagccaccttggaacaggaacgcgtctccggccgcggggctgcggctccgccaaactttggggcgggcggggcgggctggggcgcccagggggctctgtagaccgagggcggccccctaaccatgatgtttcgcgaccaggtcggggtgctggcgggctggtttaagggctggaacgagtgcgagcagactgttgcgctgctgtcgctgctcaagcgcgtgagccagacccaggcccgcttcctccagctctgcctggagcactcgctggccgactgcgccgagctgcacgtcctcgaacgcgaggccaacagccccggaatcattaaccaatggcaacaggaatccaaggataaagtgatttccctcctgttaactcatctgcctttgctgaagccaggaaacctcgacgcgaaagtagaatatatgaaactgctgcccaaaatcctggctcactctattgaacacaaccagcacattgaggagagcaggcagctgctgtcctatgctttgatacatccagccacttcgttagaagaccgtagtgctttagccatgtggctgaatcacttggaggaccgcacgtcgaccagctttggtggccagaaccgaggccgctcagactctgtggattatggacagacacactactatcaccaaagacagaactctgatgacaagctcaatgggtggcagaactctcgggattctgggatttgcatcaatgcctccaactggcaggacaaaagcatggggtgtgagaatggccatgtgcccctctactcctcctcatctgtccccaccacaatcaatacgattggaaccagcacaagtacaattctctcaggccaggcacaccacagccctttgaaacgatctgtgtcccttaccccacccatgaatgtgccaaaccagcctctaggacatggatggatgtctcatgaggacttacgagctagaggaccccagtgcctcccatccgatcatgcccccctgtctccacaaagcagtgtagcctcttcaggaagtggtgggagtgaacacttagaagatcagaccactgctcgtaacacattccaagaagaaggtagtgggatgaaagatgttccagcctggctgaaaagcctccgcctgcacaaatatgccgcgcttttctcccagatgacctatgaggagatgatggccctcaccgagtgccagctggaggcgcagaatgttaccaaaggtgcaagacacaaaattgtcatcagtattcagaagctcaaagaaagacaaaatctcctgaagtctttggaaagggacatcatcgaggggggcagcctgcgcatcccgctccaggaactgcaccagatgatcctgactccgatcaaggcctacagctccccgagcaccacccccgaggctcgccgccgggagccccaggccccgcgtcagccctcactgatgggccccgagagccagagccccgactgcaaagatggggccgcagccactggcgccacggccaccccctcggccggggccagcggggggctccagccgcaccagctgagcagctgcgatggggagctggccgtcgcccccctgccagagggggacctccccgggcagttcacacgcgtcatggggaaagtgtgcacacagctcttggtctccagacctgatgaggaaaatataagttcctatttacagctcatagacaagtgtctaattcatgaggcatttacagagacacagaaaaaaagattgttgtcatggaaacagcaggtgcagaagctctttcggtctttccctcggaaaacccttctagacatatcaggatatcgacagcaaagaaatcgaggctttgggcaatccaactccctcccgacggctggctctgtgggcggtggcatgggcagacggaacccgcgccagtaccagatcccctctcggaacgtcccttccgcccgcctgggcctcttgggcaccagtggattcgtcagctccaaccagcgcaacaccacagctacccccaccatcatgaaacaaggaagacagaacctgtggtttgccaaccccgggggcagcaatagcatgccaagccgcacccacagctcagtccagaggacccgctcgctgcccgtgcacacttccccacagaacatgctgatgttccagcagccagaattccagcttcccgtgaccgaacctgacatcaacaacaggctggagtcgttgtgcctcagtatgaccgaacacgccctgggagacggggttgaccggacctccaccatctagaagctgaagacgagagtgaccgcgctggccgtgaaatcgactgctgcgggtccagtgtccgccatcttcagggttgcacagaatcctccaagatactttgcagccttttttccccctggtccctctcccgttttgattttgtgagagcgtaggtcatcctcgtaaacatatcagtagacctggggttggttattttgtcatttgtttctgtcatgggatggtttggtgtgtggggtggggaggggtctctagggaattatgagactgggaggggggtggagggaatgcaggtagctctctggatggaacggggacaggggaaagagtactgccatgaaagagataggagacacataagaggacagcagaagccctggccctggggaggcttctcggaaggcctggcttcacaggcaggccacagaaggatatcgcgggcacgtgcacccaaagcaagatagtggcttcccttttatatccaatctaatcctgattggatgtccctgaggcccctgctggaaacagccataggagagggcccatggcagtaggggaaagaaggaagaaattccctgcaacaaaacttcagctaaactttgatttgtgtattgtttacataataattttaaagggtacataatgtgtaaagagtttggatagaacctctcttcatactatggttttcgtaaaggatctgttgttgttacggattcattttttccctctatttttataagagcagcagagttgtcttctcaaaacggctgccaagctctgcttcttgggaagatggatgcagtcatgtaggcctgagctgtccgtctttcaccgttaggtgggaggagcgtatgggtggacttgaaggacatggacgtggctggaatgagcacagcattgggtgagcgcacaaggatgaggacatcatgtgatcagttatgggtttgctcgcagggcacccagagattctcaaagaatcctgcagcctctttctgtgctggatttgcttgtcacggagaggcctccctccctttccaccccacccatggggcattatcctgtcactcccagccttgctccacacacacacaggtgggtacaagttccactggaggagaaaaggcaaggatggactttttccccttgtgagaggtttgatacccagaaaatgagctcaaaacctttacattagggttgcttgtaggaactggagcctggaggctgcatctacttcacctgtcactgctgagggagaggaggggagaaaggcccagcaacagcgtacagaggggtcagtcagcaagtccagagagcacatgcagggagatgtttggcccacaccgcacagccccgccatctccagtgggcgatgaaagatgtaggaaaggttgatttcaagatggaaatgacagcgctatccgcacagtatgaattagggatttgctgtgttagttgatttatccatccacacagaggggaggaaaaagacactcgttacttggtgggagattgagaaactgtggtacctaccacaaagtaatagctctgtttatgaagggcaagaaaggctacatttcagaatttgacacagtggagggtattagaggaaatcaaagaggagttgtgtggaaaatcaggttgtgtaaatgaaggtatgaatgctcagccagaggcaagatcagggagatggtacaaggcctgtttgttacatggatgagtcgggtgcctggttgtgtgtgtgtgtgtgtgtgtgtgtgtgtgtgtgtgaagtcagagttgaaattcagaagatcagactatggaaatcactgcccttttttttttaaaagctaatgaactacatacagacctaaaaggccttaatgaaatccgaacaattttcttttactttcaagatcaaaaacatgcacccaacccagccttggatgccaccaccaggtttttgaagcccttttgagtctaagaaggtgagaacaatgtaaccatagaaagcctttcgtgagcagagaaggcttgaatccacaatttcattcgctgaattaaaaaaaaaaggttcagacctctccttgggtgactaagttctaaagatgcaaatccatgtgcagaaagagatggcattttttagttgattatttttaaccaagtgccattaacattcatcccccacatcccttttctaaacaagcttagtgttacttggggaatgtgttgggatggacgatcacatgtaaggcaggaagaataggtcaaaggttgaaggccaaaggtaagaccagagggtttgcgaatgtgggtttgtaggatactgagaaagtgaataaagaggagaaaaaaccatggtattacacatcttgctgagaaaggaaagcattcggatctgctgcaaaaacacatatatccataaagactcatgttattcagaaaacagattgtgaacacaatcacattcgcatgaatcctttaaaaggaagaagaccttaaagtatctgcaaatctgaatttctatttattccttcactgaatatagaaacaatggttatctgattattagagatattattttggatatgttacttattaacttgctatggctggtaaccatgataaagtctgttattaataacaacataattctttttttaaagaagaaaagcttatttttcattgacagtgtatagatttatctacttagttgtgttttgctattagtgttttaattttttttttaagttgagtgtttgataaattttaagaccctgtccccaccttgttttgagtcctgtgttgactacaggtatatagctcaatttaaaaatcctaaagcaaaagaattttatttataaaagaatcaaacagttgcatgcatgaggctgtgaagtcagatatttagtaataaaagcagcagtgcctttttttgtatttacccattgacccccaccaaatgcaactgttttatattaagaaaatagtaacaattttaaaatctcagagtaaaatctatttcactacatgcttttccccccttgttctgatttaagcagtgtgtacttggcatctctacattgtcctagggacagtggtgttctacaatattatcatgtatgatgttttattggtgctttttattcatagtggcttcttaccagaaacagtaggaagaaacacatgaactgtgtacaagacatgaaacattgctgctgatatgttgttttttcacatgcttttgagttttcactttttaaacgagagccagcaagcaaaatagatgtggctgggtctgcctgtccgggcggctctttgcaccgagctctcaaatcctgtgtattgagggttcctttttggtactcaggattggagctacagctgggcccccctctctcccattcgtttgaagagacactgagggaaacaagggtttcttttgaggtgtccttggctgccttttacgggatgggagccttctccggatcttttgttcttctgcacctcttgtagctactgccggtgcaaggttgtagatgttattccccaggagcctgggcttgggggctgagctgggctgaatgcaaaagcatgcaaccagaaggcgggcaaggggaggaaaagcaggcctggcctcattggtcccctggagatgtctgtagcagtcagctccagcttgggcctggggaagcagcctgaccaaggcgctcaggtgtgcctgttacaagaagaacctgcagaaggataatttgcacatggagctgtgataacactaatgttgattttttttttttttacaagtcatcagagatgtttgcaaagtgagttttatttttttgtaattcctttatctttacttaaaggtgaatgtgtattcctctgggaggaataggaagaaaacaggaatgttaataatgtcgaacagaaaacttcctcccttattaatatataatcctcatgtatttatgcctaatgtaagctgacttttaaaaagctttcttttgttgcatgccctgtgcaggcatctgtattgtacatgcatgcctttcgtcctgttttcctgtataaagttagtgaacaaagaaatatttttgcctagttcatgttgccaagcaatgcatattttttaaatttgtcatatatggaaagagcatgtttgttacatgtaaaagctttactgatatacagatatactaatgtttgaagatgctgttctttgcaagtgtacagttttcaaatgttgttaccagtgaaacacccttgtggtttaaacttgctacaatgtatttattattcatttcctcccatgtaactaagaatcatggctatatttcatatcaacgttatattgaaagtgaagggaaatgattaatacaaggttttgtaacactg

SEQ ID NO: 186851 - DNA, 1337 bp, Homo sapiens
  Payload ID: 16789
  Gene Symbol: SAMD4A
  Gene Name: sterile alpha motif domain containing 4A
  ENST ID: ENST00000555192
  CDS Start-End: 117-1154
agttactgaacccttatcaagcagctgcctgggactcaatttgccccatccattggagattaaccgacatcatcgaggggggcagcctgcgcatcccgctccaggaactgcaccagatgatcctgactccgatcaaggcctacagctccccgagcaccacccccgaggctcgccgccgggagccccaggccccgcgtcagccctcactgatgggccccgagagccagagccccgactgcaaagatggggccgcagccactggcgccacggccaccccctcggccggggccagcggggggctccagccgcaccagctgagcagctgcgatggggagctggccgtcgcccccctgccagagggggacctccccgggcagttcacacgcgtcatggggaaagtgtgcacacagctcttggtctccagacctgatgaggaaaatataagttcctatttacagctcatagacaagtgtctaattcatgaggcatttacagagacacagaaaaaaagattgttgtcatggaaacagcaggtgcagaagctctttcggtctttccctcggaaaacccttctagacatatcaggatatcgacagcaaagaaatcgaggctttgggcaatccaactccctcccgacggctggctctgtgggcggtggcatgggcagacggaacccgcgccagtaccagatcccctctcggaacgtcccttccgcccgcctgggcctcttgggcaccagtggattcgtcagctccaaccagcgcaacaccacagctacccccaccatcatgaaacaaggaagacagaacctgtggtttgccaaccccgggggcagcaatagcatgccaagccgcacccacagctcagtccagaggacccgctcgctgcccgtgcacacttccccacagaacatgctgatgttccagcagccaggttcccaagttcacagtggactgtgtttaacagaccttagaggttggttgagcctgagtggagccccttccatgccagcgctgacagtccccaagtcctcccagggagaattccagcttcccgtgaccgaacctgacatcaacaacaggctggagtcgttgtgcctcagtatgaccgaacacgccctgggagacggggttgaccggacctccaccatctagaagctgaagacgagagtgaccgcgctggccgtgaaatcgactgctgcgggtccagtgtccgccatcttcagggttgcacagaatcctccaagatactttgcagccttttttccccctggtccctctcccgttttgattttgtgagagcgtaggtcatcctcgtaaacatatcagtagacctgg

SEQ ID NO: 186852 - DNA, 3003 bp, Homo sapiens
  Payload ID: 16789
  Gene Symbol: SAMD4A
  Gene Name: sterile alpha motif domain containing 4A
  Uniprot ID: Q9UPU9
  ENST ID: ENST00000554335
  CDS Start-End: 664-2820
ttagctcccacccccacccccgcgccccttcgcagccgcattgcaagttttctgcgcggggaagatctgttgctggtgctggcgttcttaagcacggcgcccgaggccaccccaggcgggccgtgaggggagcaccagccgttggcagcggcagcaacaggaagccgcggggtctcctcccgcacctgggaagcaggcttctcgctgttacccggtggggaatagcccatctcccacatcggtggtgatcgccgctcgggaatgcgggcgtgaagggtccgagttgccgcccagcggggaggagaccccaggacgccggaaatcaccatcccaaagctgcaagaaggggggagaaagcattcttcattcagttgtgtgccttgtgggggatttttaaaaagtcgtttttttttttaaagaaacatttccgtgctactgtctgtcatcgtctctggggaaatcagccagaaccaccggaacgtaactgaaaccagacaagagaggcaggagcccaggcagtacctgcagcgtccgggcaccagagccaccttggaacaggaacgcgtctccggccgcggggctgcggctccgccaaactttggggcgggcggggcgggctggggcgcccagggggctctgtagaccgagggcggccccctaaccatgatgtttcgcgaccaggtcggggtgctggcgggctggtttaagggctggaacgagtgcgagcagactgttgcgctgctgtcgctgctcaagcgcgtgagccagacccaggcccgcttcctccagctctgcctggagcactcgctggccgactgcgccgagctgcacgtcctcgaacgcgaggccaacagccccggaatcattaaccaatggcaacaggaatccaaggataaagtgatttccctcctgttaactcatctgcctttgctgaagccaggaaacctcgacgcgaaagtagaatatatgaaactgctgcccaaaatcctggctcactctattgaacacaaccagcacattgaggagagcaggcagctgctgtcctatgctttgatacatccagccacttcgttagaagaccgtagtgctttagccatgtggctgaatcacttggaggaccgcacgtcgaccagctttggtggccagaaccgaggccgctcagactctgtggattatggacagacacactactatcaccaaagacagaactctgatgacaagctcaatgggtggcagaactctcgggattctgggatttgcatcaatgcctccaactggcaggacaaaagcatggggtgtgagaatggccatgtgcccctctactcctcctcatctgtccccaccacaatcaatacgattggaaccagcacaagtacaattctctcaggccaggcacaccacagccctttgaaacgatctgtgtcccttaccccacccatgaatgtgccaaaccagcctctaggacatggatggatgtctcatgaggacttacgagctagaggaccccagtgcctcccatccgatcatgcccccctgtctccacaaagcagtgtagcctcttcaggaagtggtgggagtgaacacttagaagatcagaccactgctcgtaacacattccaagaagaaggtagtgggatgaaagatgttccagcctggctgaaaagcctccgcctgcacaaatatgccgcgcttttctcccagatgacctatgaggagatgatggccctcaccgagtgccagctggaggcgcagaatgttaccaaaggtgcaagacacaaaattgtcatcagtattcagaagctcaaagaaagacaaaatctcctgaagtctttggaaagggacatcatcgaggggggcagcctgcgcatcccgctccaggaactgcaccagatgatcctgactccgatcaaggcctacagctccccgagcaccacccccgaggctcgccgccgggagccccaggccccgcgtcagccctcactgatgggccccgagagccagagccccgactgcaaagatggggccgcagccactggcgccacggccaccccctcggccggggccagcggggggctccagccgcaccagctgagcagctgcgatggggagctggccgtcgcccccctgccagagggggacctccccgggcagttcacacgcgtcatggggaaagtgtgcacacagctcttggtctccagacctgatgaggaaaatataagttcctatttacagctcatagacaagtgtctaattcatgaggcatttacagagacacagaaaaaaagattgttgtcatggaaacagcaggtgcagaagctctttcggtctttccctcggaaaacccttctagacatatcaggatatcgacagcaaagaaatcgaggctttgggcaatccaactccctcccgacggctggctctgtgggcggtggcatgggcagacggaacccgcgccagtaccagatcccctctcggaacgtcccttccgcccgcctgggcctcttgggcaccagtggattcgtcagctccaaccagcgcaacaccacagctacccccaccatcatgaaacaaggaagacagaacctgtggtttgccaaccccgggggcagcaatagcatgccaagccgcacccacagctcagtccagaggacccgctcgctgcccgtgcacacttccccacagaacatgctgatgttccagcagccagaattccagcttcccgtgaccgaacctgacatcaacaacaggctggagtcgttgtgcctcagtatgaccgaacacgccctgggagacggggttgaccggacctccaccatctagaagctgaagacgagagtgaccgcgctggccgtgaaatcgactgctgcgggtccagtgtccgccatcttcagggttgcacagaatcctccaagatactttgcagccttttttccccctggtccctctcccgttttgattttgtgagagcgtaggtcatcctcgtaaacatatcagtagacctgg

SEQ ID NO: 186853 - DNA, 6677 bp, Homo sapiens
  Payload ID: 16789
  Gene Symbol: SAMD4A
  Gene Name: sterile alpha motif domain containing 4A
  ENST ID: ENST00000631086
  CDS Start-End: 1269-2306
attcttcattcagttgtgtgccttgtgggggatttttaaaaagtcgtttttttttttaaagaaacatttccgtgctactgtctgtcatcgtctctggggaaatcagccagaaccaccggaacgtaactgaaaccagacaagagaggcaggagcccaggcagtacctgcagcgtccgggcaccagagccaccttggaacaggaacgcgtctccggccgcggggctgcggctccgccaaactttggggcgggcggggcgggctggggcgcccagggggctctgtagaccgagggcggccccctaaccatgatgtttcgcgaccaggtcggggtgctggcgggctggtttaagggctggaacgagtgcgagcagactgttgcgctgctgtcgctgctcaagcgcgtgagccagacccaggcccgcttcctccagctctgcctggagcactcgctggccgactgcgccgagctgcacgtcctcgaacgcgaggccaacagccccggaatcattaaccaatggcaacaggaatccaaggataaagtgatttccctcctgttaactcatctgcctttgctgaagccaggaaacctcgacgcgaaagtagaatatatgaaactgctgcccaaaatcctggctcactctattgaacacaaccagcacattgaggagagcaggcagctgctgtcctatgctttgatacatccagccacttcgttagaagaccgtagtgctttagccatgtggctgaatcacttggaggaccgcacgtcgaccagctttggtggccagaaccgaggccgctcagactctgtggattatggacagacacactactatcaccaaagacagaactctgatgacaagctcaatgggtggcagaactctcgggattctgggatttgcatcaatgcctccaactggcaggacaaaagcatggggtgtgagaatggccatgtgcccctctactcctcctcatctgtccccaccacaatcaatacgattggaaccagcacaagtacaaatgttccagcctggctgaaaagcctccgcctgcacaaatatgccgcgcttttctcccagatgacctatgaggagatgatggccctcaccgagtgccagctggaggcgcagaatgttaccaaaggtgcaagacacaaaattgtcatcagtattcagaagctcaaagaaagacaaaatctcctgaagtctttggaaagggacatcatcgaggggggcagcctgcgcatcccgctccaggaactgcaccagatgatcctgactccgatcaaggcctacagctccccgagcaccacccccgaggctcgccgccgggagccccaggccccgcgtcagccctcactgatgggccccgagagccagagccccgactgcaaagatggggccgcagccactggcgccacggccaccccctcggccggggccagcggggggctccagccgcaccagctgagcagctgcgatggggagctggccgtcgcccccctgccagagggggacctccccgggcagttcacacgcgtcatggggaaagtgtgcacacagctcttggtctccagacctgatgaggaaaatataagttcctatttacagctcatagacaagtgtctaattcatgaggcatttacagagacacagaaaaaaagattgttgtcatggaaacagcaggtgcagaagctctttcggtctttccctcggaaaacccttctagacatatcaggatatcgacagcaaagaaatcgaggctttgggcaatccaactccctcccgacggctggctctgtgggcggtggcatgggcagacggaacccgcgccagtaccagatcccctctcggaacgtcccttccgcccgcctgggcctcttgggcaccagtggattcgtcagctccaaccagcgcaacaccacagctacccccaccatcatgaaacaaggaagacagaacctgtggtttgccaaccccgggggcagcaatagcatgccaagccgcacccacagctcagtccagaggacccgctcgctgcccgtgcacacttccccacagaacatgctgatgttccagcagccaggttcccaagttcacagtggactgtgtttaacagaccttagaggttggttgagcctgagtggagccccttccatgccagcgctgacagtccccaagtcctcccagggagaattccagcttcccgtgaccgaacctgacatcaacaacaggctggagtcgttgtgcctcagtatgaccgaacacgccctgggagacggggttgaccggacctccaccatctagaagctgaagacgagagtgaccgcgctggccgtgaaatcgactgctgcgggtccagtgtccgccatcttcagggttgcacagaatcctccaagatactttgcagccttttttccccctggtccctctcccgttttgattttgtgagagcgtaggtcatcctcgtaaacatatcagtagacctggggttggttattttgtcatttgtttctgtcatgggatggtttggtgtgtggggtggggaggggtctctagggaattatgagactgggaggggggtggagggaatgcaggtagctctctggatggaacggggacaggggaaagagtactgccatgaaagagataggagacacataagaggacagcagaagccctggccctggggaggcttctcggaaggcctggcttcacaggcaggccacagaaggatatcgcgggcacgtgcacccaaagcaagatagtggcttcccttttatatccaatctaatcctgattggatgtccctgaggcccctgctggaaacagccataggagagggcccatggcagtaggggaaagaaggaagaaattccctgcaacaaaacttcagctaaactttgatttgtgtattgtttacataataattttaaagggtacataatgtgtaaagagtttggatagaacctctcttcatactatggttttcgtaaaggatctgttgttgttacggattcattttttccctctatttttataagagcagcagagttgtcttctcaaaacggctgccaagctctgcttcttgggaagatggatgcagtcatgtaggcctgagctgtccgtctttcaccgttaggtgggaggagcgtatgggtggacttgaaggacatggacgtggctggaatgagcacagcattgggtgagcgcacaaggatgaggacatcatgtgatcagttatgggtttgctcgcagggcacccagagattctcaaagaatcctgcagcctctttctgtgctggatttgcttgtcacggagaggcctccctccctttccaccccacccatggggcattatcctgtcactcccagccttgctccacacacacacaggtgggtacaagttccactggaggagaaaaggcaaggatggactttttccccttgtgagaggtttgatacccagaaaatgagctcaaaacctttacattagggttgcttgtaggaactggagcctggaggctgcatctacttcacctgtcactgctgagggagaggaggggagaaaggcccagcaacagcgtacagaggggtcagtcagcaagtccagagagcacatgcagggagatgtttggcccacaccgcacagccccgccatctccagtgggcgatgaaagatgtaggaaaggttgatttcaagatggaaatgacagcgctatccgcacagtatgaattagggatttgctgtgttagttgatttatccatccacacagaggggaggaaaaagacactcgttacttggtgggagattgagaaactgtggtacctaccacaaagtaatagctctgtttatgaagggcaagaaaggctacatttcagaatttgacacagtggagggtattagaggaaatcaaagaggagttgtgtggaaaatcaggttgtgtaaatgaaggtatgaatgctcagccagaggcaagatcagggagatggtacaaggcctgtttgttacatggatgagtcgggtgcctggttgtgtgtgtgtgtgtgtgtgtgtgtgtgtgtgtgtgaagtcagagttgaaattcagaagatcagactatggaaatcactgcccttttttttttaaaagctaatgaactacatacagacctaaaaggccttaatgaaatccgaacaattttcttttactttcaagatcaaaaacatgcacccaacccagccttggatgccaccaccaggtttttgaagcccttttgagtctaagaaggtgagaacaatgtaaccatagaaagcctttcgtgagcagagaaggcttgaatccacaatttcattcgctgaattaaaaaaaaaaggttcagacctctccttgggtgactaagttctaaagatgcaaatccatgtgcagaaagagatggcattttttagttgattatttttaaccaagtgccattaacattcatcccccacatcccttttctaaacaagcttagtgttacttggggaatgtgttgggatggacgatcacatgtaaggcaggaagaataggtcaaaggttgaaggccaaaggtaagaccagagggtttgcgaatgtgggtttgtaggatactgagaaagtgaataaagaggagaaaaaaccatggtattacacatcttgctgagaaaggaaagcattcggatctgctgcaaaaacacatatatccataaagactcatgttattcagaaaacagattgtgaacacaatcacattcgcatgaatcctttaaaaggaagaagaccttaaagtatctgcaaatctgaatttctatttattccttcactgaatatagaaacaatggttatctgattattagagatattattttggatatgttacttattaacttgctatggctggtaaccatgataaagtctgttattaataacaacataattctttttttaaagaagaaaagcttatttttcattgacagtgtatagatttatctacttagttgtgttttgctattagtgttttaattttttttttaagttgagtgtttgataaattttaagaccctgtccccaccttgttttgagtcctgtgttgactacaggtatatagctcaatttaaaaatcctaaagcaaaagaattttatttataaaagaatcaaacagttgcatgcatgaggctgtgaagtcagatatttagtaataaaagcagcagtgcctttttttgtatttacccattgacccccaccaaatgcaactgttttatattaagaaaatagtaacaattttaaaatctcagagtaaaatctatttcactacatgcttttccccccttgttctgatttaagcagtgtgtacttggcatctctacattgtcctagggacagtggtgttctacaatattatcatgtatgatgttttattggtgctttttattcatagtggcttcttaccagaaacagtaggaagaaacacatgaactgtgtacaagacatgaaacattgctgctgatatgttgttttttcacatgcttttgagttttcactttttaaacgagagccagcaagcaaaatagatgtggctgggtctgcctgtccgggcggctctttgcaccgagctctcaaatcctgtgtattgagggttcctttttggtactcaggattggagctacagctgggcccccctctctcccattcgtttgaagagacactgagggaaacaagggtttcttttgaggtgtccttggctgccttttacgggatgggagccttctccggatcttttgttcttctgcacctcttgtagctactgccggtgcaaggttgtagatgttattccccaggagcctgggcttgggggctgagctgggctgaatgcaaaagcatgcaaccagaaggcgggcaaggggaggaaaagcaggcctggcctcattggtcccctggagatgtctgtagcagtcagctccagcttgggcctggggaagcagcctgaccaaggcgctcaggtgtgcctgttacaagaagaacctgcagaaggataatttgcacatggagctgtgataacactaatgttgattttttttttttttacaagtcatcagagatgtttgcaaagtgagttttatttttttgtaattcctttatctttacttaaaggtgaatgtgtattcctctgggaggaataggaagaaaacaggaatgttaataatgtcgaacagaaaacttcctcccttattaatatataatcctcatgtatttatgcctaatgtaagctgacttttaaaaagctttcttttgttgcatgccctgtgcaggcatctgtattgtacatgcatgcctttcgtcctgttttcctgtataaagttagtgaacaaagaaatatttttgcctagttcatgttgccaagcaatgcatattttttaaatttgtcatatatggaaagagcatgtttgttacatgtaaaagctttactgatatacagatatactaatgtttgaagatgctgttctttgcaagtgtacagttttcaaatgttgttaccagtgaaacacccttgtggtttaaacttgctacaatgtatttattattcatttcctcccatgtaactaagaatcatggctatatttcatatcaacgttatattgaaagtgaagggaaatgattaatacaaggttttgtaacactg

SEQ ID NO: 186854 - DNA, 4519 bp, Homo sapiens
  Payload ID: 16790
  Gene Symbol: SAMD4B
  Gene Name: sterile alpha motif domain containing 4B
  Uniprot ID: Q5PRF9
  ENST ID: ENST00000314471
  CDS Start-End: 1036-3120
ggtcggtgcgggaggagggaggggagcttgcgggcccgagagggggcgacggcggcggcggtggcctgaggaggcccgagcggcggcggtggcggcgaaggccgaggcgtctaggtgtttttggaagagctgcagcctttgaagaaacatctcttgatgatgatatcatagactccttcctactgggcagatgaggcagaatggggcacagtagttccagcaaaaatccagagaggactatccttggccaggctttaccccatgtccacttctggagccaagaaagacagttccttctccaaggggaacccagggtgttgatactagaagatggaaatggatacagtaagatgctgccacagtgagatgcctcacccaggtctccctctgtcacttcagccaagcacatgggatagaaagtagcaggcggcctctggccctttaatggaagagggccatccagtcctctccagttaacatctagaccgaacacaaagcatccttctctcatccagaagacataggaaccctaccttcagggatgatttttttttaacagtgaaatcttaaaagtaactgtttcactaaagcctccagtatttactgaagactgtcagaatcatcctccatcactagatcttctccaccagtcatgttccctgagcagtggggtggcttgaaggtataaaccagagaggcccaagggagggatagttagcagacttctggtctttttctagtttgtgctcttctgttccaaggaccacaggattcttctcatcgcagtgctccaggcagccactaccaatcgattggagttagcctgtgaggaaactggagaggcgtggctggaccaagacctccccccatgtgagcaggcttcctcctcccccaacaaccgttgccaccacgcccagaaacgtccttaagccctggccctcaggggaaaggtaacaggaggccagagccgggaccatgtgacggcgctggccctcgccaccgccgtcccccgaccctggccccaggcccggcaccatgatgttccgagaccaggtgggcatcctcgctggctggttcaaaggctggaatgagtgtgagcagacagtggccctcctgtcacttctgaaacgggtcacccgtacccaggcccgcttcctgcagctctgcctggagcactcactggcggactgcaatgacatccacctgctggagtcggaggccaacagtgctgccatcgtcagccagtggcagcaggagtccaaagagaaggtggtgtccctcctgctgtcccaccttcccctgcttcagccaggcaacacagaggccaagtcggagtacatgaggctactgcagaaagtgctggcctactcaatcgagagcaatgctttcatcgaggagagtcgccagctgctttcctatgccctcatccacccagccaccacactggaggaccgcaacgcactggccctctggctgagccacctggaagagcggttggctagtggcttccgctcccggccagagccctcctaccattcacgtcaaggctcagatgagtgggggggccctgcagagctaggccctggggaggcagggccaggctggcaggacaagccaccccgggaaaatggacacgtgcccttccacccatccagctcagtgccgccagccatcaacagtattgggagcaatgcaaacacaggtctcccctgccaaatccaccctagcccactgaagcgctccatgtcactcatccctacaagcccccaggtccctggtgagtggccgagtccagaggagcttggggcccgggctgcttttaccacgcccgatcacgcacctctctcgccccagagcagcgtggcctcctctggcagtgagcagacagaggagcagggctccagccggaacaccttccaggaggatggcagtggcatgaaagatgtgccctcatggctcaagagcctccgtttgcacaagtatgcagccctcttctcacagatgagctacgaggagatgatgacactgactgagcagcacctggagtctcagaacgtcaccaaaggtgcccgccacaagatagccctgagcatccagaagctgcgtgagagacagagcgtcctcaagtccctagagaaggatgtgctggaaggcgggaacctacgaaacgctctgcaggagctgcagcagatcatcatcactcccatcaaggcctacagtgtcctccaggccaccgtggctgccgccaccaccacccctactgccaaggatggggccccgggggaaccaccgctgccaggtgctgagcctcccctagcccaccccggcacagacaaaggcaccgaggccaaggaccctccagctgtggagaactacccacctccaccagctccagctcccactgatggcagtgagcctgccccggctcccgtcgccgacggagacatccccagccagtttacacgggtgatgggcaaagtgtgcacccaactgctggtgtcccgaccagacgaggagaacatcaccagttacctccagctcatcgaaaagtgcctgactcatgaggctttcacggagacgcagaagaaacggctgctatcctggaaacagcaagtgctgaagctcctccggacattcccgcgcaaagccgcactagagatgcagaactaccggcagcagaaaggctgggcattcggctccaactcgctccccatagctggctctgtggggatgggagtggcccggcgtacccagcggcagttcccaatgcctccccgggccctcccacccggccggatgggcctcctgagcccctcgggcattgggggtgtctcccctcgacatgccctcaccagccccagccttggaggccagggccgacagaacctgtggtttgccaaccctggaggcagcaacagcatgcccagtcagagccgcagctctgtgcagcgcacccactcgctcccggtccactcgtcaccccaggccattctcatgttccctccagactgcccggttcctgggcctgacctggagatcaatcccactctggagtctctgtgtctgagcatgacagaacacgccttgggtgatgggacagacaaaacctccaccatctgacgggacccacagcccagcgcacccataggctccctgggcggcgggcgggggccaacccccaacgggcttctccgcgacagcgagagggtgggctggctcagctatatattctaatatttttctactctcttaccctcttaacttttgtttaacattggcacatgccttgctcactcccaggcccgtcgagggatctctgctgaggcccggggagttgggggcagccaggataaagggggcagggactggccagactgcctgcctctctcctttccttcctcatccccacctggtcccatcccacccctgcctcctccagaccgctgaccacctgcctctccccaagggagcagactccccagagacaaactgaccactaccttgtggagcctgctcagaaacatttgacatttggggtgacgcgcagggcagagaacctgccctccagaatgttattgagaggagctggggagaaggaaggggagcaaggagaggaagctctctctcctctccctgcttccccttcaccattccccacattctgcaaggacaggagccaccttcctctctctcacctcccctggccctgttcaccagaggttctctatgattaatttcttaggcctatttaagatacatatttatatagttcttaacggtttttctctgatcatttcctctcatttttagaatccccaggtctctctcagccaagacagtggcagggagagcctgaactttatgaggggagagggcagagccccctcctccagaccctcaagctctaacccattttcctccagccctggctacccggatgaagaggttggaggtgggcagccagggtagccagtgaggtcaggaagtctgttgccttaacgtccccttccccacgaacacacacccttctccgctcccaggtctggttggtgagacttgggagtcaggaataagggaaaggggattgtttggtttttgggtttttccctaagcccctcccttttctttcagcctttttccttcccccattatgtcatgacctcacttaagtggaacactatatcataacccagagattcgtcccagccccagagtccgacagactgtctggtccctattcctaatgaggggttgtgttggggcccaggtggagggaggggatttgggggttcagactgcggggaagccagggtctccctcttcaacgccctcctccccctcaacccaccttcccaactgggacattctcaagcttttcacaccgaaaaggaaaaaaaatgttatttttagatacattttatgaataacttttgttatgaatatggctggtaaccattgtgtatgttattaaagatacaaaatgttgggaaaaaaacaaaaaaaacaaaaaaaaaaaaaa

SEQ ID NO: 186855 - DNA, 555 bp, Homo sapiens
  Payload ID: 16790
  Gene Symbol: SAMD4B
  Gene Name: sterile alpha motif domain containing 4B
  ENST ID: ENST00000598605
  CDS Start-End: 1-283
ctcccctcgacatgccctcaccagccccagccttggaggccagggccgacagaacctgtggtttgccaaccctggaggcagcaacagcatgcccagtcagagccgcagctctgtgcagcgcacccactcgctcccggtccactcgtcaccccaggccattctcatgttccctccagactgcccggttcctgggcctgacctggagatcaatcccactctggagtctctgtgtctgagcatgacagaacacgccttgggtggtgagcatttcctctttccctgacccagctcccacctacccagcgtctctgcctctgaactgagcaactcagagtcatcctgaggggtccccaggggaggccagactccagggagggcctgactgggatgacaggctacctgagtgccttttcttgggcctccctccagctcctgatcttcctcccttcctccctttcttaccacagatgggacagacaaaacctccaccatctgacgggacccacagcccagcgcacccataggctccctgggcggcgggcgggggccaacccc

SEQ ID NO: 186856 - DNA, 672 bp, Homo sapiens
  Payload ID: 16790
  Gene Symbol: SAMD4B
  Gene Name: sterile alpha motif domain containing 4B
  ENST ID: ENST00000602243
  CDS Start-End: 448-672
ggggcggggccaggggcggtgacgcacggcgcggtgacgcagcgcgacggcggcggcggcggcggcggcggtggtcggtgcgggaggagggaggggagcttgcgggcccgagagggggcgacggcggcggcggtggcctgaggaggcccgagcggcggcggtggcggcgaaggccgaggcggattcttctcatcgcagtgctccaggcagccactaccaatcgattggagttagcctgtgaggaaactggagaggcgtggctggaccaagacctccccccatgtgagcaggcttcctcctcccccaacaaccgttgccaccacgcccagaaacgtccttaagccctggccctcaggggaaaggtaacaggaggccagagccgggaccatgtgacggcgctggccctcgccaccgccgtcccccgaccctggccccaggcccggcaccatgatgttccgagaccaggtgggcatcctcgctggctggttcaaaggctggaatgagtgtgagcagacagtggccctcctgtcacttctgaaacgggtcacccgtacccaggcccgcttcctgcagctctgcctggagcactcactggcggactgcaatgacatccacctgctggagtcggaggccaacagtgctgccatcgtcagccagtggcagcaggagtcc

SEQ ID NO: 186857 - DNA, 925 bp, Homo sapiens
  Payload ID: 16790
  Gene Symbol: SAMD4B
  Gene Name: sterile alpha motif domain containing 4B
  ENST ID: ENST00000599712
  CDS Start-End: 269-925
aggattcttctcatcgcagtgctccaggcagccactaccaatcgattggagttagcctgtgaggaaactggagaggcgtggctggaccaagacctccccccatgtgagcaggcttcctcctcccccaacaaccgttgccaccacgcccagaaacgtccttaagccctggccctcaggggaaaggtaacaggaggccagagccgggaccatgtgacggcgctggccctcgccaccgccgtcccccgaccctggccccaggcccggcaccatgatgttccgagaccaggtgggcatcctcgctggctggttcaaaggctggaatgagtgtgagcagacagtggccctcctgtcacttctgaaacgggtcacccgtacccaggcccgcttcctgcagctctgcctggagcactcactggcggactgcaatgacatccacctgctggagtcggaggccaacagtgctgccatcgtcagccagtggcagcaggagtccaaagagaaggtggtgtccctcctgctgtcccaccttcccctgcttcagccaggcaacacagaggccaagtcggagtacatgaggctactgcagaaagtgctggcctactcaatcgagagcaatgctttcatcgaggagagtcgccagctgctttcctatgccctcatccacccagccaccacactggaggaccgcaacgcactggccctctggctgagccacctggaagagcggttggctagtggcttccgctcccggccagagccctcctaccattcacgtcaaggctcagatgagtgggggggccctgcagagctaggccctggggaggcagggccaggctggcaggacaagccaccccgggaaaatggacacgtgcccttccacccatccagctcagtgccgccagccatcaacagtattgggagcaat

SEQ ID NO: 186858 - DNA, 2877 bp, Homo sapiens
  Payload ID: 16790
  Gene Symbol: SAMD4B
  Gene Name: sterile alpha motif domain containing 4B
  ENST ID: ENST00000598913
  CDS Start-End: 341-2419
acggcggcggcggcggcggcggcggtggtcggtgcgggaggagggaggggagcttgcgggcccgagagggggcgacggcggcggcggtggcctgaggaggcccgagcggcggcggtggcggcgaaggccgaggcggaaactggagaggcgtggctggaccaagacctccccccatgtgagcaggcttcctcctcccccaacaaccgttgccaccacgcccagaaacgtccttaagccctggccctcaggggaaaggtaacaggaggccagagccgggaccatgtgacggcgctggccctcgccaccgccgtcccccgaccctggccccaggcccggcaccatgatgttccgagaccaggtgggcatcctcgctggctggttcaaaggctggaatgagtgtgagcagacagtggccctcctgtcacttctgaaacgggtcacccgtacccaggcccgcttcctgcagctctgcctggagcactcactggcggactgcaatgacatccacctgctggagtcggaggccaacagtgctgccatcgtcagccagtggcagcaggagtccaaagagaaggtggtgtccctcctgctgtcccaccttcccctgcttcagccaggcaacacagaggccaagtcggagtacatgaggctactgcagaaagtgctggcctactcaatcgagagcaatgctttcatcgaggagagtcgccagctgctttcctatgccctcatccacccagccaccacactggaggaccgcaacgcactggccctctggctgagccacctggaagagcggttggctagtggcttccgctcccggccagagccctcctaccattcacgtcaaggctcagatgagtgggggggccctgcagagctaggccctggggaggcagggccaggctggcaggacaagccaccccgggaaaatggacacgtgcccttccacccatccagctcagtgccgccagccatcaacagtattgggagcaatgcaaacacaggtctcccctgccaaatccaccctagcccactgaagcgctccatgtcactcatccctacaagcccccaggtccctggtgagtggccgagtccagaggagcttggggcccgggctgcttttaccacgcccgatcacgcacctctctcgccccagagcagcgtggcctcctctggcagtgagcagacagaggagcagggctccagccggaacaccttccaggaggatggcagtggcatgaaagatgtgccctcatggctcaagagcctccgtttgcacaagtatgcagccctcttctcacagatgagctacgaggagatgatgacactgactgagcagcacctggagtctcagaacgtcaccaaaggtgcccgccacaagatagccctgagcatccagaagctgcgtgagagacagagcgtcctcaagtccctagagaaggatgtgctggaaggcgggaacctacgaaacgctctgcaggagctgcagcagatcatcatcactcccatcaaggcctacagtgtcctccaggccaccgtggctgccgccaccaccacccctactgccaaggatggggccccgggggaaccaccgctgccaggtgctgagcctcccctagcccaccccggcacagacaaaggcaccgaggccaaggaccctccagctgtggagaactacccacctccaccagctccagctcccactgatggcagtgagcctgccccggctcccgtcgccgacggagacatccccagccagtttacacgggtgatgggcaaagtgtgcacccaactgctggtgtcccgaccagacgaggagaacatcaccagttacctccagctcatcgaaaagtgcctgactcatgaggctttcacggagacgcagaagaaacggctgctatcctggaaacagcaagtgctgaagctcctccggacattcccgcgcaaagccgcactagagatgcagaactaccggcagcagaaaggctgggcattcggctccaactcgctccccatagctggctctgtggggatgggagtggcccggcgtacccagcggcagttcccaatgcctccccgggccctcccacccggccggatgggcctcctgagcccctcgggcattgggggtgtctcccctcgacatgccctcaccagccccagccttggaggccagggccgacagaacctgtggtttgccaaccctggaggcagcaacagcatgcccagtcagagccgcagctctgtgcagcgcacccactcgctcccggtccactcgtcaccccaggccattctcatgttccctccagactgcccggttcctgggcctgacctggagatcaatcccactctggagtctctgtgtctgagcatgacagaacacgccttgggtggcccgtcgagggatctctgctgaggcccggggagttgggggcagccaggataaagggggcagggactggccagactgcctgcctctctcctttccttcctcatccccacctggtcccatcccacccctgcctcctccagaccgctgaccacctgcctctccccaagggagcagactccccagagacaaactgaccactaccttgtggagcctgctcagaaacatttgacatttggggtgacgcgcagggcagagaacctgccctccagaatgttattgagaggagctggggagaaggaaggggagcaaggagaggaagctctctctcctctccctgcttccccttcaccattccccacattctgcaaggacaggagccaccttcctctctctcacctcccctggccctgttcaccagaggttctctatgattaatttcttaggcctatttaagatacatatttatatagttcttaacggtt

SEQ ID NO: 186859 - DNA, 144 bp, Homo sapiens
  Payload ID: 16790
  Gene Symbol: SAMD4B
  Gene Name: sterile alpha motif domain containing 4B
  ENST ID: ENST00000600018
  CDS Start-End: 1-144
gccatcaacagtattgggagcaatgcaaacacagatgtgccctcatggctcaagagcctccgtttgcacaagtatgcagccctcttctcacagatgagctacgaggagatgatgacactgactgagcagcacctggagtctcag

SEQ ID NO: 186860 - DNA, 1176 bp, Homo sapiens
  Payload ID: 16790
  Gene Symbol: SAMD4B
  Gene Name: sterile alpha motif domain containing 4B
  ENST ID: ENST00000596368
  CDS Start-End: 79-1056
gaggccagagccgggaccatgtgacggcgctggccctcgccaccgccgtcccccgaccctggccccaggcccggcaccatgatgttccgagaccaggtgggcatcctcgctggctggttcaaaggctggaatgagtgtgagcagacagtggccctcctgtcacttctgaaacgggtcacccgtacccaggcccgcttcctgcagctctgcctggagcactcactggcggactgcaatgacatccacctgctggagtcggaggccaacagtgctgccatcgtcagccagtggcagcaggagtccaaagagaaggtggtgtccctcctgctgtcccaccttcccctgcttcagccaggcaacacagaggccaagtcggagtacatgaggctactgcagaaagtgctggcctactcaatcgagagcaatgctttcatcgaggagagtcgccagctgctttcctatgccctcatccacccagccaccacactggaggaccgcaacgcactggccctctggctgagccacctggaagagcggttggctagtggcttccgctcccggccagagccctcctaccattcacgtcaaggctcagatgagtgggggggccctgcagagctaggccctggggaggcagggccaggctggcaggacaagccaccccgggaaaatggacacgtgcccttccacccatccagctcagtgccgccagccatcaacagtattgggagcaatgcaaacacaggtctcccctgccaaatccaccctagcccactgaagcgctccatgtcactcatccctacaagcccccaggtccctggtgagtggccgagtccagaggagcttggggcccgggctgcttttaccacgcccgatcacgcacctctctcgccccagagcagcgtggcctcctctggcagtgagcagacagaggagcagggctccagccggaacaccttccaggaggatggcagtggcatgaaagatgtgccctcatggctcaagagcctccgtttgcacaagtatgcagccctcttctcacagaatcagctttgagtaactgtacagtttttctcgctgttggagaagacttatttgttggagtttcacttgtttaatggtctgggcttattttggaaaaaaaaaaaacaaacaaaaaaaacgaattctgacctt

SEQ ID NO: 186861 - DNA, 2818 bp, Homo sapiens
  Payload ID: 16790
  Gene Symbol: SAMD4B
  Gene Name: sterile alpha motif domain containing 4B
  ENST ID: ENST00000614559
  CDS Start-End: 284-2275
gggcccgagagggggcgacggcggcggcggtggcctgaggaggcccgagcggcggcggtggcggcgaaggccgaggcggaaactggagaggcgtggctggaccaagacctccccccatgtgagcaggcttcctcctcccccaacaaccgttgccaccacgcccagaaacgtccttaagccctggccctcaggggaaaggtaacaggaggccagagccgggaccatgtgacggcgctggccctcgccaccgccgtcccccgaccctggccccaggcccggcaccatgatgttccgagaccaggtgggcatcctcgctggctggttcaaaggctggaatgagtgtgagcagacagtggccctcctgtcacttctgaaacgggtcacccgtacccaggcccgcttcctgcagctctgcctggagcactcactggcggactgcaatgacatccacctgctggagtcggaggccaacagtgctgccatcgtcagccagtggcagcaggagtccaaagagaaggtggtgtccctcctgctgtcccaccttcccctgcttcagccaggcaacacagaggccaagtcggagtacatgaggctactgcagaaagtgctggcctactcaatcgagagcaatgctttcatcgaggagagtcgccagctgctttcctatgccctcatccacccagccaccacactggaggaccgcaacgcactggccctctggctgagccacctggaagagcggttggctagtggcttccgctcccggccagagccctcctaccattcacgtcaaggctcagatgagtgggggggccctgcagagctaggccctggggaggcagggccaggctggcaggacaagccaccccgggaaaatggacacgtgcccttccacccatccagctcagtgccgccagccatcaacagtattgggagcaatgcaaacacaggtctcccctgccaaatccaccctagcccactgaagcgctccatgtcactcatccctacaagcccccaggtccctggtgagtggccgagtccagaggagcttggggcccgggctgcttttaccacgcccgatcacgcacctctctcgccccagagcagcgtggcctcctctggcagtgagcagacagaggagcagggctccagccggaacaccttccaggaggatggcagtggcatgaaagatgtgccctcatggctcaagagcctccgtttgcacaagtatgcagccctcttctcacagatgagctacgaggagatgatgacactgactgagcagcacctggagtctcagaacgtcaccaaaggtgcccgccacaagatagccctgagcatccagaagctgcgtgagagacagagcgtcctcaagtccctagagaaggatgtgctggaaggcgggaacctacgaaacgctctgcaggagctgcagcagatcatcatcactcccatcaaggcctacagtgtcctccaggccaccgtggctgccgccaccaccacccctactgccaaggatggggccccgggggaaccaccgctgccaggtgctgagcctcccctagcccaccccggcacagacaaaggcaccgaggccaaggaccctccagctgtggagaactacccacctccaccagctccagctcccactgatggcagtgagcctgccccggctcccgtcgccgacggagacatccccagccagtttacacgggtgatgggcaaagtgtgcacccaactgctggtgtcccgaccagacgaggagaacatcaccagttacctccagctcatcgaaaagtgcctgactcatgaggctttcacggagacgcagaagaaacggctgctatcctggaaacagcaagtgctgaagctcctccggacattcccgcgcaaagccgcactagagatgcagaactaccggcagcagaaaggctgggcattcggctccaactcgctccccatagctggctctgtggggatgggagtggcccggcgtacccagcggcagttcccaatgcctccccgggccctcccacccggccggatgggcctcctgagcccctcgggcattggggtgtctcccctcacatgccctcaccagccccagccttggaggccagggccgacagaacctgtggtttgccaaccctggaggcagcaacagcatgcccagtcagagccgcagctctgtgcagcgcacccactcgctcccggtccactcgtcaccccaggccattctcatgttccctccagactgcccggttcctgggcctgacctggagatcaatcccactctggagtctctgtgtctgagcatgacagaacacgccttgggtggcccgtcgagggatctctgctgaggcccggggagttgggggcagccaggataaagggggcagggactggccagactgcctgcctctctcctttccttcctcatccccacctggtcccatcccacccctgcctcctccagaccgctgaccacctgcctctccccaagggagcagactccccagagacaaactgaccactaccttgtggagcctgctcagaaacatttgacatttggggtgacgcgcagggcagagaacctgccctccagaatgttattgagaggagctggggagaaggaaggggagcaaggagaggaagctctctctcctctccctgcttccccttcaccattccccacattctgcaaggacaggagccaccttcctctctctcacctcccctggccctgttcaccagaggttctctatgattaatttcttaggcctatttaagatacatatttatatagttcttaacggtt

SEQ ID NO: 186862 - DNA, 3662 bp, Homo sapiens
  Payload ID: 16790
  Gene Symbol: SAMD4B
  Gene Name: sterile alpha motif domain containing 4B
  ENST ID: ENST00000611159
  CDS Start-End: 212-2203
tttcaggaaactggagaggcgtggctggaccaagacctccccccatgtgagcaggcttcctcctcccccaacaaccgttgccaccacgcccagaaacgtccttaagccctggccctcaggggaaaggtaacaggaggccagagccgggaccatgtgacggcgctggccctcgccaccgccgtcccccgaccctggccccaggcccggcaccatgatgttccgagaccaggtgggcatcctcgctggctggttcaaaggctggaatgagtgtgagcagacagtggccctcctgtcacttctgaaacgggtcacccgtacccaggcccgcttcctgcagctctgcctggagcactcactggcggactgcaatgacatccacctgctggagtcggaggccaacagtgctgccatcgtcagccagtggcagcaggagtccaaagagaaggtggtgtccctcctgctgtcccaccttcccctgcttcagccaggcaacacagaggccaagtcggagtacatgaggctactgcagaaagtgctggcctactcaatcgagagcaatgctttcatcgaggagagtcgccagctgctttcctatgccctcatccacccagccaccacactggaggaccgcaacgcactggccctctggctgagccacctggaagagcggttggctagtggcttccgctcccggccagagccctcctaccattcacgtcaaggctcagatgagtgggggggccctgcagagctaggccctggggaggcagggccaggctggcaggacaagccaccccgggaaaatggacacgtgcccttccacccatccagctcagtgccgccagccatcaacagtattgggagcaatgcaaacacaggtctcccctgccaaatccaccctagcccactgaagcgctccatgtcactcatccctacaagcccccaggtccctggtgagtggccgagtccagaggagcttggggcccgggctgcttttaccacgcccgatcacgcacctctctcgccccagagcagcgtggcctcctctggcagtgagcagacagaggagcagggctccagccggaacaccttccaggaggatggcagtggcatgaaagatgtgccctcatggctcaagagcctccgtttgcacaagtatgcagccctcttctcacagatgagctacgaggagatgatgacactgactgagcagcacctggagtctcagaacgtcaccaaaggtgcccgccacaagatagccctgagcatccagaagctgcgtgagagacagagcgtcctcaagtccctagagaaggatgtgctggaaggcgggaacctacgaaacgctctgcaggagctgcagcagatcatcatcactcccatcaaggcctacagtgtcctccaggccaccgtggctgccgccaccaccacccctactgccaaggatggggccccgggggaaccaccgctgccaggtgctgagcctcccctagcccaccccggcacagacaaaggcaccgaggccaaggaccctccagctgtggagaactacccacctccaccagctccagctcccactgatggcagtgagcctgccccggctcccgtcgccgacggagacatccccagccagtttacacgggtgatgggcaaagtgtgcacccaactgctggtgtcccgaccagacgaggagaacatcaccagttacctccagctcatcgaaaagtgcctgactcatgaggctttcacggagacgcagaagaaacggctgctatcctggaaacagcaagtgctgaagctcctccggacattcccgcgcaaagccgcactagagatgcagaactaccggcagcagaaaggctgggcattcggctccaactcgctccccatagctggctctgtggggatgggagtggcccggcgtacccagcggcagttcccaatgcctccccgggccctcccacccggccggatgggcctcctgagcccctcgggcattgggggtgtctcccctcgacatgccctcaccccccagccttggaggccagggccgacagaacctgtggtttgccaaccctggaggcagcaacagcatgcccagtcagagccgcagctctgtgcagcgcacccactcgctcccggtccactcgtcaccccaggccattctcatgttccctccagactgcccggttcctgggcctgacctggagatcaatcccactctggagtctctgtgtctgagcatgacagaacacgccttgggtgatgggacagacaaaacctccaccatctgacgggacccacagcccagcgcacccataggctccctgggcggcgggcgggggccaacccccaacgggcttctccgcgacagcgagagggtgggctggctcagctatatattctaatatttttctactctcttaccctcttaacttttgtttaacattggcacatgccttgctcactcccaggcccgtcgagggatctctgctgaggcccggggagttgggggcagccaggataaagggggcagggactggccagactgcctgcctctctcctttccttcctcatccccacctggtcccatcccacccctgcctcctccagaccgctgaccacctgcctctccccaagggagcagactccccagagacaaactgaccactaccttgtggagcctgctcagaaacatttgacatttggggtgacgcgcagggcagagaacctgccctccagaatgttattgagaggagctggggagaaggaaggggagcaaggagaggaagctctctctcctctccctgcttccccttcaccattccccacattctgcaaggacaggagccaccttcctctctctcacctcccctggccctgttcaccagaggttctctatgattaatttcttaggcctatttaagatacatatttatatagttcttaacggtttttctctgatcatttcctctcatttttagaatccccaggtctctctcagccaagacagtggcagggagagcctgaactttatgaggggagagggcagagccccctcctccagaccctcaagctctaacccattttcctccagccctggctacccggatgaagaggttggaggtgggcagccagggtagccagtgaggtcaggaagtctgttgccttaacgtccccttccccacgaacacacacccttctccgctcccaggtctggttggtgagacttgggagtcaggaataagggaaaggggattgtttggtttttgggtttttccctaagcccctcccttttctttcagcctttttccttcccccattatgtcatgacctcacttaagtggaacactatatcataacccagagattcgtcccagccccagagtccgacagactgtctggtccctattcctaatgaggggttgtgttggggcccaggtggagggaggggatttgggggttcagactgcggggaagccagggtctccctcttcaacgccctcctccccctcaacccaccttcccaactgggacattctcaagcttttcacaccgaaaaggaaaaaaaatgttatttttagatacattttatgaataacttttgttatgaatatggctggtaaccattgtgtatgttattaaagatacaaaatgttggg

SEQ ID NO: 186863 - DNA, 3664 bp, Homo sapiens
  Payload ID: 16790
  Gene Symbol: SAMD4B
  Gene Name: sterile alpha motif domain containing 4B
  Uniprot ID: Q5PRF9
  ENST ID: ENST00000610417
  CDS Start-End: 212-2296
tttcaggaaactggagaggcgtggctggaccaagacctccccccatgtgagcaggcttcctcctcccccaacaaccgttgccaccacgcccagaaacgtccttaagccctggccctcaggggaaaggtaacaggaggccagagccgggaccatgtgacggcgctggccctcgccaccgccgtcccccgaccctggccccaggcccggcaccatgatgttccgagaccaggtgggcatcctcgctggctggttcaaaggctggaatgagtgtgagcagacagtggccctcctgtcacttctgaaacgggtcacccgtacccaggcccgcttcctgcagctctgcctggagcactcactggcggactgcaatgacatccacctgctggagtcggaggccaacagtgctgccatcgtcagccagtggcagcaggagtccaaagagaaggtggtgtccctcctgctgtcccaccttcccctgcttcagccaggcaacacagaggccaagtcggagtacatgaggctactgcagaaagtgctggcctactcaatcgagagcaatgctttcatcgaggagagtcgccagctgctttcctatgccctcatccacccagccaccacactggaggaccgcaacgcactggccctctggctgagccacctggaagagcggttggctagtggcttccgctcccggccagagccctcctaccattcacgtcaaggctcagatgagtgggggggccctgcagagctaggccctggggaggcagggccaggctggcaggacaagccaccccgggaaaatggacacgtgcccttccacccatccagctcagtgccgccagccatcaacagtattgggagcaatgcaaacacaggtctcccctgccaaatccaccctagcccactgaagcgctccatgtcactcatccctacaagcccccaggtccctggtgagtggccgagtccagaggagcttggggcccgggctgcttttaccacgcccgatcacgcacctctctcgccccagagcagcgtggcctcctctggcagtgagcagacagaggagcagggctccagccggaacaccttccaggaggatggcagtggcatgaaagatgtgccctcatggctcaagagcctccgtttgcacaagtatgcagccctcttctcacagatgagctacgaggagatgatgacactgactgagcagcacctggagtctcagaacgtcaccaaaggtgcccgccacaagatagccctgagcatccagaagctgcgtgagagacagagcgtcctcaagtccctagagaaggatgtgctggaaggcgggaacctacgaaacgctctgcaggagctgcagcagatcatcatcactcccatcaaggcctacagtgtcctccaggccaccgtggctgccgccaccaccacccctactgccaaggatggggccccgggggaaccaccgctgccaggtgctgagcctcccctagcccaccccggcacagacaaaggcaccgaggccaaggaccctccagctgtggagaactacccacctccaccagctccagctcccactgatggcagtgagcctgccccggctcccgtcgccgacggagacatccccagccagtttacacgggtgatgggcaaagtgtgcacccaactgctggtgtcccgaccagacgaggagaacatcaccagttacctccagctcatcgaaaagtgcctgactcatgaggctttcacggagacgcagaagaaacggctgctatcctggaaacagcaagtgctgaagctcctccggacattcccgcgcaaagccgcactagagatgcagaactaccggcagcagaaaggctgggcattcggctccaactcgctccccatagctggctctgtggggatgggagtggcccggcgtacccagcggcagttcccaatgcctccccgggccctcccacccggccggatgggcctcctgagcccctcgggcattgggggtgtctcccctcgacatgccctcaccagccccagccttggaggccagggccgacagaacctgtggtttgccaaccctggaggcagcaacagcatgcccagtcagagccgcagctctgtgcagcgcacccactcgctcccggtccactcgtcaccccaggccattctcatgttccctccagactgcccggttcctgggcctgacctggagatcaatcccactctggagtctctgtgtctgagcatgacagaacacgccttgggtgatgggacagacaaaacctccaccatctgacgggacccacagcccagcgcacccataggctccctgggcggcgggcgggggccaacccccaacgggcttctccgcgacagcgagagggtgggctggctcagctatatattctaatatttttctactctcttaccctcttaacttttgtttaacattggcacatgccttgctcactcccaggcccgtcgagggatctctgctgaggcccggggagttgggggcagccaggataaagggggcagggactggccagactgcctgcctctctcctttccttcctcatccccacctggtcccatcccacccctgcctcctccagaccgctgaccacctgcctctccccaagggagcagactccccagagacaaactgaccactaccttgtggagcctgctcagaaacatttgacatttggggtgacgcgcagggcagagaacctgccctccagaatgttattgagaggagctggggagaaggaaggggagcaaggagaggaagctctctctcctctccctgcttccccttcaccattccccacattctgcaaggacaggagccaccttcctctctctcacctcccctggccctgttcaccagaggttctctatgattaatttcttaggcctatttaagatacatatttatatagttcttaacggtttttctctgatcatttcctctcatttttagaatccccaggtctctctcagccaagacagtggcagggagagcctgaactttatgaggggagagggcagagccccctcctccagaccctcaagctctaacccattttcctccagccctggctacccggatgaagaggttggaggtgggcagccagggtagccagtgaggtcaggaagtctgttgccttaacgtccccttccccacgaacacacacccttctccgctcccaggtctggttggtgagacttgggagtcaggaataagggaaaggggattgtttggtttttgggtttttccctaagcccctcccttttctttcagcctttttccttcccccattatgtcatgacctcacttaagtggaacactatatcataacccagagattcgtcccagccccagagtccgacagactgtctggtccctattcctaatgaggggttgtgttggggcccaggtggagggaggggatttgggggttcagactgcggggaagccagggtctccctcttcaacgccctcctccccctcaacccaccttcccaactgggacattctcaagcttttcacaccgaaaaggaaaaaaaatgttatttttagatacattttatgaataacttttgttatgaatatggctggtaaccattgtgtatgttattaaagatacaaaatgttggg

SEQ ID NO: 186864 - DNA, 6089 bp, Homo sapiens
  Payload ID: 16791
  Gene Symbol: SAMD5
  Gene Name: sterile alpha motif domain containing 5
  Uniprot ID: Q5TGI4
  ENST ID: ENST00000367474
  CDS Start-End: 3-524
ccatgtgcaccaacatagtttacgagtggctcaaagcgctgcagcttccgcagtacgcggagtccttcgtggataacggctacgatgacctggaggtgtgcaagcagatcggggacccggacctggatgccatcggggtgctggcgcccgcgcaccgccgccgtatcctggaggccgtgcgccggctgcgggagcaggacgccaacgccgccggcctctacttcacgcttgagccgcagccggcgccccccgggccgcccgccgacgccgtccccaccggccgccggggggagccgtgcggcggcccggcccagggcacccgcggggactctcgcggccacacgaccgccccccgcagcagggagctggtgagctaccccaaactgaagctgaagatcatgatcagggataagctcgtccgtgacggcatccacctgagcaagcccccgtactcccgcaaggtcccaatggctggcatcctagagtacttaatgaattggccgaagtcatcacagagccgctagatatcatttttgagacctcgtggaggactgatgaggtgcctgaagactggaaaagggcatatttagaaccttctttcaaaaagggaaatggatgatgaccctggaaatactcatcagcttaactttttgcttggacaaattctggaataatcaacttagtaaactgggtaactggcttataacagctagaaataaggcagtgaactatcacgcataaagaagtattgagttcatttttttaagaagatatcatgatgagatacagtcttatgcatttcttggcattctcccttccattcttaatgaaaacagatgaggttggctaaggcatttgagtcataacttagtttaagtacaatataacaaaaaggtagatttctgacagtaagtagtaattatattatttccaaatttgcttttaacttgagaacagtagctttaatttttatattcaagcatacattctacttcatttcatataggaccatgtttttataagataagatacataattctatgtagaatagtttggtgaaggaattcttattttaaggtgcttttatatagttattttgtatattggtacaatgttaaaggtgatgaattaaggaacatcaccaagagaggacaatttcttctaacttctctttttaaatttaatctggctgaggtttagtattaggactaatacaagtgtcttgctctgacatgcatcaagcaagagctagctattttacttcatagctagtttcttgcactctgtggagactgccagggccgcagctcacagcctgttctgagctgcagtgctttatcccaccttgctctccaggcttctgacttcaggcctgtgggggccgggaggtgggcagcggcagtggcctgaggagccctgtagaactacggctgaaaaagaaagtagattgaggtggggggaggaaattaacaggaatctagagtttttctaattcttatcgtcttatcgttcttgtgtttggatgctggtagtttttttttttttagacagagtctcgctctgtcacccaggctggagtgtagtggcacaatcttggctcacagtgactttcgcctcccaggttcaaggaattctcctgcctcggcctcttggtagctgggattacaggcacgcatcaccacacccagctaatttttttgtatttttagtagagatggggttttaccatgttggccaggctgttcttgaactcctggcctcaaatgatccactcgccgtggcctccagtagcgctgggattacaggcgtgagccatcacacccggcctggatgctggtagttttattttctgcttagaaaacgcaaccatgttgatgggaccaaaaacttagttgaaagaagccatggcaaaagatgttgacgtacaactggctcctgaggctgtcaattgtttagagctcccaagtagtactgcattacggaatctactacttagaagaatgtacaagatgtaagttcccatcggcaccgtcatggtaagaagaataagaaactctcaaaggaaaagaaacttacattcactttttcctggtccattttggttcctaagaatagataggccattaagaaggatattaggtttctaaggacaattttaacacaatactgctttaaaaatctgaagtttaaatagtttagctatttctgtaggttaattcaggcactgactaaaatcagtctcattatcatatacaaatgtaaggaagttaaattttaaaagcatgtataggttgtccttaaattatacaaaagcttttagtttcatcaggattatattccagttaacctttcatcttttttttttttccaaatgaactagggtctttaaaattcctaagtagattcttttgagtggtaggggagtctgtatagattacagatataatttattgtgataacaaatggcttcctgtttgacctcatttccaggtgtcgcatccgtggctgatttatttcacagatgtacatttgcatgtacttgttgaactttgctaggaaggactcaatttttgaaaaatctgttattttcactgtgggccttatgaggcaatctactgcaatggaaaaagggttccttggtcatttcaagttttattttctattagagtaatatctaacttcaattattttgccaggtttaaaccttctctctgtgtctgtggttagaatttgaaaataacaatgctctgcttaaagtaagagtcacagtcagcaaaaaaagccaatggattttaaaaagacatcttagttaaagctagaggaagaaaacttcaaataagcaaagaagtattgaaggatgcccacgaattcctttgcattaaaatcaagatgaggtaagaggtagaatataagagaaagggattatttttaccatgaattgtatctggggacagttagtcttagaaggagtaattttttcagcgtttttcctctgtatctaaacaccaataatatacttaatttttgaatataaaagaagtagcaattgactaagaataaatatgttataaaaactaggggattatcttgatttacatttcctagagtattaaaagagattaattacagactttcacttgataatattgaggagtctggagggtcatagcaaaattttctttagttcatcttaaaatttagggaggtaaaaaaagattttattcacataaaagatttcttggcatagggaaggcgtaatgttaagggcttcttccttacccaagtgggagctgaaccagtaattgtggggaaaactgaatttatagcaacaaaggatagtagtttctcaactgggagcatacgagcaatttctcagttcagagatatttatagcatcttggtgttatgcaataaacaatgacaacaacaagcattgagctttcactttggagttactcagatctgagtttaaattctaaaattattctagtagtattttcctgcggtgaatctgttaaggatgtaagctatagtgtagcttggggaatcatcttgaacagttatgaaactcattaaagcttcttttcccttgtctgtaaaatgggaaaaataaatacctctatagctcttaagaggcttaagagttctatggcttacacccacatacagtccttggctcagtgctaggcatgtagcaggtgctgactgcctctctcccttcccttctttactctcagttgtcttatttcttcttatgcagaagagattaccttaaagctgactagaaaactcagacataaattgacatttccttatcattgcctgaaacccactgaataagtcccctttgatttctctcaggaaggataaaaaaggctacagtacctgctcataggagttcagtaaatgtttattgattgaatgaaaagaatttgatttaaggaaacaataacactccatcctgggcaacagagcaagatcccgtctcaaaacaaaacaaaacaaaacaaaacagcaaattcataaaggccagcagttttcaagtctggggaaataggcacatggacagattatatgaaggtatttcattagctttcttctctttatggcagcttcagattgatgaatttgaggtacaaatgagtgagtgacatatgtatattttcctctgattttatgactgatttacaaattaggagtgcaaatgggctgttccccgatagcatcttctgggaagaatccaaccaagatacaaagcagatgatggtggatcggcaaactcttttctatgaaaagaaaaaccagatataccagggactggaaagcacctgcttgaaaattgatatgagcatgtctgaatttttcccttataagagcctgagtattgtaacaggtctcttgcacagggggttgaaaaataaaaaaagaagttaacataattaaaatgcttggacaaaacatttgctttatatagattcttacaagtaatatttgattaggtatcaaaataggtttaggcaggtggaagttctgaatttcaaggcaaataaggcatgaagggtggaacattgcatctagggaaaataagagaaataagtgaaagtctgaccctacattgccaattctcagaccaagtacaaagtattaggaattttttatatcagctgacatcttgtgcttacagtaaagccatatagatgcacacatagtgactttattaaatcaaatgagttgtgcagagcagagcaaatctattaggctttctcttttagagttttctaattttactcttattagctccctcagttgtcatcaattacatattcctacatcagatattttacactatcagattctttgattaaaaaatcatcttcagctttacattattaatctctgaggacataaaatcaaataactttctagtccatgatcattaatccctactattttagatatttccataaaaggcttaaagggaaaaaaaaatggtaggtagttcagaaaaaaatggctgggcacggtggctcacgcctgtaatcccagcactttgggaggccggggtgggcagatcatttgaggtcaggagtttgagaccagcctggccaacatggtgaaaccctgtgtctactaaaaatacaaaaaaaattagctgagtgtggtggtgtgcgcctgtaatcccagctactaaggcaggagaatggcttgaacccaggaggtggaggtcgcagtgagctgagatcgcgccagtgcgctccagcctgggcaacagagtgagactctgtctaaaaaaaaaaaaaaaagaaaagaaaaaagaaaaattgaagaacataacttttctacttatgaaatagataattttttaaaattgtttaaactcctggaaattaagtgttattttttattactgcagttgagagataccttttcagaggaaaacaagaggctaaattccatgttaagagctaagtagtatttttttcttaacaattttgccaaaatttcttctactggaccaaaaggaaataaatctacaataaatctactttctaaatattatttaagatgggaaatgtcttttataggtatattctgtataatacccttaattagatgaattatcccttatcattccaaaaatgaaatgctgtgttaaatatctccagggcaaagtggtatgttgactgggacaaacgttagaaattgtattgttcattgcacttgttgccctgttccccaagcttgtcaatgtttagagatactattcgggttgctaaagccattattcatagaaaatttctgcccctacagaagtgtgtgcatgggccttggaaaatctacatgtgtatatctgagtagcgaagcacagattcactctaattgaaagcagcagtttggttttgtaaatgtaattgcaattgacactttcttttccctttcagttattattttttttaaaggacgttatgagaaggcactatgaaaagcctaattggaatagcattatgaaccatgtaatgcatgcccatgcacactgtgatttgcaaacatatgtccgctcttcaataaatgttacggctttcacagcg

SEQ ID NO: 186865 - DNA, 393 bp, Homo sapiens
  Payload ID: 16791
  Gene Symbol: SAMD5
  Gene Name: sterile alpha motif domain containing 5
  ENST ID: ENST00000566741
  CDS Start-End: 1-294
ggcggcccggcccagggcacccgcggggactctcgcggccacacgaccgccccccgcagcagggagctggtgagctaccccaaactgaagctgaagatcatgatcagggataagctcgtccgtgacggcatccacctgagcaagcccccgtactcccgcaaggtattattatgccgctaccttcaagaagtaatttgcgtgctgtttattggagctgtgaatttaatcatctcaatcccacgctattacaggatgactataagaagatgtattgacatttctttggacacataattttgcctccattgtgtgttgttttgccagaatactgaaggcagtgtttgtatgatggcacatccaaataaaaagcaggtcctccttttgggacagtga

SEQ ID NO: 186866 - DNA, 2376 bp, Homo sapiens
  Payload ID: 16792
  Gene Symbol: SAMD7
  Gene Name: sterile alpha motif domain containing 7
  Uniprot ID: Q7Z3H4
  ENST ID: ENST00000335556
  CDS Start-End: 367-1707
gggcttaacatcttttagcctatctgtagaggatatcagagggcaaagtttctgtcatgaaataggactaatcaacttagttgaatttgtatttaaagcaaggttaaactgaattaagaccatttttgaaagaattgtcagatgtacctttcaacccgcagccagagaagcttctgcagttgaaggccagaaagtctttgtatggttcttccatctgcaatatcaaagacaagaagtcttcatagaggatggcctcctttggggattccaaagtaagacaatctcatctccttttggtgattcatctccacggcttttcctaaagaactccattagtggcgagagatattgaagacaaacccggtgatggctgtgaaccctttattgacaccaacagggcagcagacaatcccactgatcccctcaccatttgggcctccaactgtggacagagatgtattgccttccaccgtagctccaactgacccaagacagttttgcgttccttcccaatttggatcctctgttctaccaaacacaaatatggcaaatgtgttgtccagtcggatctacccaggttggggcattttaccacctgaatccataaaggcagtggccagaaggaatgaaatgattcaacggcatcatactgccaggacagaaatggaaatgtatgctatttaccagcaaaggagaatggaaaaaattaatcccaagggactagcaggcctagggatacccttcctctatggctccagtgtcccagctgcccccgctgcctaccatggcaggagcatgctccctgccggtgacctgcattttcacagaagcaccctcagaaaccttcagggaaaccccatgctagcggcaactgcaccacactttgaggagagctgggggcagagatgtcgtcgactcaggaaaaatacagggaatcaaaaagctctagacagtgatgctgagagttccaaaagtcaagcagaagaaaaaatcctaggtcagactcatgcagttccctatgaagaggatcattatgcaaaagacccagacattgaagcacccagcaaccagaagtcaagtgaaacgaatgaaaagccaacgacagctcttgccaacacctgtggagagctcgagcccacccataggaaaccctgggggtctcacaccactaccctgaaagcaaaggcctgggacgatgggaaagaggaggcttcggagcagatttttgcaacctgtgatgaaaagaatggggtttgccctccagttcctcgaccatctctgccaggaacacatgcactggttacaattggggggaatctttctttggatgaagatattcagaagtggaccgtggatgatgtgcacagcttcattcgcagccttccaggttgttcagactatgctcaggtatttaaagatcatgcaattgatggagaaactttgccattactcacagaagagcatcttcgaggcactatgggattaaagctagggccggcactaaaaattcagtcacaggtatctcagcatgtgggaagtatgttctacaagaaaactctttcatttcctataagacaagcatttgatcaaccagcagatacatcccctcttctggatcctaattcctggagtgatacaatgaacattttttgtccccaggatacaataattcctaaaggaattgagcgaggtagtatgagaaactaaaagccctcaaggaggaagaatagtcttagccagttttccaaagagcctaggatattacaaaggatgtgtgaggatttcccagtactggatggagaatgagaagagaaagtcagcctttctggggctttcatggaggagacttgcccaaggggcttccctgccagggctgaatgaccccagcaccaaatgactggagacgcatccttaggagcaaatgctaatgaaggggagatttacaaacatcaagaaagctgcagatggatgtttccatgaagaaatctctgaagaaaccaaaagagctgaaactgaaaaaagagctccctcccttttttcactcattttccattcccaaaccctgaaagagataaaggcaacccaatgaaaccacagagaggcagaagagaacgggcagaagtacagaacagaaatggagaagctgaccacgactccatctcttctcattccagatttccagcgtgaagcaggcccaagctagggaaggtgagaagctttaaccttaaattttcgagttttggccaggcgcggtggctcacggctgtaatcccaacactttgggagtctgaggcgggcggatcatgaggtcaggagattaagaccagcttggccaacatggtgaaaccccgtctctactaaaaatacaaaaaaaaa

SEQ ID NO: 186867 - DNA, 2399 bp, Homo sapiens
  Payload ID: 16792
  Gene Symbol: SAMD7
  Gene Name: sterile alpha motif domain containing 7
  Uniprot ID: Q7Z3H4
  ENST ID: ENST00000428432
  CDS Start-End: 390-1730
gggcttaacatcttttagcctatctgtagaggatatcagagggcaaagtttctgtcatgaaataggactaatcaacttagttgaatttgtatttaaagcaaggttaaactgaattaagaccatttttgaaagaattgtcagatgtacctttcaacccgcagccagagaagcttctgcagttgaaggccagaaagtctttgtatggttcttccatctgcaatatcaaagacaagaagtcttcatagaggatggcctcctttggggattccaaagtaagacaatctcatctccttttggtgattcatctccacggcttttcctaaaggtaacatgtaagaggaagaggtgaactccattagtggcgagagatattgaagacaaacccggtgatggctgtgaaccctttattgacaccaacagggcagcagacaatcccactgatcccctcaccatttgggcctccaactgtggacagagatgtattgccttccaccgtagctccaactgacccaagacagttttgcgttccttcccaatttggatcctctgttctaccaaacacaaatatggcaaatgtgttgtccagtcggatctacccaggttggggcattttaccacctgaatccataaaggcagtggccagaaggaatgaaatgattcaacggcatcatactgccaggacagaaatggaaatgtatgctatttaccagcaaaggagaatggaaaaaattaatcccaagggactagcaggcctagggatacccttcctctatggctccagtgtcccagctgcccccgctgcctaccatggcaggagcatgctccctgccggtgacctgcattttcacagaagcaccctcagaaaccttcagggaaaccccatgctagcggcaactgcaccacactttgaggagagctgggggcagagatgtcgtcgactcaggaaaaatacagggaatcaaaaagctctagacagtgatgctgagagttccaaaagtcaagcagaagaaaaaatcctaggtcagactcatgcagttccctatgaagaggatcattatgcaaaagacccagacattgaagcacccagcaaccagaagtcaagtgaaacgaatgaaaagccaacgacagctcttgccaacacctgtggagagctcgagcccacccataggaaaccctgggggtctcacaccactaccctgaaagcaaaggcctgggacgatgggaaagaggaggcttcggagcagatttttgcaacctgtgatgaaaagaatggggtttgccctccagttcctcgaccatctctgccaggaacacatgcactggttacaattggggggaatctttctttggatgaagatattcagaagtggaccgtggatgatgtgcacagcttcattcgcagccttccaggttgttcagactatgctcaggtatttaaagatcatgcaattgatggagaaactttgccattactcacagaagagcatcttcgaggcactatgggattaaagctagggccggcactaaaaattcagtcacaggtatctcagcatgtgggaagtatgttctacaagaaaactctttcatttcctataagacaagcatttgatcaaccagcagatacatcccctcttctggatcctaattcctggagtgatacaatgaacattttttgtccccaggatacaataattcctaaaggaattgagcgaggtagtatgagaaactaaaagccctcaaggaggaagaatagtcttagccagttttccaaagagcctaggatattacaaaggatgtgtgaggatttcccagtactggatggagaatgagaagagaaagtcagcctttctggggctttcatggaggagacttgcccaaggggcttccctgccagggctgaatgaccccagcaccaaatgactggagacgcatccttaggagcaaatgctaatgaaggggagatttacaaacatcaagaaagctgcagatggatgtttccatgaagaaatctctgaagaaaccaaaagagctgaaactgaaaaaagagctccctcccttttttcactcattttccattcccaaaccctgaaagagataaaggcaacccaatgaaaccacagagaggcagaagagaacgggcagaagtacagaacagaaatggagaagctgaccacgactccatctcttctcattccagatttccagcgtgaagcaggcccaagctagggaaggtgagaagctttaaccttaaattttcgagttttggccaggcgcggtggctcacggctgtaatcccaacactttgggagtctgaggcgggcggatcatgaggtcaggagattaagaccagcttggccaacatggtgaaaccccgtctctactaaaaatacaaaaaaaaa

SEQ ID NO: 186868 - DNA, 1607 bp, Homo sapiens
  Payload ID: 16792
  Gene Symbol: SAMD7
  Gene Name: sterile alpha motif domain containing 7
  ENST ID: ENST00000487910
  CDS Start-End: 73-369
tggtgattcatctccacggcttttcctaaagaactccattagtggcgagagatattgaagacaaacccggtgatggctgtgaaccctttattgacaccaacagggcagcagacaatcccactgatcccctcaccatttgggcctccaactgtggacagagatgtattgccttccaccgtagctccaactgacccaagacagttttgcgttccttcccaatttggatcctctgttctaccaaacacaaatatggcaaatgtgttgtccagtcggatctacccaggttggggcattttaccacctgaatccataaaggcagtggccagaaggaatgaaatgattcaacggcatcatactgccagggtttgaaaacctcttcccagtactttaggttttttgaggattaatctctggcaaggaactagctgtgctgcgtaagccccatccctgctaaatttgcctcgtctgtttaaaggacagaaatggaaatgtatgctatttaccagcaaaggagaatggaaaaaattaatcccaagggactagcaggcctagggatacccttcctctatggctccagtgtcccagctgcccccgctgcctaccatggcaggagcatgctccctgccggtgacctgcattttcacagaagcaccctcagaaaccttcagggaaaccccatgctagcggcaactgcaccacactttgaggagagctgggggcagagatgtcgtcgactcaggaaaaatacagggaatcaaaaagctctagacagtgatgctgagagttccaaaagtcaagcagaagaaaaaatcctaggtcagactcatgcagttccctatgaagaggatcattatgcaaaagacccagacattgaagcacccagcaaccagaagtcaagtgaaacgaatgaaaagccaacgacagctcttgccaacacctgtggagagctcgagcccacccataggaaaccctgggggtctcacaccactaccctgaaagcaaaggcctgggacgatgggaaagaggaggcttcggagcagatttttgcaacctgtgatgaaaagaatggggtttgccctccagttcctcgaccatctctgccaggaacacatgcactggttacaattggggggaatctttctttggatgaagatattcagaagtggaccgtggatgatgtgcacagcttcattcgcagccttccaggttgttcagactatgctcaggtatttaaagatcatgcaattgatggagaaactttgccattactcacagaagagcatcttcgaggcactatgggattaaagctagggccggcactaaaaattcagtcacaggtatctcagcatgtgggaagtatgttctacaagaaaactctttcatttcctataagacaagcatttgatcaaccagcagatacatcccctcttctggatcctaattcctggagtgatacaatgaacattttttgtccccaggatacaataattcctaaaggaattgagcgaggtagtatgagaaactaaaagccctcaaggaggaagaatagtcttagccagttttccaaagagcctaggatattacaaaggatgtgtgaggatttccca

SEQ ID NO: 186869 - DNA, 6935 bp, Homo sapiens
  Payload ID: 16793
  Gene Symbol: SAMD8
  Gene Name: sterile alpha motif domain containing 8
  Uniprot ID: Q96LT4
  ENST ID: ENST00000372687
  CDS Start-End: 86-1066
ctcggaccgcggaggtgagcgggagctgaggctgaggagaggggagcttggggggcgcctgctgccaagggcagcggaggaggaaatggcaggtcctaatcaactctgcattcgccgctggactaccaagcatgtagctgtgtggctgaaggatgaaggcttttttgaatatgtggacattttatgcaataagcaccgacttgatggaatcacattgctaacattgactgaatatgatctccggtctcctcctctggaaatcaaagtcttaggggacattaaaaggttaatgctctcagtccgaaaattgcagaaaatacatattgatgttttagaagagatgggctacaacagtgacagtcccatgggttccatgacccctttcatcagtgctcttcagagtacagactggctctgtaatggggagctttcccatgactgtgacggacccataactgacttgaattctgatcagtaccagtacatgaatggtaaaaacaaacattctgttcgaagattggacccagaatactggaagactatactgagttgtatatatgtttttatagtatttggatttacatctttcattatggttatagtccatgagcgagtgcctgacatgcagacctatccaccactcccagatatattcttagacagcgttcctagaatcccatgggcctttgccatgacggaagtatgtggcatgattctgtgctatatttggctcctggttcttcttcttcacaagcacaggtcaatacttctgcgaaggctctgtagtctgatgggaactgtattcttgcttcgctgctttaccatgtttgtgacctccctctccgtgccaggacaacacctgcagtgtactggaaagatatatggcagtgtatgggagaaattacatcgagcctttgccatttggagtggctttggtatgaccctgactggcgttcacacatgtggagattacatgtttagtggccacacagtcgtcctaactatgctgaatttctttgtcaccgaatgtaagtatctttttagtgcttctatgcgtattaggtaactagctgcagtgaaggctgtgggaagggtgtcagatcctgtgaagaatggcaaaacagcctgacctgagaaacgtgactgagaagcattggaaggaatgtagctttaaaatgatctttctgtccttttcctagatacaccaagaagctggaatttcttgcacactttatcctgggttctcaacctctttggaatcttcttcatcttggctgcccatgaacattattctattgatgtgtttattgctttttatataacaacaagactctttttgtactaccatactctggccaataccagagcatatcagcagagtaggagagcaaggatttggtttcccatgttctctttttttgaatgcaatgttaatggcacagtacctaatgaatattgttggccattttcaaaaccagcaataatgaaaagactaattggatgaatactatctttctaatgaatttgtgattaaatatataatagttgttgaaaatgagtaactttgcgttctccccctaggttgttcttagatgcctggcttatgtgttgacaaagtaaagttttctgttctgagcaaagttatgattataaaaagcaagaaagaacaatcaagagtccttatgtagctatttgaacagaaagcttaagtagatgttttctgccccttctctttaggaagacttaatgttgtgattgaagtcaggctgtacccttacctgttgagtatttgcttattgaactttaaacaagtcaacttgagcagtttgctggttgaggaattttcattgatttccagtagggctctagtcaagaaataatatgttttgaagctccttattacctttagaagaagaaaccctaacaagtgacagtacttgttctttggactaatctttgtttcattttaaaaaatgcaaccctgggacatgatctgttttactgacaaagagtttttgccttctgaaccatctttaaatatactgagcataccaggatgcctgaaataagaagagaatgaaagaggccatagatgacgtgacagagtactggctaggatgccattggtctcctcattaatgcaaatgtagggctggcatatttcaccaaagatgcaacaaaagatgcagtgccagtgtgaccctcagtgagtattcatgagggaaaaatggctgcatccataaaaataaatgggcttaatgttagtggtataggtacccagaataacttctttgtgctatagttgttagatgacagttcaattttatgcttttttaatggtgttattaaatgagccaaataggagtgttttaccagatgttagataaagttcttaatgccgttaagtagggaggtatgcatgcaaagaattgttttctcctgaaaagaaacttacagcacgcaaaatataactttttggtttttgaaatttatcattcttggctgttggaagtaaacagtctcagacatacttggatatgaaaaagtttcgttgttttttacttttaaatataatggtgtatatacattctttctatttagtcttaatttggcagtcaggaagtgatataacttagctgctatttacaacactagaaatttagtactttaagtaatttcacatctatgataacatttgttactttatttttaatgatttttttacagtagttatgacagtaggatggttatggaattggaatttaaactcccaactaatgagcttaagctgcttggaatattaattatgtagtttttacattccattttaaaacaaaaacttagaaaaggtgctggcattctgaggcctgcaattaggccacatagcagaagcttgctccttccttatctgggtgaaatattttatttttgcactttgagtcatattcccacccctgtataagctacataggagcctgaatgaattgggtaggaaaggaaattatgcaaacaagtctcagctagtgctgaatgaccccaatttgggtctgctgtgaacatcatttttgtatttctcacttgagaaatgctgcaaggcaattcaacttttatgcttttaaatctcacaactcagaatctgatatcttaaatcactgattctgttacatgctaggaacaaaatgccaacatctcatgtaaagaagttgcataatcatgaaaaataaaggatgtttcctatgccagttagagtggtttgacccttcaggtaaaaagatatgttactgttatttttctacgtgacagaacagactgaatttagctagggaggcagtgatgttggcttttgggaaagggttcaaaaaactgtatggcaacattaatgctaaaatgttaagccgagtgcagtggtgcaaggctatagtcccaggttctgaggaggctgaggcaggaggattgcttgaggccaggagttagaaactagagtgtgttataacgcctatgaataaccactgcattccagcccgggcaaggtagcaagacccattctcttaaaaacatggctgggtgcaatggctcacgcctgtaatcccagcactttgggaggccaaggcaggcggatggcttgaggtcaggagttcgagattagcctggccaatatggtgaaacctcatctctactaaaactacaaaaattagctgggcatggtggcacgcacttgtaatcccagctacttgggagactgaggaacaagaaacacttgaacccaggaggtggagtttgcattgagctgagatcactccactgcactccagcctaggtgacagagtgagactccatctcaaaacgaaacaaaacaaaacaaaacaaattagagtgggtgcagtgtctaatgcctgtaatcgcagcactttgggaggctaaggcaggaggatcacttgagctcaggtaaaagagaccagcctgggcaacaaagtgagacctcatccccacaaaaagttgtttagaaaattagctgggcgtggtgatgcatgcctgtggtcccagctacatgggaggctgaggcagaaggatcacttgagcccaaggaggttgaggctacagtgagctgtaatcatgccactgcactccagccttggggacagagtgagaccctgcctcaatcaatcaatcaatcaataacaaaaacttaaatagctattaacctcagtcttctttccttcatataaattctattctaagaccaaatagaaaaataaatgtaactaactttgcagagctattgacattgagagacctaacaacagactgcaatggggattgtaaaataacttttcagccttgcacttgctcatatatgttttgagaaaaatgtaagttaggtataacttattgttttaactattataaggcagtgtttacataaattaatcatctctttcttggaaaacattgagacaaatttattttcagttttacttaaacatgaaacctgtattttagttgctttttgttttgtccagaaatttccagattttgtcttcattttttttcctggttaaaatctaaaccatagtgaagatagtatttatgtttacattttatctgtgaatgtggctaagcagagaagctacatggctttggtctacatattttttgaccttgtatttggttctgtagttgcagacttgtgaaggcttacatcatcatggagactttagtaaggaaggaaccaaaaggtttttggtttggggatgcaaactggaggttatgttacaagtcttcaatgcattttctgtgttcctggcagcagtgttgcctttttttttcttttccttttttttttttaaagaccaggtagggtagtgttattgaagggtaattgaagagtggtagagagtaagaggttttgaaggaggcaggtttgctgttatcacaaaataatttgggggaaacctttcgtggctgtgctgcaagaattctttatgtggctatcctctccatagttttctgaccagaattgcaagggcaaaaatagaacttctagctctatttatttgtatcctttgaaatcagaacttatccttagaaccagtcagttaaataatgcggactatgcctataatcccagcactttaggaggctgaggcaggcagatcacgaggtcaggagttcgaggccagcctggccaatgtggtgaaactccgtctctactaaaaatacaaaaattagccgggcgtggtggtgcacgcccatgcctgtagtcccagctactcgggaggctgaggcagaagaatcgcttgaacccaggaggcggaggttgcagtgagccgagatactgccactacacttcagtctgggtgacagagcgagactccatctcaaaaaaacaaaacaaaataaaataataatgtgggctattcagaagaaaaagtcagtgacagagagaccagaacccattggatcaagagacctgcagggattataactctttactctgtgagcagcggtgtttcgtgccctgtctctgcctgtgtgtttttactaagaattccagaaatcctgtaatttgtaaatgggaaacagaggaaccagattgttttatagctgataagaaacagtctgttttagaaacatctgtttggaaagtattactcatgtattcacaaagtcatatttataacactagtcttctttgactgtattcaacaaaaggcagtttcaccattaatttcatagtaagcttttttaaaggattctagatctaaattgcctaagaatgttaaccacattcttgttttaaactctctaatttaataaatgtaattattttatagtcttttatagacttacattttcttcatactaaaggtaatgataatatagtcatttgccagtactttaaggtattcaggcatttgagacaagaaagctgtcttgtagaatagtccaattgctttcttaaacagtactggtttcatttagacagtttctaagccagcaaaggtgtcaattttaatgccaacttgacagtttaacagttagtgtttgtaagcagtttagcctgaattatcccatactgctgtagaggagaattgttagtaacatcaaaggtcagaatgcttcaggtgactaataagaatggaaagagactgagtaggttttttgtttcttttccctgtctttgagtaactttgaatgactaaaattagtatgaaactaggttttggacccccttctcacctcacccggatgtaatgccaccaatttcaaataactaaaatgtgaccaattactttgcttcaagttctatacaaatatctctgaaatctgtaagccatatttcagctattctggtttttataatacattctaccctaaattaaccaaaggactttttattcagtgtattccatgtttcagcataaggaaagtttgtgcctgatatggcaggagaaagaacactatggtaatttcattgttacttcaggtctctttcaatctgaagaactgggttgtctggagaattgaacatagccaagcaatattatcaattagtaatgtcatcttaaaaatgttcacttttactaagttttattcagaggatctatgtattattagaaaaatgaagtatttctgacatggaacaaagaaagtggaaactggtacttaatgggggaagcaaaattagctgggactaaaacggacatgttttgttttgtgaattctacctaaatgtctctctatccacagagaaactagtattacttgaagatgtgaaagttcctgtggtagccataccttgaagcacagtgtttgtacataagtaaatatcttgattctaaattaaatccagatttaactaatatatattattttatatctttgttgtattaaaatgtttaaaaacactaaaaataaaacatttgaaagttgga

SEQ ID NO: 186870 - DNA, 1654 bp, Homo sapiens
  Payload ID: 16793
  Gene Symbol: SAMD8
  Gene Name: sterile alpha motif domain containing 8
  ENST ID: ENST00000372690
  CDS Start-End: 79-1515
ggtagggccccgcctcccgaagcagttccggttcggctccgagcagctgccggcgcggcggtgacggcggccgggacgatgcctgcgcgcagtcgccaccgcccccgcctccactccggctccccgccccgggctccgcccccgccgcttgaggcgcttcactccggcgaggcggggagggccccggactccgacggcggctcggacgccgactcggaggtgggtccggggagcccgactcggaccgcggaggcagcggaggaggaaatggcaggtcctaatcaactctgcattcgccgctggactaccaagcatgtagctgtgtggctgaaggatgaaggcttttttgaatatgtggacattttatgcaataagcaccgacttgatggaatcacattgctaacattgactgaatatgatctccggtctcctcctctggaaatcaaagtcttaggggacattaaaaggttaatgctctcagtccgaaaattgcagaaaatacatattgatgttttagaagagatgggctacaacagtgacagtcccatgggttccatgacccctttcatcagtgctcttcagagtacagactggctctgtaatggggagctttcccatgactgtgacggacccataactgacttgaattctgatcagtaccagtacatgaatggtaaaaacaaacattctgttcgaagattggacccagaatactggaagactatactgagttgtatatatgtttttatagtatttggatttacatctttcattatggttatagtccatgagcgagtgcctgacatgcagacctatccaccactcccagatatattcttagacagcgttcctagaatcccatgggcctttgccatgacggaagtatgtggcatgattctgtgctatatttggctcctggttcttcttcttcacaagcacaggtcaatacttctgcgaaggctctgtagtctgatgggaactgtattcttgcttcgctgctttaccatgtttgtgacctccctctccgtgccaggacaacacctgcagtgtactggaaagatatatggcagtgtatgggagaaattacatcgagcctttgccatttggagtggctttggtatgaccctgactggcgttcacacatgtggagattacatgtttagtggccacacagtcgtcctaactatgctgaatttctttgtcaccgaatatacaccaagaagctggaatttcttgcacactttatcctgggttctcaacctctttggaatcttcttcatcttggctgcccatgaacattattctattgatgtgtttattgctttttatataacaacaagactctttttgtactaccatactctggccaataccagagcatatcagcagagtaggagagcaaggatttggtttcccatgttctctttttttgaatgcaatgttaatggcacagtacctaatgaatattgttggccattttcaaaaccagcaataatgaaaagactaattggatgaatactatctttctaatgaatttgtgattaaatatataatagttgttgaaaatgagtaactttgcgttctccccctaggttgttcttagatgcctggcttatgtgttgacaaagtaaagttttctgttctgagcaaagtt

SEQ ID NO: 186871 - DNA, 919 bp, Homo sapiens
  Payload ID: 16793
  Gene Symbol: SAMD8
  Gene Name: sterile alpha motif domain containing 8
  ENST ID: ENST00000447533
  CDS Start-End: 159-919
gagagccgactgaggccttgtggactgcagtgggccctccggtccctctaaacccccaggcctcctctctgcttggtatctgtttgggattgaagaccgttggttccataaacctccatgaagatgggagtctacctgaagaggcagcggaggaggaaatggcaggtcctaatcaactctgcattcgccgctggactaccaagcatgtagctgtgtggctgaaggatgaaggcttttttgaatatgtggacattttatgcaataagcaccgacttgatggaatcacattgctaacattgactgaatatgatctccggtctcctcctctggaaatcaaagtcttaggggacattaaaaggttaatgctctcagtccgaaaattgcagaaaatacatattgatgttttagaagagatgggctacaacagtgacagtcccatgggttccatgacccctttcatcagtgctcttcagagtacagactggctctgtaatggggagctttcccatgactgtgacggacccataactgacttgaattctgatcagtaccagtacatgaatggtaaaaacaaacattctgttcgaagattggacccagaatactggaagactatactgagttgtatatatgtttttatagtatttggatttacatctttcattatggttatagtccatgagcgagtgcctgacatgcagacctatccaccactcccagatatattcttagacagcgttcctagaatcccatgggcctttgccatgacggaagtatgtggcatgattctgtgctatatttggctcctggttcttcttcttcacaagcacaggtcaatacttctgcgaaggctctgtagtctgatgggaactgtattcttgcttcgctgctttaccatgtttgtgacctccctctccgt

SEQ ID NO: 186872 - DNA, 6782 bp, Homo sapiens
  Payload ID: 16793
  Gene Symbol: SAMD8
  Gene Name: sterile alpha motif domain containing 8
  Uniprot ID: Q96LT4
  ENST ID: ENST00000542569
  CDS Start-End: 104-1351
cggcgaggcggggagggccccggactccgacggcggctcggacgccgactcggaggtgggtccggggagcccgactcggaccgcggaggcagcggaggaggaaatggcaggtcctaatcaactctgcattcgccgctggactaccaagcatgtagctgtgtggctgaaggatgaaggcttttttgaatatgtggacattttatgcaataagcaccgacttgatggaatcacattgctaacattgactgaatatgatctccggtctcctcctctggaaatcaaagtcttaggggacattaaaaggttaatgctctcagtccgaaaattgcagaaaatacatattgatgttttagaagagatgggctacaacagtgacagtcccatgggttccatgacccctttcatcagtgctcttcagagtacagactggctctgtaatggggagctttcccatgactgtgacggacccataactgacttgaattctgatcagtaccagtacatgaatggtaaaaacaaacattctgttcgaagattggacccagaatactggaagactatactgagttgtatatatgtttttatagtatttggatttacatctttcattatggttatagtccatgagcgagtgcctgacatgcagacctatccaccactcccagatatattcttagacagcgttcctagaatcccatgggcctttgccatgacggaagtatgtggcatgattctgtgctatatttggctcctggttcttcttcttcacaagcacaggtcaatacttctgcgaaggctctgtagtctgatgggaactgtattcttgcttcgctgctttaccatgtttgtgacctccctctccgtgccaggacaacacctgcagtgtactggaaagatatatggcagtgtatgggagaaattacatcgagcctttgccatttggagtggctttggtatgaccctgactggcgttcacacatgtggagattacatgtttagtggccacacagtcgtcctaactatgctgaatttctttgtcaccgaatatacaccaagaagctggaatttcttgcacactttatcctgggttctcaacctctttggaatcttcttcatcttggctgcccatgaacattattctattgatgtgtttattgctttttatataacaacaagactctttttgtactaccatactctggccaataccagagcatatcagcagagtaggagagcaaggatttggtttcccatgttctctttttttgaatgcaatgttaatggcacagtacctaatgaatattgttggccattttcaaaaccagcaataatgaaaagactaattggatgaatactatctttctaatgaatttgtgattaaatatataatagttgttgaaaatgagtaactttgcgttctccccctaggttgttcttagatgcctggcttatgtgttgacaaagtaaagttttctgttctgagcaaagttatgattataaaaagcaagaaagaacaatcaagagtccttatgtagctatttgaacagaaagcttaagtagatgttttctgccccttctctttaggaagacttaatgttgtgattgaagtcaggctgtacccttacctgttgagtatttgcttattgaactttaaacaagtcaacttgagcagtttgctggttgaggaattttcattgatttccagtagggctctagtcaagaaataatatgttttgaagctccttattacctttagaagaagaaaccctaacaagtgacagtacttgttctttggactaatctttgtttcattttaaaaaatgcaaccctgggacatgatctgttttactgacaaagagtttttgccttctgaaccatctttaaatatactgagcataccaggatgcctgaaataagaagagaatgaaagaggccatagatgacgtgacagagtactggctaggatgccattggtctcctcattaatgcaaatgtagggctggcatatttcaccaaagatgcaacaaaagatgcagtgccagtgtgaccctcagtgagtattcatgagggaaaaatggctgcatccataaaaataaatgggcttaatgttagtggtataggtacccagaataacttctttgtgctatagttgttagatgacagttcaattttatgcttttttaatggtgttattaaatgagccaaataggagtgttttaccagatgttagataaagttcttaatgccgttaagtagggaggtatgcatgcaaagaattgttttctcctgaaaagaaacttacagcacgcaaaatataactttttggtttttgaaatttatcattcttggctgttggaagtaaacagtctcagacatacttggatatgaaaaagtttcgttgttttttacttttaaatataatggtgtatatacattctttctatttagtcttaatttggcagtcaggaagtgatataacttagctgctatttacaacactagaaatttagtactttaagtaatttcacatctatgataacatttgttactttatttttaatgatttttttacagtagttatgacagtaggatggttatggaattggaatttaaactcccaactaatgagcttaagctgcttggaatattaattatgtagtttttacattccattttaaaacaaaaacttagaaaaggtgctggcattctgaggcctgcaattaggccacatagcagaagcttgctccttccttatctgggtgaaatattttatttttgcactttgagtcatattcccacccctgtataagctacataggagcctgaatgaattgggtaggaaaggaaattatgcaaacaagtctcagctagtgctgaatgaccccaatttgggtctgctgtgaacatcatttttgtatttctcacttgagaaatgctgcaaggcaattcaacttttatgcttttaaatctcacaactcagaatctgatatcttaaatcactgattctgttacatgctaggaacaaaatgccaacatctcatgtaaagaagttgcataatcatgaaaaataaaggatgtttcctatgccagttagagtggtttgacccttcaggtaaaaagatatgttactgttatttttctacgtgacagaacagactgaatttagctagggaggcagtgatgttggcttttgggaaagggttcaaaaaactgtatggcaacattaatgctaaaatgttaagccgagtgcagtggtgcaaggctatagtcccaggttctgaggaggctgaggcaggaggattgcttgaggccaggagttagaaactagagtgtgttataacgcctatgaataaccactgcattccagcccgggcaaggtagcaagacccattctcttaaaaacatggctgggtgcaatggctcacgcctgtaatcccagcactttgggaggccaaggcaggcggatggcttgaggtcaggagttcgagattagcctggccaatatggtgaaacctcatctctactaaaactacaaaaattagctgggcatggtggcacgcacttgtaatcccagctacttgggagactgaggaacaagaaacacttgaacccaggaggtggagtttgcattgagctgagatcactccactgcactccagcctaggtgacagagtgagactccatctcaaaacgaaacaaaacaaaacaaaacaaattagagtgggtgcagtgtctaatgcctgtaatcgcagcactttgggaggctaaggcaggaggatcacttgagctcaggtaaaagagaccagcctgggcaacaaagtgagacctcatccccacaaaaagttgtttagaaaattagctgggcgtggtgatgcatgcctgtggtcccagctacatgggaggctgaggcagaaggatcacttgagcccaaggaggttgaggctacagtgagctgtaatcatgccactgcactccagccttggggacagagtgagaccctgcctcaatcaatcaatcaatcaataacaaaaacttaaatagctattaacctcagtcttctttccttcatataaattctattctaagaccaaatagaaaaataaatgtaactaactttgcagagctattgacattgagagacctaacaacagactgcaatggggattgtaaaataacttttcagccttgcacttgctcatatatgttttgagaaaaatgtaagttaggtataacttattgttttaactattataaggcagtgtttacataaattaatcatctctttcttggaaaacattgagacaaatttattttcagttttacttaaacatgaaacctgtattttagttgctttttgttttgtccagaaatttccagattttgtcttcattttttttcctggttaaaatctaaaccatagtgaagatagtatttatgtttacattttatctgtgaatgtggctaagcagagaagctacatggctttggtctacatattttttgaccttgtatttggttctgtagttgcagacttgtgaaggcttacatcatcatggagactttagtaaggaaggaaccaaaaggtttttggtttggggatgcaaactggaggttatgttacaagtcttcaatgcattttctgtgttcctggcagcagtgttgcctttttttttcttttccttttttttttttaaagaccaggtagggtagtgttattgaagggtaattgaagagtggtagagagtaagaggttttgaaggaggcaggtttgctgttatcacaaaataatttgggggaaacctttcgtggctgtgctgcaagaattctttatgtggctatcctctccatagttttctgaccagaattgcaagggcaaaaatagaacttctagctctatttatttgtatcctttgaaatcagaacttatccttagaaccagtcagttaaataatgcggactatgcctataatcccagcactttaggaggctgaggcaggcagatcacgaggtcaggagttcgaggccagcctggccaatgtggtgaaactccgtctctactaaaaatacaaaaattagccgggcgtggtggtgcacgcccatgcctgtagtcccagctactcgggaggctgaggcagaagaatcgcttgaacccaggaggcggaggttgcagtgagccgagatactgccactacacttcagtctgggtgacagagcgagactccatctcaaaaaaacaaaacaaaataaaataataatgtgggctattcagaagaaaaagtcagtgacagagagaccagaacccattggatcaagagacctgcagggattataactctttactctgtgagcagcggtgtttcgtgccctgtctctgcctgtgtgtttttactaagaattccagaaatcctgtaatttgtaaatgggaaacagaggaaccagattgttttatagctgataagaaacagtctgttttagaaacatctgtttggaaagtattactcatgtattcacaaagtcatatttataacactagtcttctttgactgtattcaacaaaaggcagtttcaccattaatttcatagtaagcttttttaaaggattctagatctaaattgcctaagaatgttaaccacattcttgttttaaactctctaatttaataaatgtaattattttatagtcttttatagacttacattttcttcatactaaaggtaatgataatatagtcatttgccagtactttaaggtattcaggcatttgagacaagaaagctgtcttgtagaatagtccaattgctttcttaaacagtactggtttcatttagacagtttctaagccagcaaaggtgtcaattttaatgccaacttgacagtttaacagttagtgtttgtaagcagtttagcctgaattatcccatactgctgtagaggagaattgttagtaacatcaaaggtcagaatgcttcaggtgactaataagaatggaaagagactgagtaggttttttgtttcttttccctgtctttgagtaactttgaatgactaaaattagtatgaaactaggttttggacccccttctcacctcacccggatgtaatgccaccaatttcaaataactaaaatgtgaccaattactttgcttcaagttctatacaaatatctctgaaatctgtaagccatatttcagctattctggtttttataatacattctaccctaaattaaccaaaggactttttattcagtgtattccatgtttcagcataaggaaagtttgtgcctgatatggcaggagaaagaacactatggtaatttcattgttacttcaggtctctttcaatctgaagaactgggttgtctggagaattgaacatagccaagcaatattatcaattagtaatgtcatcttaaaaatgttcacttttactaagttttattcagaggatctatgtattattagaaaaatgaagtatttctgacatggaacaaagaaagtggaaactggtacttaatgggggaagcaaaattagctgggactaaaacggacatgttttgttttgtgaattctacctaaatgtctctctatccacagagaaactagtattacttgaagatgtgaaagttcctgtggtagccataccttgaagcacagtgtttgtacataagtaaatatcttgattctaaattaaatccagatttaactaatatatattattttatatctttgttgtattaaaatgtttaaaaacactaaaaataaaacatttgaaagttgga

SEQ ID NO: 186873 - DNA, 6852 bp, Homo sapiens
  Payload ID: 16794
  Gene Symbol: SAMD9
  Gene Name: sterile alpha motif domain containing 9
  Uniprot ID: Q5K651
  ENST ID: ENST00000379958
  CDS Start-End: 271-5040
gacagaagcagagaatacatagacttccgttaaaaccagaatgaggaaaatacttttctctagcatcgtaggaggaagaaaacaaacacatcagatattttcagcactaaaagagatggttttccccacatatatgtaaaagaaatttgcaagactactggattttgatctcatggttgcagtgggtgaataggtggccttttgtgatctcctacatcaccctggaagtgagacttcttcggtttcttctagagtcagtttggtatcagaatggcaaagcaacttaaccttccagaaaatacagatgattggacaaaagaggatgtaaatcagtggttagaaagtcataagattgaccaaaaacacagggaaattttgactgaacaagacgtgaatggagcagtcttgaagtggttaaaaaaagaacatcttgttgatatgggcatcacacatggaccagctattcaaatagaagaactattcaaagaattgcggaaaacagccattgaagattcgattcagacatctaagatgggaaagcccagtaaaaatgctcctaaagaccaaactgtgtctcaaaaggaacgtagagaaacttcaaagcaaaaacaaaagggtaaagagaacccagatatggctaatccgtctgcaatgagtacaactgctaaaggttctaagtcactaaaagttgagctcatagaagataaaatagattatacaaaggaaaggcaaccatccatagacctgacatgtgtatcatatccatttgatgaattcagtaatccatatcgttacaagttggattttagtctacagcctgaaacaggaccaggcaatctcattgatccgatacatgaattcaaagccttcacaaatacagcaacagccacagaagaggatgtcaagatgaaatttagcaatgaggttttccgatttgcttcagcttgtatgaattcacgtaccaatggcactattcattttggagtcaaagacaaaccccatgggaaaattgttggcatcaaagtcaccaatgataccaaggaagccctcattaaccatttcaatctgatgataaacaagtattttgaagaccatcaagtccaacaagcaaagaagtgcattcgagagccaagatttgtggaagttttactgccaaatagtactctatctgacagatttgttattgaagtggacattattccacagttctctgaatgccaatatgattatttccagattaaaatgcaaaattacaacaacaaaatatgggaacaaagtaaaaaattctcactatttgtgcgagatgggaccagctctaaggacattacgaaaaataaagttgatttcagagcatttaaagcagattttaaaacactggcagagtccagaaaagcagcagaagaaaaattcagagcaaaaacaaataaaaaagaaagagagggaccaaagttggttaaattattgacaggaaatcaagatttgttagataattcatactatgaacagtacattcttgtaacaaataaatgccacccagatcaaacaaaacacttagatttcctgaaggaaattaaatggtttgctgtattggagtttgatcctgagtctaacatcaatggagtggtcaaagcttacaaagaaagccgagtagcaaaccttcactttccaagtgtatatgtagaacagaaaaccacaccaaatgagacgatttctactctaaatctttaccatcaacccagctggattttctgcaatggcaggttagaccttgacagtgaaaaatataaaccctttgatccaagttcctggcaaagagaaagagcttctgatgtcaggaaactgatttcatttcttacacatgaagacataatgccaagagggaagtttttggtggtatttctattactgtcctctgtggatgacccaagagatcccctcattgagactttctgtgctttctaccaggatctcaaaggaatggaaaatatactgtgtatttgtgtgcacccacacatatttcagggatggaaagatctacttgaagcaagattaataaaacaccaagatgaaatttcaagccaatgtatttctgctttaagccttgaagagatcaatggcactattcttaaactaaaatctgtgactcaatcttcaaaaaggcttttgccatctattggtttatcgactgtccttctgaaaaaggaagaagatatcatgactgctctggaaattatctgtgaaaatgaatgtgagggtacactgttagagaaggacaaaaataaattccttgaattcaaggcatcaaaagaggaagacttctatcgaggtggcaaagtgtcatggtggaacttctacttctcttctgaaagttattcttcaccttttgtcaaaagggataaatatgaaagacttgaagcaatgattcaaaactgtgcagattcttctaaaccaacaagtaccaaaattattcatctgtatcatcatccaggctgtgggggaactaccttggctatgcacattctctgggaactaaggaagaaattcagatgtgctgtgctgaaaaacaagacagtggatttttctgaaattggagaacaggtaaccagtttaatcacctatggggcaatgaaccgtcaggaatacgtacctgtactactccttgttgatgattttgaagaacaagataatgtctatcttctgcagtactctattcaaacagctatagctaaaaagtacattcgatatgaaaaacctctggtgattatcctaaattgtatgagatcacaaaatcctgaaaaaagtgcaaggatcccagacagtattgccgtaatacagcaactctctcccaaagaacagagagcttttgagcttaaattgaaagaaatcaaagaacagcataaaaactttgaggatttttattcctttatgatcatgaaaaccaattttaataaagaatacatagaaaatgtggtccggaatatcctgaaagggcagaatattttcaccaaggaagcaaagctcttttcttttctggctcttcttaattcatatgtgcctgataccaccatttcactatcacagtgtgaaaaattcttaggaattggaaacaagaaggctttctgggggacagaaaaatttgaagacaagatgggcacctactctacaattctgataaaaacagaggtcatcgaatgtgggaactactgtggagtacgcatcattcactctttgattgcagagttctcactggaagaattgaagaaaagctatcacctgaataaaagtcaaattatgttggatatgctaactgagaatttgttcttcgatactggtatgggaaaaagtaaatttttgcaagatatgcacacactcctactcacaagacaccgcgatgaacatgaaggtgaaacaggaaattggttttccccatttattgaagcattacataaagatgaaggaaatgaagcagttgaagctgtattgcttgaaagtatccatcggttcaacccaaatgcattcatttgccaagcgttggcaagacatttctacattaaaaagaaggactttggcaatgctctaaactgggcaaaacaagcaaaaatcatagaacctgacaattcttatatctcagatacactgggtcaagtctacaaaagtaaaataagatggtggatagaggaaaacggaggaaacgggaacatttcagttgatgatctaattgctcttttggatttagcagaacatgcctcaagtgcattcaaagaatctcaacagcaaagtgaagatagagagtatgaagtgaaggaaagattgtatccgaagtcaaaaaggcggtatgatacttacaatatagctggttatcaaggagagatagaagttgggctttacacaatccaaattctccagctcattcctttttttgataataaaaatgagctatctaaaagatatatggtcaattttgtatcaggaagtagtgatattccaggggatccaaacaatgaatataaattagccctcaaaaactatattccttatttaactaaattgaaattttctttgaaaaagtcctttgatttttttgatgaatactttgtcctgctaaaacccaggaacaatattaagcaaaatgaagaggccaaaactcggagaaaggtggctggatattttaagaaatatgtagatatattttgtctcttagaagaatcacaaaacaacacaggtcttggatcaaagttcagtgagccacttcaagtagagagatgcaggagaaacctagtagctttaaaagcagacaagttttctgggctcttggaatatcttatcaaaagtcaagaggatgctataagcactatgaaatgtatagtgaacgaatatacttttctcttagaacaatgcactgtcaaaatccagtcaaaagaaaagctaaatttcatcttggccaacattattctctcctgtatccaacctacctccagattagtaaagccagttgaaaaactaaaagatcagcttcgagaagtcttgcaaccaataggactgacttatcagttttcagaaccgtattttctagcttccctcttattctggccagaaaatcaacaactagatcaacattctgaacaaatgaaagagtatgctcaagcactaaaaaattctttcaaggggcaatataaacatatgcatcgtacaaagcaaccaattgcatatttctttcttggaaaaggtaaaagactggaaagacttgttcacaaaggaaaaattgaccagtgctttaagaagacaccagatattaattccttgtggcagagtggagatgtgtggaaggaggaaaaagtccaagaacttttgcttcgtttacaaggtcgagctgaaaacaattgtttatatatagaatatggaatcaatgaaaaaatcacaatacccatcactcccgcttttttaggtcaacttagaagtggcagaagcatagagaaggtgtctttttacctgggattttccattggaggcccacttgcttatgacattgaaattgtttaagagcctgatattcttcctccaagaatttgatctcagtacccatttaatttttttggactcaagatctatgctttaaaccggcaaggttatagatacagcctctagctcttcagatctgtacatgcagtatttaatttcctcttaaacatgttatgagttctacaaagacaatagtgaaaaaggaaggagtgagatatatgaaaagtagcaaatatgttccttggtttggttaacatcattgatgacaaaataataaggagctatgactggagtcaggagaagttagtgtaataagctggctacacagaaccccactacttaccaggcatggattgaagaagattgtctactcaaatggcatttagacattagaatgtctgggaaaatatttctcaaagacagcaaaaacctctcaaactgaggagcaacatttattcttactaagcagatcatcaatgtatcatgtgcttggcactcaaggatcttccaaaacagaggaccaaccagtcttctgaaggtcatgcccacagaagtcatcagaccttaccaaagtaggttggagaattagattgccttttcatgcagtgagattcagttaagcaaaaatgaaatttgtctctatagctaattagcttatcaactcccctccaaacaaacaattaaaaaaaaaacatacagacactcaaattccacaagctaatgaacaaaagggactcttgtgagaagactaatgagtccctcatccagaagatgccaatgtactggcagattaacatacaacctatgttttgaacaaaaacaaccagcgatacgtaatcaaaatgtaattttcccctaataaaattatggatatgggcagtcatcaatggctgccaaaaccattaagtggaaagctgattaaaaaacaaaaatttctaatggatttatcaaactgtcccaaatcctgataaatattaacatcacagaggaagaccagacattatgggcctggaagtactataggagtgcacacatcacccgtgacatggtcttgccaaataattaaacctgaatttgatcaggtctctggatcttatttgcaattcaaaagaaattttaaaaaaatcctactaacaccaccacaaatatgcaatcagcaatatccagaaaggggaaattcacaggacaaaaacctggttttcttttttggtttcttcaaccaaaaaagaaagaaattgcaaaggaccaaaaaaatgttggggaatctatacattataagggacttaacaactaaagggcaacatatagactttagatcctaatttgagcaaaatctaaaatcaattattaggcaatcagaaaaatttgaacacagactagatatttgaggatattaaggtactatattattgaagattccatggttatgttttttaaagagttcatgccttttagagatacatactaaagtatttgtaaataaatgacatgatctagaatcagtaattttgtgtttggggtgtgggggtggtgaaagggaagtagaaccgaaacaagattagtcctgagttaacaatggctgcaagctggatacatggaattcagcacacttttctccctcttactgattatgcttttgaaattttctcttgtaaaacatttagaaaacaaaaacaaaaaaaatgtgatttgtttctgtcttcaaaatctcattagaattttttcactggaggaagattttcccttgcttctgcataaaattttaactccataacttataagctcactctttattgttactttctaattgacaaataaaaattgtatattatt

SEQ ID NO: 186874 - DNA, 3957 bp, Homo sapiens
  Payload ID: 16794
  Gene Symbol: SAMD9
  Gene Name: sterile alpha motif domain containing 9
  ENST ID: ENST00000446617
  CDS Start-End: 109-3957
agcatcgtaggaggaagaaaacaaacacatcagatattttcagcactaaaagagatggttttccccacatatatgtaaaagaaatttgcaagactactgggtatcagaatggcaaagcaacttaaccttccagaaaatacagatgattggacaaaagaggatgtaaatcagtggttagaaagtcataagattgaccaaaaacacagggaaattttgactgaacaagacgtgaatggagcagtcttgaagtggttaaaaaaagaacatcttgttgatatgggcatcacacatggaccagctattcaaatagaagaactattcaaagaattgcggaaaacagccattgaagattcgattcagacatctaagatgggaaagcccagtaaaaatgctcctaaagaccaaactgtgtctcaaaaggaacgtagagaaacttcaaagcaaaaacaaaagggtaaagagaacccagatatggctaatccgtctgcaatgagtacaactgctaaaggttctaagtcactaaaagttgagctcatagaagataaaatagattatacaaaggaaaggcaaccatccatagacctgacatgtgtatcatatccatttgatgaattcagtaatccatatcgttacaagttggattttagtctacagcctgaaacaggaccaggcaatctcattgatccgatacatgaattcaaagccttcacaaatacagcaacagccacagaagaggatgtcaagatgaaatttagcaatgaggttttccgatttgcttcagcttgtatgaattcacgtaccaatggcactattcattttggagtcaaagacaaaccccatgggaaaattgttggcatcaaagtcaccaatgataccaaggaagccctcattaaccatttcaatctgatgataaacaagtattttgaagaccatcaagtccaacaagcaaagaagtgcattcgagagccaagatttgtggaagttttactgccaaatagtactctatctgacagatttgttattgaagtggacattattccacagttctctgaatgccaatatgattatttccagattaaaatgcaaaattacaacaacaaaatatgggaacaaagtaaaaaattctcactatttgtgcgagatgggaccagctctaaggacattacgaaaaataaagttgatttcagagcatttaaagcagattttaaaacactggcagagtccagaaaagcagcagaagaaaaattcagagcaaaaacaaataaaaaagaaagagagggaccaaagttggttaaattattgacaggaaatcaagatttgttagataattcatactatgaacagtacattcttgtaacaaataaatgccacccagatcaaacaaaacacttagatttcctgaaggaaattaaatggtttgctgtattggagtttgatcctgagtctaacatcaatggagtggtcaaagcttacaaagaaagccgagtagcaaaccttcactttccaagtgtatatgtagaacagaaaaccacaccaaatgagacgatttctactctaaatctttaccatcaacccagctggattttctgcaatggcaggttagaccttgacagtgaaaaatataaaccctttgatccaagttcctggcaaagagaaagagcttctgatgtcaggaaactgatttcatttcttacacatgaagacataatgccaagagggaagtttttggtggtatttctattactgtcctctgtggatgacccaagagatcccctcattgagactttctgtgctttctaccaggatctcaaaggaatggaaaatatactgtgtatttgtgtgcacccacacatatttcagggatggaaagatctacttgaagcaagattaataaaacaccaagatgaaatttcaagccaatgtatttctgctttaagccttgaagagatcaatggcactattcttaaactaaaatctgtgactcaatcttcaaaaaggcttttgccatctattggtttatcgactgtccttctgaaaaaggaagaagatatcatgactgctctggaaattatctgtgaaaatgaatgtgagggtacactgttagagaaggacaaaaataaattccttgaattcaaggcatcaaaagaggaagacttctatcgaggtggcaaagtgtcatggtggaacttctacttctcttctgaaagttattcttcaccttttgtcaaaagggataaatatgaaagacttgaagcaatgattcaaaactgtgcagattcttctaaaccaacaagtaccaaaattattcatctgtatcatcatccaggctgtgggggaactaccttggctatgcacattctctgggaactaaggaagaaattcagatgtgctgtgctgaaaaacaagacagtggatttttctgaaattggagaacaggtaaccagtttaatcacctatggggcaatgaaccgtcaggaatacgtacctgtactactccttgttgatgattttgaagaacaagataatgtctatcttctgcagtactctattcaaacagctatagctaaaaagtacattcgatatgaaaaacctctggtgattatcctaaattgtatgagatcacaaaatcctgaaaaaagtgcaaggatcccagacagtattgccgtaatacagcaactctctcccaaagaacagagagcttttgagcttaaattgaaagaaatcaaagaacagcataaaaactttgaggatttttattcctttatgatcatgaaaaccaattttaataaagaatacatagaaaatgtggtccggaatatcctgaaagggcagaatattttcaccaaggaagcaaagctcttttcttttctggctcttcttaattcatatgtgcctgataccaccatttcactatcacagtgtgaaaaattcttaggaattggaaacaagaaggctttctgggggacagaaaaatttgaagacaagatgggcacctactctacaattctgataaaaacagaggtcatcgaatgtgggaactactgtggagtacgcatcattcactctttgattgcagagttctcactggaagaattgaagaaaagctatcacctgaataaaagtcaaattatgttggatatgctaactgagaatttgttcttcgatactggtatgggaaaaagtaaatttttgcaagatatgcacacactcctactcacaagacaccgcgatgaacatgaaggtgaaacaggaaattggttttccccatttattgaagcattacataaagatgaaggaaatgaagcagttgaagctgtattgcttgaaagtatccatcggttcaacccaaatgcattcatttgccaagcgttggcaagacatttctacattaaaaagaaggactttggcaatgctctaaactgggcaaaacaagcaaaaatcatagaacctgacaattcttatatctcagatacactgggtcaagtctacaaaagtaaaataagatggtggatagaggaaaacggaggaaacgggaacatttcagttgatgatctaattgctcttttggatttagcagaacatgcctcaagtgcattcaaagaatctcaacagcaaagtgaagatagagagtatgaagtgaaggaaagattgtatccgaagtcaaaaaggcggtatgatacttacaatatagctggttatcaaggagagatagaagttgggctttacacaatccaaattctccagctcattcctttttttgataataaaaatgagctatctaaaagatatatggtcaattttgtatcaggaagtagtgatattccaggggatccaaacaatgaatataaattagccctcaaaaactatattccttatttaactaaattgaaattttctttgaaaaagtcctttgatttttttgatgaatactttgtcctgctaaaacccaggaacaat

SEQ ID NO: 186875 - DNA, 6754 bp, Homo sapiens
  Payload ID: 16794
  Gene Symbol: SAMD9
  Gene Name: sterile alpha motif domain containing 9
  Uniprot ID: Q5K651
  ENST ID: ENST00000620985
  CDS Start-End: 170-4939
gacagaagcagagaatacatagacttccgttaaaaccagaatgaggaaaatacttttctctagcatcgtaggaggaagaaaacaaacacatcagatattttcagcactaaaagagatggttttccccacatatatgtaaaagaaatttgcaagactactgggtatcagaatggcaaagcaacttaaccttccagaaaatacagatgattggacaaaagaggatgtaaatcagtggttagaaagtcataagattgaccaaaaacacagggaaattttgactgaacaagacgtgaatggagcagtcttgaagtggttaaaaaaagaacatcttgttgatatgggcatcacacatggaccagctattcaaatagaagaactattcaaagaattgcggaaaacagccattgaagattcgattcagacatctaagatgggaaagcccagtaaaaatgctcctaaagaccaaactgtgtctcaaaaggaacgtagagaaacttcaaagcaaaaacaaaagggtaaagagaacccagatatggctaatccgtctgcaatgagtacaactgctaaaggttctaagtcactaaaagttgagctcatagaagataaaatagattatacaaaggaaaggcaaccatccatagacctgacatgtgtatcatatccatttgatgaattcagtaatccatatcgttacaagttggattttagtctacagcctgaaacaggaccaggcaatctcattgatccgatacatgaattcaaagccttcacaaatacagcaacagccacagaagaggatgtcaagatgaaatttagcaatgaggttttccgatttgcttcagcttgtatgaattcacgtaccaatggcactattcattttggagtcaaagacaaaccccatgggaaaattgttggcatcaaagtcaccaatgataccaaggaagccctcattaaccatttcaatctgatgataaacaagtattttgaagaccatcaagtccaacaagcaaagaagtgcattcgagagccaagatttgtggaagttttactgccaaatagtactctatctgacagatttgttattgaagtggacattattccacagttctctgaatgccaatatgattatttccagattaaaatgcaaaattacaacaacaaaatatgggaacaaagtaaaaaattctcactatttgtgcgagatgggaccagctctaaggacattacgaaaaataaagttgatttcagagcatttaaagcagattttaaaacactggcagagtccagaaaagcagcagaagaaaaattcagagcaaaaacaaataaaaaagaaagagagggaccaaagttggttaaattattgacaggaaatcaagatttgttagataattcatactatgaacagtacattcttgtaacaaataaatgccacccagatcaaacaaaacacttagatttcctgaaggaaattaaatggtttgctgtattggagtttgatcctgagtctaacatcaatggagtggtcaaagcttacaaagaaagccgagtagcaaaccttcactttccaagtgtatatgtagaacagaaaaccacaccaaatgagacgatttctactctaaatctttaccatcaacccagctggattttctgcaatggcaggttagaccttgacagtgaaaaatataaaccctttgatccaagttcctggcaaagagaaagagcttctgatgtcaggaaactgatttcatttcttacacatgaagacataatgccaagagggaagtttttggtggtatttctattactgtcctctgtggatgacccaagagatcccctcattgagactttctgtgctttctaccaggatctcaaaggaatggaaaatatactgtgtatttgtgtgcacccacacatatttcagggatggaaagatctacttgaagcaagattaataaaacaccaagatgaaatttcaagccaatgtatttctgctttaagccttgaagagatcaatggcactattcttaaactaaaatctgtgactcaatcttcaaaaaggcttttgccatctattggtttatcgactgtccttctgaaaaaggaagaagatatcatgactgctctggaaattatctgtgaaaatgaatgtgagggtacactgttagagaaggacaaaaataaattccttgaattcaaggcatcaaaagaggaagacttctatcgaggtggcaaagtgtcatggtggaacttctacttctcttctgaaagttattcttcaccttttgtcaaaagggataaatatgaaagacttgaagcaatgattcaaaactgtgcagattcttctaaaccaacaagtaccaaaattattcatctgtatcatcatccaggctgtgggggaactaccttggctatgcacattctctgggaactaaggaagaaattcagatgtgctgtgctgaaaaacaagacagtggatttttctgaaattggagaacaggtaaccagtttaatcacctatggggcaatgaaccgtcaggaatacgtacctgtactactccttgttgatgattttgaagaacaagataatgtctatcttctgcagtactctattcaaacagctatagctaaaaagtacattcgatatgaaaaacctctggtgattatcctaaattgtatgagatcacaaaatcctgaaaaaagtgcaaggatcccagacagtattgccgtaatacagcaactctctcccaaagaacagagagcttttgagcttaaattgaaagaaatcaaagaacagcataaaaactttgaggatttttattcctttatgatcatgaaaaccaattttaataaagaatacatagaaaatgtggtccggaatatcctgaaagggcagaatattttcaccaaggaagcaaagctcttttcttttctggctcttcttaattcatatgtgcctgataccaccatttcactatcacagtgtgaaaaattcttaggaattggaaacaagaaggctttctgggggacagaaaaatttgaagacaagatgggcacctactctacaattctgataaaaacagaggtcatcgaatgtgggaactactgtggagtacgcatcattcactctttgattgcagagttctcactggaagaattgaagaaaagctatcacctgaataaaagtcaaattatgttggatatgctaactgagaatttgttcttcgatactggtatgggaaaaagtaaatttttgcaagatatgcacacactcctactcacaagacaccgcgatgaacatgaaggtgaaacaggaaattggttttccccatttattgaagcattacataaagatgaaggaaatgaagcagttgaagctgtattgcttgaaagtatccatcggttcaacccaaatgcattcatttgccaagcgttggcaagacatttctacattaaaaagaaggactttggcaatgctctaaactgggcaaaacaagcaaaaatcatagaacctgacaattcttatatctcagatacactgggtcaagtctacaaaagtaaaataagatggtggatagaggaaaacggaggaaacgggaacatttcagttgatgatctaattgctcttttggatttagcagaacatgcctcaagtgcattcaaagaatctcaacagcaaagtgaagatagagagtatgaagtgaaggaaagattgtatccgaagtcaaaaaggcggtatgatacttacaatatagctggttatcaaggagagatagaagttgggctttacacaatccaaattctccagctcattcctttttttgataataaaaatgagctatctaaaagatatatggtcaattttgtatcaggaagtagtgatattccaggggatccaaacaatgaatataaattagccctcaaaaactatattccttatttaactaaattgaaattttctttgaaaaagtcctttgatttttttgatgaatactttgtcctgctaaaacccaggaacaatattaagcaaaatgaagaggccaaaactcggagaaaggtggctggatattttaagaaatatgtagatatattttgtctcttagaagaatcacaaaacaacacaggtcttggatcaaagttcagtgagccacttcaagtagagagatgcaggagaaacctagtagctttaaaagcagacaagttttctgggctcttggaatatcttatcaaaagtcaagaggatgctataagcactatgaaatgtatagtgaacgaatatacttttctcttagaacaatgcactgtcaaaatccagtcaaaagaaaagctaaatttcatcttggccaacattattctctcctgtatccaacctacctccagattagtaaagccagttgaaaaactaaaagatcagcttcgagaagtcttgcaaccaataggactgacttatcagttttcagaaccgtattttctagcttccctcttattctggccagaaaatcaacaactagatcaacattctgaacaaatgaaagagtatgctcaagcactaaaaaattctttcaaggggcaatataaacatatgcatcgtacaaagcaaccaattgcatatttctttcttggaaaaggtaaaagactggaaagacttgttcacaaaggaaaaattgaccagtgctttaagaagacaccagatattaattccttgtggcagagtggagatgtgtggaaggaggaaaaagtccaagaacttttgcttcgtttacaaggtcgagctgaaaacaattgtttatatatagaatatggaatcaatgaaaaaatcacaatacccatcactcccgcttttttaggtcaacttagaagtggcagaagcatagagaaggtgtctttttacctgggattttccattggaggcccacttgcttatgacattgaaattgtttaagagcctgatattcttcctccaagaatttgatctcagtacccatttaatttttttggactcaagatctatgctttaaaccggcaaggttatagatacagcctctagctcttcagatctgtacatgcagtatttaatttcctcttaaacatgttatgagttctacaaagacaatagtgaaaaaggaaggagtgagatatatgaaaagtagcaaatatgttccttggtttggttaacatcattgatgacaaaataataaggagctatgactggagtcaggagaagttagtgtaataagctggctacacagaaccccactacttaccaggcatggattgaagaagattgtctactcaaatggcatttagacattagaatgtctgggaaaatatttctcaaagacagcaaaaacctctcaaactgaggagcaacatttattcttactaagcagatcatcaatgtatcatgtgcttggcactcaaggatcttccaaaacagaggaccaaccagtcttctgaaggtcatgcccacagaagtcatcagaccttaccaaagtaggttggagaattagattgccttttcatgcagtgagattcagttaagcaaaaatgaaatttgtctctatagctaattagcttatcaactcccctccaaacaaacaattaaaaaaaaaacatacagacactcaaattccacaagctaatgaacaaaagggactcttgtgagaagactaatgagtccctcatccagaagatgccaatgtactggcagattaacatacaacctatgttttgaacaaaaacaaccagcgatacgtaatcaaaatgtaattttcccctaataaaattatggatatgggcagtcatcaatggctgccaaaaccattaagtggaaagctgattaaaaaacaaaaatttctaatggatttatcaaactgtcccaaatcctgataaatattaacatcacagaggaagaccagacattatgggcctggaagtactataggagtgcacacatcacccgtgacatggtcttgccaaataattaaacctgaatttgatcaggtctctggatcttatttgcaattcaaaagaaattttaaaaaaatcctactaacaccaccacaaatatgcaatcagcaatatccagaaaggggaaattcacaggacaaaaacctggttttcttttttggtttcttcaaccaaaaaagaaagaaattgcaaaggaccaaaaaaatgttggggaatctatacattataagggacttaacaactaaagggcaacatatagactttagatcctaatttgagcaaaatctaaaatcaattattaggcaatcagaaaaatttgaacacagactagatatttgaggatattaaggtactatattattgaagattccatggttatgttttttaaagagttcatgccttttagagatacatactaaagtatttgtaaataaatgacatgatctagaatcagtaattttgtgtttggggtgtgggggtggtgaaagggaagtagaaccgaaacaagattagtcctgagttaacaatggctgcaagctggatacatggaattcagcacacttttctccctcttactgattatgcttttgaaattttctcttgtaaaacatttagaaaacaaaaacaaaaaaaatgtgatttgtttctgtcttcaaaatctcattagaattttttcactggaggaagattttcccttgcttctgcataaaattttaactccataacttataagctcactctttattgttactttctaattgacaaataaaaattgtatattatttat

SEQ ID NO: 186876 - DNA, 7134 bp, Homo sapiens
  Payload ID: 16795
  Gene Symbol: SAMD9L
  Gene Name: sterile alpha motif domain containing 9-like
  Uniprot ID: Q8IVG5
  ENST ID: ENST00000318238
  CDS Start-End: 1218-5972
gaaagtcagagtactgggagaacagaagacttcacaatttaatgcctcagtttttaaaaaaggatccttacacttcatgtctcctagccatcagaagaggaatgagacagcaaaagttcaaatggcctgtttcaagtttctgatataaaacgatgacattttcaggaaaatcctgcatttccagagagagactggctggttaaatttctgaaagaggacaccagctaaaagaaggtattgcatctcacccgagcagactgtgtctgtggaaagtgtaagccccttgccagaagagcagcttcccagcaaaggcagagggtgaaaacagcaaaggtcttaagacactggggacctagagtcaaaagggacctcctccagggaaaacgctgtgtgagaaatggcctcattcggtgactgtgagtgacacagcagaaagttgggtcattccggctgcttttttgagaagtccctgaagagatcaataacagcaagagggaacctggcaaggaagctattcctataatccaggaaagagatgaggaaggcttggaccaggtggtagtggtgtcaggtagtcaaatgctgggtatattttgaagatacaccccataggatttgctccacattgaatgtggaatgctggaagagagataaagtgtacctgtcacatactttttgagttttatttattttcttagaagtaagtacacaaagagatgctacctaggagaagggtattcttttcactattctttcaaattttctgtatgttcaaacattttcatagtagaaagttggggggaaaatctgtttcataaacatttcctcagcagcagtccagtctattgcattttaattggttgtgatatcattgttttatgcaatacgttctcaacaagtatatcctccggcaaactgaacaaggaccaagtctgttctgcctacagctctgcttcctcatagctgctttccagaacgtgactcttgcaaattatcaagaaaggggaactaatctaagggatccagatcaaacagcctcatgaagacttattttatgtttctaatataaagatagaagttttcagaaaagccctgctacacagaggatcagagcaggggtgggcctgctgggctgcagctgggattctgagcatcctttcccggaggcacggaaagtgagtgagtgagcccagtgaggaagaagttgaagctttgatatgagtaaacaagtatctctacctgaaatgattaaagactggaccaaagagcatgtgaaaaaatgggtaaatgaagaccttaagattaatgagcaatacgggcaaattctgctcagtgaagaagtaacaggattagtcctgcaggaattaactgagaaggaccttgtagaaatggggctaccatggggtccagcacttttgataaaacgttcatacaacaaattgaatagtaagtcccctgaaagtgacaatcatgatccgggacaattagataattcaaaaccgtccaaaacagaacaccagaaaaatccaaaacacaccaaaaaggaagaagaaaattcaatgtcatctaatattgattatgatcccagagagatcagagatatcaaacaagaagaatcaattcttatgaaagaaaatgtgttagatgaagtagcaaatgctaaacacaagaaaaagggtaagctaaaacctgaacaattgacttgtatgccatatccttttgatcagttccatgacagccatcgctacatagaacattatactctacaacctgaaacaggagcactcaatctcattgatccaatacatgagttcaaagctctcacaaacacagaaacagccacggaagtggacattaagatgaaattcagcaatgaagtcttccgatttgcatcagcttgtatgaattcacgcaccaatggcaccatccattttggagtcaaggacaaaccccatggagaaattgttggtgtgaaaatcaccagtaaggctgccttcattgaccacttcaatgtaatgatcaaaaagtattttgaagaaagtgagatcaatgaagccaagaagtgtattcgggagccaaggtttgtggaagtccttctgcagaacaatacaccatctgacagatttgtcattgaagttgatactattccaaaacactctatatgtaatgataagtatttctacattcagatgcaaatttgtaaagataaaatatggaaacaaaaccaaaatctttcactgtttgtaagagaaggggctagctctagggatatcctggccaattccaagcaacgggatgtagatttcaaggcatttttacaaaatttaaagtcactggtagcatctagaaaagaggctgaagaagagtatggaatgaaggcaatgaagaaggagagtgaaggactaaagctggttaaacttctcataggaaaccgagactcactggataattcatactatgactggtacattcttgtaacaaataaatgccatccaaaccaaataaagcacttagattttttaaaagaaattaaatggtttgctgtgttggagtttgatcctgaatctatgatcaatggagtggtcaaagcttacaaagaaagtcgggtggcaaaccttcactttccaaatcaatatgaagacaagacaactaacatgtgggagaagatttctactcttaatctttaccaacagcccagctggattttctgcaacggcagatcagacctgaaaagcgagacatataaacctctagaaccacatttatggcagagagaaagagcttcagaagtcaggaaactaattttatttctcacagatgaaaatataatgacaagaggaaaatttttggtagtgtttctattactctcttcagtggaaagcccaggagatccactcattgaaactttctgggctttctatcaagctctcaaaggaatggaaaatatgttgtgtatctctgtaaactcacatatttatcaacgatggaaagatctactacaaacaagaatgaagatggaagatgaactaacaaaccacagtatttccactttaaatatagaactggtaaacagcactatccttaaactaaaatcggtgactcggtcatcaagaaggtttttgcccgcccgtggatcttcttcagttatcctagagaaaaagaaagaggatgtcttgactgcactggaaatcctctgtgaaaatgagtgtacagagacagacatcgagaaagacaaatctaaattcctggagtttaagaaatcaaaagaagaacacttttatcgaggtggcaaagtatcctggtggaacttctatttttcttctgaaaactattcttcagattttgttaaaagggacagttatgaaaagcttaaagatttaatacactgctgggcagagtctcctaaaccaatatttgcaaaaatcatcaatctttatcatcatccaggctgtggaggtaccacactggctatgcatgttctctgggacttaaagaaaaacttcagatgtgctgtgttaaaaaacaagacaactgattttgcagaaattgcagagcaagtgatcaatctggtcacctatagggcaaagagccatcaggattacattcctgtgcttctccttgtggatgattttgaagaacaagaaaatgtctactttctacaaaatgccatccattccgttttagcagaaaaggatttgcgatatgaaaaaacattggtaattatcttaaactgcatgagatcccggaatccagatgaaagtgcaaaattggcagacagtattgcactaaattaccaactttcttccaaggaacaaagagcttttggtgccaaactgaaggaaattgaaaagcagcacaagaactgtgaaaacttttattccttcatgatcatgaaaagcaattttgatgaaacatatatagaaaatgtagtcaggaatatcctaaaaggacaggatgttgacagcaaggaagcacaactcatttccttcctggctttactcagctcttatgttactgactctacaatttcagtttcacagtgtgaaatatttttgggaatcatatacactagtacaccctgggaacctgaaagcttagaagacaagatgggaacttattctacacttctaataaaaacagaagttgcagaatatgggagatacacaggtgtgcgtatcattcaccctctgattgccctgtactgtctaaaagaactggaaagaagctatcacttggataaatgtcaaattgcattgaatatattagaagagaatttattctatgattctggaataggaagagacaaatttcaacatgatgttcaaactcttctgcttacaagacagcgcaaggtgtatggagatgaaacagacactctgttttccccattaatggaagctttacagaataaagacattgaaaaggtcttgagtgcaggaagtagacgattcccacaaaatgcattcatttgtcaagccttagcaagacatttctacattaaagagaaggactttaacacagctctggactgggcacgtcaggccaaaatgaaagcacctaaaaattcctatatttcagatacactaggtcaagtctacaaaagtgaaatcaaatggtggttggatgggaacaaaaactgtaggagcattactgttaatgacctaacacatctcctagaagctgcggaaaaagcctcaagagctttcaaagaatcccaaaggcaaactgatagtaaaaactatgaaaccgagaactggtcaccacagaagtcccagagacgatatgacatgtataacacagcttgtttcttgggtgaaatagaagttggtctttacactatccagattcttcagctcactccctttttccacaaagaaaatgaattatccaaaaaacatatggtgcaatttttatcaggaaagtggaccattcctcctgatcccagaaatgaatgttatttggctcttagcaagttcacatcccacctaaaaaatttacaatcagatctgaaaaggtgctttgacttttttattgattatatggttcttctgaaaatgaggtatacccaaaaagaaattgcagaaatcatgttaagcaagaaagtcagtcgttgtttcaggaaatacacagaacttttctgtcatttggatccatgtctattacaaagtaaagagagtcaattactccaggaggagaattgcaggaaaaagctagaagctctgagagcagataggtttgctggactcttggaatatcttaatccaaactacaaagatgctaccaccatggaaagtatagtgaatgaatatgccttcctactgcagcaaaactcaaaaaagcccatgacaaatgagaaacaaaattccattttggccaacattattctgagttgtctaaagcccaactccaagttaattcaaccacttaccacgctaaaaaaacaactccgagaggtcttgcaatttgtaggactaagtcatcaatatccaggtccttatttcttggcctgcctcctgttctggccagaaaatcaagagctagatcaagattccaaactaatagaaaagtatgtttcatccttaaatagatccttcaggggacagtacaagcgcatgtgcaggtccaagcaggcaagcacacttttctatctgggcaaaaggaagggtctaaacagtattgttcacaaggccaaaatagagcagtactttgataaagcacaaaatacaaattccctctggcacagtggggatgtgtggaaaaaaaatgaagtcaaagacctcctgcgtcgtctaactggtcaggctgaaggcaagctaatctctgtagaatatggaacagaggaaaaaataaaaataccagtaatatctgtttattcaggtccactcagaagtggtaggaacatagaaagagtgtctttctacctaggattttccattgaaggccctctggcatatgatatagaagtaatttaagacaatacatcacctgtagttcaaatacgtttatttatatctttatgattttattctctctctctattctcatggcactttcataacattatggctaacctctaattacagattttgcttttgcctccctgaatgaattacaagcctttttaagatatgaaatatgcctacccgcagagcttggcacaaagtggagtcaatcttttaatgttttaaatatgcattttcagactcaaataattaagaagtttcattgatatccactggtcacatcataactgtctatagggcaataaaatctgtgttaaactcaattgcttttataagttttctaaattatttcttcactgtgacagcaaagatttaaataagatgaatgtaaaagagaaagcttattggactcaaacccacagatccacaccagagttctatttacctcatcttggtatcaataaaaacttatgtggaaggtaaatatattgttccccatccaccacataacactctccccaacacacacacacacacacacacacacacacacacacacacacactccttgtaccccttgcccttctcccagctcattgctccaggagagagaagagttcaaaaaataaagtaatcataaacttgaactctctccattctcttgttcccatttacaggtgaatctcttcctttaagccatttttgtctcctgtgaatacagccttatctccacctgtttcttagatcccatctcccctggcttattttttccattcattaccctctttgttccctttacttctcaacctgtgctatatacatgctgttctctctgttgagattgccttatttccatctaacattctctctcctgctattctgatttgtcattcacaactgatttcaagagtcaccttcaccaggaagtcttccttgaccaccatcattcctgcctgattagagggcttcctcatggtaatatgtgttctcaagttttcagtgtcaaggaatgccatcccagaagctcattctcagatgcacaacagccagaacagtctcaagcagcattctagagcttggaatttaagaactacgcattgcctataaagtgaaacataggctaatatagattaaattgaatattgaataaaaaatatatttatttatccac

SEQ ID NO: 186877 - DNA, 631 bp, Homo sapiens
  Payload ID: 16795
  Gene Symbol: SAMD9L
  Gene Name: sterile alpha motif domain containing 9-like
  ENST ID: ENST00000439952
  CDS Start-End: 423-631
agaagacttcacaatttaatgcctcagtttttaaaaaaggatccttacacttcatgtctcctagccatcagaagaggaatgagacagcaaaagttcaaatggcctgtttcaagtttctgatataaaacgatgacattttcaggaaaatcctgctctgcttcctcatagctgctttccagaacgtgactcttgcaaattatcaagaaaggggaactaatctaagggatccagatcaaacagcctcatgaagacttattttatgtttctaatataaagatagaagttttcagaaaagccctgctacacagaggatcagagcaggggtgggcctgctgggctgcagctgggattctgagcatcctttcccggaggcacggaaagtgagtgagtgagcccagtgaggaagaagttgaagctttgatatgagtaaacaagtatctctacctgaaatgattaaagactggaccaaagagcatgtgaaaaaatgggtaaatgaagaccttaagattaatgagcaatacgggcaaattctgctcagtgaagaagtaacaggattagtcctgcaggaattaactgagaaggaccttgtagaaatggggctaccatggggtccagcacttttgataaaacg

SEQ ID NO: 186878 - DNA, 763 bp, Homo sapiens
  Payload ID: 16795
  Gene Symbol: SAMD9L
  Gene Name: sterile alpha motif domain containing 9-like
  ENST ID: ENST00000446959
  CDS Start-End: 555-763
agaagacttcacaatttaatgcctcagtttttaaaaaaggatccttacacttcatgtctcctagccatcagaagaggaatgagacagcaaaagttcaaatggcctgtttcaagtttctgatataaaacgatgacattttcaggaaaatcctgggtcattccggctgcttttttgagaagtccctgaagagatcaataacagcaagagggaacctggcaaggaagctattcctataatccaggaaagagatgaggaaggcttggaccaggtggtagtggtgtcagctctgcttcctcatagctgctttccagaacgtgactcttgcaaattatcaagaaaggggaactaatctaagggatccagatcaaacagcctcatgaagacttattttatgtttctaatataaagatagaagttttcagaaaagccctgctacacagaggatcagagcaggggtgggcctgctgggctgcagctgggattctgagcatcctttcccggaggcacggaaagtgagtgagtgagcccagtgaggaagaagttgaagctttgatatgagtaaacaagtatctctacctgaaatgattaaagactggaccaaagagcatgtgaaaaaatgggtaaatgaagaccttaagattaatgagcaatacgggcaaattctgctcagtgaagaagtaacaggattagtcctgcaggaattaactgagaaggaccttgtagaaatggggctaccatggggtccagcacttttgataaaacg

SEQ ID NO: 186879 - DNA, 381 bp, Homo sapiens
  Payload ID: 16795
  Gene Symbol: SAMD9L
  Gene Name: sterile alpha motif domain containing 9-like
  ENST ID: ENST00000414791
  CDS Start-End: 173-381
agaagacttcacaatttaatgcctcagtttttaaaaaaggatccttacacttcatgtctcctagccatcagaagaggaatgagacagcaaaagttcaaatggcctgtttcaagtttctgatataaaacgatgacattttcaggaaaatcctggaagaagttgaagctttgatatgagtaaacaagtatctctacctgaaatgattaaagactggaccaaagagcatgtgaaaaaatgggtaaatgaagaccttaagattaatgagcaatacgggcaaattctgctcagtgaagaagtaacaggattagtcctgcaggaattaactgagaaggaccttgtagaaatggggctaccatggggtccagcacttttgataaaacg

SEQ ID NO: 186880 - DNA, 5831 bp, Homo sapiens
  Payload ID: 16795
  Gene Symbol: SAMD9L
  Gene Name: sterile alpha motif domain containing 9-like
  Uniprot ID: Q8IVG5
  ENST ID: ENST00000411955
  CDS Start-End: 623-5377
tgggagaacagaagacttcacaatttaatgcctcagtttttaaaaaaggatccttacacttcatgtctcctagccatcagaagaggaatgagacagcaaaagttcaaatggcctgtttcaagtttctgatataaaacgatgacattttcaggaaaatcctgcatttccagagagagactggctggttaaatttctgaaagaggacaccagctaaaagaagggtcattccggctgcttttttgagaagtccctgaagagatcaataacagcaagagggaacctggcaaggaagctattcctataatccaggaaagagatgaggaaggcttggaccaggtggtagtggtgtcagctctgcttcctcatagctgctttccagaacgtgactcttgcaaattatcaagaaaggggaactaatctaagggatccagatcaaacagcctcatgaagacttattttatgtttctaatataaagatagaagttttcagaaaagccctgctacacagaggatcagagcaggggtgggcctgctgggctgcagctgggattctgagcatcctttcccggaggcacggaaagtgagtgagtgagcccagtgaggaagaagttgaagctttgatatgagtaaacaagtatctctacctgaaatgattaaagactggaccaaagagcatgtgaaaaaatgggtaaatgaagaccttaagattaatgagcaatacgggcaaattctgctcagtgaagaagtaacaggattagtcctgcaggaattaactgagaaggaccttgtagaaatggggctaccatggggtccagcacttttgataaaacgttcatacaacaaattgaatagtaagtcccctgaaagtgacaatcatgatccgggacaattagataattcaaaaccgtccaaaacagaacaccagaaaaatccaaaacacaccaaaaaggaagaagaaaattcaatgtcatctaatattgattatgatcccagagagatcagagatatcaaacaagaagaatcaattcttatgaaagaaaatgtgttagatgaagtagcaaatgctaaacacaagaaaaagggtaagctaaaacctgaacaattgacttgtatgccatatccttttgatcagttccatgacagccatcgctacatagaacattatactctacaacctgaaacaggagcactcaatctcattgatccaatacatgagttcaaagctctcacaaacacagaaacagccacggaagtggacattaagatgaaattcagcaatgaagtcttccgatttgcatcagcttgtatgaattcacgcaccaatggcaccatccattttggagtcaaggacaaaccccatggagaaattgttggtgtgaaaatcaccagtaaggctgccttcattgaccacttcaatgtaatgatcaaaaagtattttgaagaaagtgagatcaatgaagccaagaagtgtattcgggagccaaggtttgtggaagtccttctgcagaacaatacaccatctgacagatttgtcattgaagttgatactattccaaaacactctatatgtaatgataagtatttctacattcagatgcaaatttgtaaagataaaatatggaaacaaaaccaaaatctttcactgtttgtaagagaaggggctagctctagggatatcctggccaattccaagcaacgggatgtagatttcaaggcatttttacaaaatttaaagtcactggtagcatctagaaaagaggctgaagaagagtatggaatgaaggcaatgaagaaggagagtgaaggactaaagctggttaaacttctcataggaaaccgagactcactggataattcatactatgactggtacattcttgtaacaaataaatgccatccaaaccaaataaagcacttagattttttaaaagaaattaaatggtttgctgtgttggagtttgatcctgaatctatgatcaatggagtggtcaaagcttacaaagaaagtcgggtggcaaaccttcactttccaaatcaatatgaagacaagacaactaacatgtgggagaagatttctactcttaatctttaccaacagcccagctggattttctgcaacggcagatcagacctgaaaagcgagacatataaacctctagaaccacatttatggcagagagaaagagcttcagaagtcaggaaactaattttatttctcacagatgaaaatataatgacaagaggaaaatttttggtagtgtttctattactctcttcagtggaaagcccaggagatccactcattgaaactttctgggctttctatcaagctctcaaaggaatggaaaatatgttgtgtatctctgtaaactcacatatttatcaacgatggaaagatctactacaaacaagaatgaagatggaagatgaactaacaaaccacagtatttccactttaaatatagaactggtaaacagcactatccttaaactaaaatcggtgactcggtcatcaagaaggtttttgcccgcccgtggatcttcttcagttatcctagagaaaaagaaagaggatgtcttgactgcactggaaatcctctgtgaaaatgagtgtacagagacagacatcgagaaagacaaatctaaattcctggagtttaagaaatcaaaagaagaacacttttatcgaggtggcaaagtatcctggtggaacttctatttttcttctgaaaactattcttcagattttgttaaaagggacagttatgaaaagcttaaagatttaatacactgctgggcagagtctcctaaaccaatatttgcaaaaatcatcaatctttatcatcatccaggctgtggaggtaccacactggctatgcatgttctctgggacttaaagaaaaacttcagatgtgctgtgttaaaaaacaagacaactgattttgcagaaattgcagagcaagtgatcaatctggtcacctatagggcaaagagccatcaggattacattcctgtgcttctccttgtggatgattttgaagaacaagaaaatgtctactttctacaaaatgccatccattccgttttagcagaaaaggatttgcgatatgaaaaaacattggtaattatcttaaactgcatgagatcccggaatccagatgaaagtgcaaaattggcagacagtattgcactaaattaccaactttcttccaaggaacaaagagcttttggtgccaaactgaaggaaattgaaaagcagcacaagaactgtgaaaacttttattccttcatgatcatgaaaagcaattttgatgaaacatatatagaaaatgtagtcaggaatatcctaaaaggacaggatgttgacagcaaggaagcacaactcatttccttcctggctttactcagctcttatgttactgactctacaatttcagtttcacagtgtgaaatatttttgggaatcatatacactagtacaccctgggaacctgaaagcttagaagacaagatgggaacttattctacacttctaataaaaacagaagttgcagaatatgggagatacacaggtgtgcgtatcattcaccctctgattgccctgtactgtctaaaagaactggaaagaagctatcacttggataaatgtcaaattgcattgaatatattagaagagaatttattctatgattctggaataggaagagacaaatttcaacatgatgttcaaactcttctgcttacaagacagcgcaaggtgtatggagatgaaacagacactctgttttccccattaatggaagctttacagaataaagacattgaaaaggtcttgagtgcaggaagtagacgattcccacaaaatgcattcatttgtcaagccttagcaagacatttctacattaaagagaaggactttaacacagctctggactgggcacgtcaggccaaaatgaaagcacctaaaaattcctatatttcagatacactaggtcaagtctacaaaagtgaaatcaaatggtggttggatgggaacaaaaactgtaggagcattactgttaatgacctaacacatctcctagaagctgcggaaaaagcctcaagagctttcaaagaatcccaaaggcaaactgatagtaaaaactatgaaaccgagaactggtcaccacagaagtcccagagacgatatgacatgtataacacagcttgtttcttgggtgaaatagaagttggtctttacactatccagattcttcagctcactccctttttccacaaagaaaatgaattatccaaaaaacatatggtgcaatttttatcaggaaagtggaccattcctcctgatcccagaaatgaatgttatttggctcttagcaagttcacatcccacctaaaaaatttacaatcagatctgaaaaggtgctttgacttttttattgattatatggttcttctgaaaatgaggtatacccaaaaagaaattgcagaaatcatgttaagcaagaaagtcagtcgttgtttcaggaaatacacagaacttttctgtcatttggatccatgtctattacaaagtaaagagagtcaattactccaggaggagaattgcaggaaaaagctagaagctctgagagcagataggtttgctggactcttggaatatcttaatccaaactacaaagatgctaccaccatggaaagtatagtgaatgaatatgccttcctactgcagcaaaactcaaaaaagcccatgacaaatgagaaacaaaattccattttggccaacattattctgagttgtctaaagcccaactccaagttaattcaaccacttaccacgctaaaaaaacaactccgagaggtcttgcaatttgtaggactaagtcatcaatatccaggtccttatttcttggcctgcctcctgttctggccagaaaatcaagagctagatcaagattccaaactaatagaaaagtatgtttcatccttaaatagatccttcaggggacagtacaagcgcatgtgcaggtccaagcaggcaagcacacttttctatctgggcaaaaggaagggtctaaacagtattgttcacaaggccaaaatagagcagtactttgataaagcacaaaatacaaattccctctggcacagtggggatgtgtggaaaaaaaatgaagtcaaagacctcctgcgtcgtctaactggtcaggctgaaggcaagctaatctctgtagaatatggaacagaggaaaaaataaaaataccagtaatatctgtttattcaggtccactcagaagtggtaggaacatagaaagagtgtctttctacctaggattttccattgaaggccctctggcatatgatatagaagtaatttaagacaatacatcacctgtagttcaaatacgtttatttatatctttatgattttattctctctctctattctcatggcactttcataacattatggctaacctctaattacagattttgcttttgcctccctgaatgaattacaagcctttttaagatatgaaatatgcctacccgcagagcttggcacaaagtggagtcaatcttttaatgttttaaatatgcattttcagactcaaataattaagaagtttcattgatatccactggtcacatcataactgtctatagggcaataaaatctgtgttaaactcaattgcttttataagttttctaaattatttcttcactgtgacagcaaagatttaaataagatgaatgtaaaagagaaagcttattggactcaaacccacagatccacaccagagttctatttacctcatcttggtatcaata

SEQ ID NO: 186881 - DNA, 5757 bp, Homo sapiens
  Payload ID: 16795
  Gene Symbol: SAMD9L
  Gene Name: sterile alpha motif domain containing 9-like
  Uniprot ID: Q8IVG5
  ENST ID: ENST00000437805
  CDS Start-End: 819-5573
agaagacttcacaatttaatgcctcagtttttaaaaaaggatccttacacttcatgtctcctagccatcagaagaggaatgagacagcaaaagttcaaatggcctgtttcaagtttctgatataaaacgatgacattttcaggaaaatcctgcatttccagagagagactggctggttaaatttctgaaagaggacaccagctaaaagaaggtattgcatctcacccgagcagactgtgtctgtggaaagtgtaagccccttgccagaagagcagcttcccagcaaaggcagagggtgaaaacagcaaaggtcttaagacactggggacctagagtcaaaagggacctcctccagggaaaacgctgtgtgagaaatggcctcattcggtgactgtgagtgacacagcagaaagttgggtcattccggctgcttttttgagaagtccctgaagagatcaataacagcaagagggaacctggcaaggaagctattcctataatccaggaaagagatgaggaaggcttggaccaggtggtagtggtgtcagctctgcttcctcatagctgctttccagaacgtgactcttgcaaattatcaagaaaggggaactaatctaagggatccagatcaaacagcctcatgaagacttattttatgtttctaatataaagatagaagttttcagaaaagccctgctacacagaggatcagagcaggggtgggcctgctgggctgcagctgggattctgagcatcctttcccggaggcacggaaagtgagtgagtgagcccagtgaggaagaagttgaagctttgatatgagtaaacaagtatctctacctgaaatgattaaagactggaccaaagagcatgtgaaaaaatgggtaaatgaagaccttaagattaatgagcaatacgggcaaattctgctcagtgaagaagtaacaggattagtcctgcaggaattaactgagaaggaccttgtagaaatggggctaccatggggtccagcacttttgataaaacgttcatacaacaaattgaatagtaagtcccctgaaagtgacaatcatgatccgggacaattagataattcaaaaccgtccaaaacagaacaccagaaaaatccaaaacacaccaaaaaggaagaagaaaattcaatgtcatctaatattgattatgatcccagagagatcagagatatcaaacaagaagaatcaattcttatgaaagaaaatgtgttagatgaagtagcaaatgctaaacacaagaaaaagggtaagctaaaacctgaacaattgacttgtatgccatatccttttgatcagttccatgacagccatcgctacatagaacattatactctacaacctgaaacaggagcactcaatctcattgatccaatacatgagttcaaagctctcacaaacacagaaacagccacggaagtggacattaagatgaaattcagcaatgaagtcttccgatttgcatcagcttgtatgaattcacgcaccaatggcaccatccattttggagtcaaggacaaaccccatggagaaattgttggtgtgaaaatcaccagtaaggctgccttcattgaccacttcaatgtaatgatcaaaaagtattttgaagaaagtgagatcaatgaagccaagaagtgtattcgggagccaaggtttgtggaagtccttctgcagaacaatacaccatctgacagatttgtcattgaagttgatactattccaaaacactctatatgtaatgataagtatttctacattcagatgcaaatttgtaaagataaaatatggaaacaaaaccaaaatctttcactgtttgtaagagaaggggctagctctagggatatcctggccaattccaagcaacgggatgtagatttcaaggcatttttacaaaatttaaagtcactggtagcatctagaaaagaggctgaagaagagtatggaatgaaggcaatgaagaaggagagtgaaggactaaagctggttaaacttctcataggaaaccgagactcactggataattcatactatgactggtacattcttgtaacaaataaatgccatccaaaccaaataaagcacttagattttttaaaagaaattaaatggtttgctgtgttggagtttgatcctgaatctatgatcaatggagtggtcaaagcttacaaagaaagtcgggtggcaaaccttcactttccaaatcaatatgaagacaagacaactaacatgtgggagaagatttctactcttaatctttaccaacagcccagctggattttctgcaacggcagatcagacctgaaaagcgagacatataaacctctagaaccacatttatggcagagagaaagagcttcagaagtcaggaaactaattttatttctcacagatgaaaatataatgacaagaggaaaatttttggtagtgtttctattactctcttcagtggaaagcccaggagatccactcattgaaactttctgggctttctatcaagctctcaaaggaatggaaaatatgttgtgtatctctgtaaactcacatatttatcaacgatggaaagatctactacaaacaagaatgaagatggaagatgaactaacaaaccacagtatttccactttaaatatagaactggtaaacagcactatccttaaactaaaatcggtgactcggtcatcaagaaggtttttgcccgcccgtggatcttcttcagttatcctagagaaaaagaaagaggatgtcttgactgcactggaaatcctctgtgaaaatgagtgtacagagacagacatcgagaaagacaaatctaaattcctggagtttaagaaatcaaaagaagaacacttttatcgaggtggcaaagtatcctggtggaacttctatttttcttctgaaaactattcttcagattttgttaaaagggacagttatgaaaagcttaaagatttaatacactgctgggcagagtctcctaaaccaatatttgcaaaaatcatcaatctttatcatcatccaggctgtggaggtaccacactggctatgcatgttctctgggacttaaagaaaaacttcagatgtgctgtgttaaaaaacaagacaactgattttgcagaaattgcagagcaagtgatcaatctggtcacctatagggcaaagagccatcaggattacattcctgtgcttctccttgtggatgattttgaagaacaagaaaatgtctactttctacaaaatgccatccattccgttttagcagaaaaggatttgcgatatgaaaaaacattggtaattatcttaaactgcatgagatcccggaatccagatgaaagtgcaaaattggcagacagtattgcactaaattaccaactttcttccaaggaacaaagagcttttggtgccaaactgaaggaaattgaaaagcagcacaagaactgtgaaaacttttattccttcatgatcatgaaaagcaattttgatgaaacatatatagaaaatgtagtcaggaatatcctaaaaggacaggatgttgacagcaaggaagcacaactcatttccttcctggctttactcagctcttatgttactgactctacaatttcagtttcacagtgtgaaatatttttgggaatcatatacactagtacaccctgggaacctgaaagcttagaagacaagatgggaacttattctacacttctaataaaaacagaagttgcagaatatgggagatacacaggtgtgcgtatcattcaccctctgattgccctgtactgtctaaaagaactggaaagaagctatcacttggataaatgtcaaattgcattgaatatattagaagagaatttattctatgattctggaataggaagagacaaatttcaacatgatgttcaaactcttctgcttacaagacagcgcaaggtgtatggagatgaaacagacactctgttttccccattaatggaagctttacagaataaagacattgaaaaggtcttgagtgcaggaagtagacgattcccacaaaatgcattcatttgtcaagccttagcaagacatttctacattaaagagaaggactttaacacagctctggactgggcacgtcaggccaaaatgaaagcacctaaaaattcctatatttcagatacactaggtcaagtctacaaaagtgaaatcaaatggtggttggatgggaacaaaaactgtaggagcattactgttaatgacctaacacatctcctagaagctgcggaaaaagcctcaagagctttcaaagaatcccaaaggcaaactgatagtaaaaactatgaaaccgagaactggtcaccacagaagtcccagagacgatatgacatgtataacacagcttgtttcttgggtgaaatagaagttggtctttacactatccagattcttcagctcactccctttttccacaaagaaaatgaattatccaaaaaacatatggtgcaatttttatcaggaaagtggaccattcctcctgatcccagaaatgaatgttatttggctcttagcaagttcacatcccacctaaaaaatttacaatcagatctgaaaaggtgctttgacttttttattgattatatggttcttctgaaaatgaggtatacccaaaaagaaattgcagaaatcatgttaagcaagaaagtcagtcgttgtttcaggaaatacacagaacttttctgtcatttggatccatgtctattacaaagtaaagagagtcaattactccaggaggagaattgcaggaaaaagctagaagctctgagagcagataggtttgctggactcttggaatatcttaatccaaactacaaagatgctaccaccatggaaagtatagtgaatgaatatgccttcctactgcagcaaaactcaaaaaagcccatgacaaatgagaaacaaaattccattttggccaacattattctgagttgtctaaagcccaactccaagttaattcaaccacttaccacgctaaaaaaacaactccgagaggtcttgcaatttgtaggactaagtcatcaatatccaggtccttatttcttggcctgcctcctgttctggccagaaaatcaagagctagatcaagattccaaactaatagaaaagtatgtttcatccttaaatagatccttcaggggacagtacaagcgcatgtgcaggtccaagcaggcaagcacacttttctatctgggcaaaaggaagggtctaaacagtattgttcacaaggccaaaatagagcagtactttgataaagcacaaaatacaaattccctctggcacagtggggatgtgtggaaaaaaaatgaagtcaaagacctcctgcgtcgtctaactggtcaggctgaaggcaagctaatctctgtagaatatggaacagaggaaaaaataaaaataccagtaatatctgtttattcaggtccactcagaagtggtaggaacatagaaagagtgtctttctacctaggattttccattgaaggccctctggcatatgatatagaagtaatttaagacaatacatcacctgtagttcaaatacgtttatttatatctttatgattttattctctctctctattctcatggcactttcataacattatggctaacctctaattacagattttgcttttgcctccctgaatgaattacaagcctttttaagatatgaaatatgcctacccgcagagcttgg

SEQ ID NO: 186882 - DNA, 1198 bp, Homo sapiens
  Payload ID: 16795
  Gene Symbol: SAMD9L
  Gene Name: sterile alpha motif domain containing 9-like
  ENST ID: ENST00000446033
  CDS Start-End: 990-1198
agaagacttcacaatttaatgcctcagtttttaaaaaaggatccttacacttcatgtctcctagccatcagaagaggaatgagacagcaaaagttcaaatggcctgtttcaagtttctgatataaaacgatgacattttcaggaaaatcctgcatttccagagagagactggctggttaaatttctgaaagaggacaccagctaaaagaagggtcattccggctgcttttttgagaagtccctgaagagatcaataacagcaagagggaacctggcaaggaagctattcctataatccaggaaagagatgaggaaggcttggaccaggtggtagtggtgtcaggtagtcaaatgctgggtatattttgaagatacaccccataggatttgctccacattgaatgtggaatgctggaagagagataaagtgtacctgtcacatactttttgagttttatttattttcttagaagtaagtacacaaagagatgctacctaggagaagggtattcttttcactattctttcaaattttctgtatgttcaaacattttcatagtagaaagttggggggaaaatctgtttcataaacatttcctcagcagcagtccagtctattgcattttaattggttgtgatatcattgttttatgcaatacgttctcaacaagtatatcctccggcaaactgaacaaggaccaagtctgttctgcctacagctctgcttcctcatagctgctttccagaacgtgactcttgcaaattatcaagaaaggggaactaatctaagggatccagatcaaacagcctcatgaagacttattttatgtttctaatataaagatagaagttttcagaaaagccctgctacacagaggatcagagcaggggtgggcctgctgggctgcagctgggattctgagcatcctttcccggaggcacggaaagtgagtgagtgagcccagtgaggaagaagttgaagctttgatatgagtaaacaagtatctctacctgaaatgattaaagactggaccaaagagcatgtgaaaaaatgggtaaatgaagaccttaagattaatgagcaatacgggcaaattctgctcagtgaagaagtaacaggattagtcctgcaggaattaactgagaaggaccttgtagaaatggggctaccatggggtccagcacttttgataaaacg

SEQ ID NO: 186883 - DNA, 1221 bp, Homo sapiens
  Payload ID: 16795
  Gene Symbol: SAMD9L
  Gene Name: sterile alpha motif domain containing 9-like
  Uniprot ID: Q8IVG5
  ENST ID: ENST00000610760
  CDS Start-End: 1-1221
atgagtaaacaagtatctctacctgaaatgattaaagactggaccaaagagcatgtgaaaaaatgggtaaatgaagaccttaagattaatgagcaatacgggcaaattctgctcagtgaagaagtaacaggattagtcctgcaggaattaactgagaaggaccttgtagaaatggggctaccatggggtccagcacttttgataaaacgttcatacaacaaattgaatagtaagtcccctgaaagtgacaatcatgatccgggacaattagataattcaaaaccgtccaaaacagaacaccagaaaaatccaaaacacaccaaaaaggaagaagaaaattcaatgtcatctaatattgattatgatcccagagagatcagagatatcaaacaagaagaatcaattcttatgaaagaaaatgtgttagatgaagtagcaaatgctaaacacaagaaaaagctagaagctctgagagcagataggtttgctggactcttggaatatcttaatccaaactacaaagatgctaccaccatggaaagtatagtgaatgaatatgccttcctactgcagcaaaactcaaaaaagcccatgacaaatgagaaacaaaattccattttggccaacattattctgagttgtctaaagcccaactccaagttaattcaaccacttaccacgctaaaaaaacaactccgagaggtcttgcaatttgtaggactaagtcatcaatatccaggtccttatttcttggcctgcctcctgttctggccagaaaatcaagagctagatcaagattccaaactaatagaaaagtatgtttcatccttaaatagatccttcaggggacagtacaagcgcatgtgcaggtccaagcaggcaagcacacttttctatctgggcaaaaggaagggtctaaacagtattgttcacaaggccaaaatagagcagtactttgataaagcacaaaatacaaattccctctggcacagtggggatgtgtggaaaaaaaatgaagtcaaagacctcctgcgtcgtctaactggtcaggctgaaggcaagctaatctctgtagaatatggaacagaggaaaaaataaaaataccagtaatatctgtttattcaggtccactcagaagtggtaggaacatagaaagagtgtctttctacctaggattttccattgaaggccctctggcatatgatatagaagtaatttaa

SEQ ID NO: 186884 - DNA, 4190 bp, Homo sapiens
  Payload ID: 16796
  Gene Symbol: SRD5A3
  Gene Name: steroid 5 alpha-reductase 3
  Uniprot ID: Q9H8P0
  ENST ID: ENST00000264228
  CDS Start-End: 229-1185
atgcccagattagggactgcgagcgaccacccagcgccagcgcgaccaggaccaaggacctccgcggctgagcggcgagtccgggaggggctctgcgcgtccccgccccgcgccgcgtcaccgacgtcccgctaggctgagaccggtgcgccgcgcgctagtggccgctcttccgcgggctagcgggcggtgggggcgccagcagcgcggaaggcgggcacgcgggccatggctccctgggcggaggccgagcactcggcgctgaacccgctgcgcgcggtgtggctcacgctgaccgccgccttcctgctgaccctactgctgcagctcctgccgcccggcctgctcccgggctgcgcgatcttccaggacctgatccgctatgggaaaaccaagtgtggggagccgtcgcgccccgccgcctgccgagcctttgatgtccccaagagatatttttcccacttttatatcatctcagtgctgtggaatggcttcctgctttggtgccttactcaatctctgttcctgggagcaccttttccaagctggcttcatggtttgctcagaattctcggggcggcacagttccagggaggggagctggcactgtctgcattcttagtgctagtatttctgtggctgcacagcttacgaagactcttcgagtgcctctacgtcagtgtcttctccaatgtcatgattcacgtcgtgcagtactgttttggacttgtctattatgtccttgttggcctaactgtgctgagccaagtgccaatggatggcaggaatgcctacataacagggaaaaatctattgatgcaagcacggtggttccatattcttgggatgatgatgttcatctggtcatctgcccatcagtataagtgccatgttattctcggcaatctcaggaaaaataaagcaggagtggtcattcactgtaaccacaggatcccatttggagactggtttgaatatgtttcttcccctaactacttagcagagctgatgatctacgtttccatggccgtcacctttgggttccacaacttaacttggtggctagtggtgacaaatgtcttctttaatcaggccctgtctgcctttctcagccaccaattctacaaaagcaaatttgtctcttacccgaagcataggaaagctttcctaccatttttgttttaagttaacctcagtcatgaagaatgcaaaccaggtgatggtttcaatgcctaaggacagtgaagtctggagcccaaagtacagtttcagcaaagctgtttgaaactctccattccatttctataccccacaagttttcactgaatgagcatggcagtgccactcaagaaaatgaatctccaaagtatcttcaaagaataaatactaatggcagatctgcgatttctgggtccactttctgagatgctttctaaaaccaaccaactgataaaaagtagatgagacttctccaagctgcttcacaagcaaactaaccgaaaaaccgaaaatatacaaacagcttcacacacacacacacacacacacacacacacacacacacacaaaggaagatcatcaatggctgcggtagcctagtaggaatggactatataataatatagcaggtgctcaataactgtttgttgcatttcagtaaaagcagaataacctttcaaaataataacaggctgggtgcaatggctcacacctgttaatcccagcacttcgggaggccaaggtgggcagttcgcttgggcccaagagttcgagaccagcctgggcaacatggtgaaaccctatctccgtgaaaaaatatgaaaattagccaagagtggtggcacatgcctgtagtcccagatacttgggagtgggctgagatgggagaatcgcttgagcccaggaggtcaagggtacagtgagccgaggtcatgccactgcactccagcctggcctgggcaacagagcaagaccctgtctcaaaataataataatatataattttacaccaaaagtttcaggaaaaaacgagtttgttggagttagtttatactttcacatatcaccacaaagatctccagttaaataactatcaatatccatttccattcatctccccctcaaatcatagcctaacagaacactttgaaagctcttttatttaatatttttttacatcctttgaagggagtgcttcaaaaatgaaagcatcagaagataaaatatttttatatttatgcatagcaagccttcgtgaacggaagtgacacactctggattgaataatactgtagcctcattcatatgtagttattcaaattggattaatgtctgtgtgagtttatttgaactagcagaaagtatctgaagatattcaggaataaagtttatacttaaaatagcttatgttaaagaaaatacctgtgattaattcagagggaaataaatgcatggtataaaagaaaaccaaaaacttaaaaaataatactatagcctgagcaacacattaaaactgcacacttgtgcagcgtaagattctctggcttattggctgaggtgttaagtttattccttttatgaagatgtcctattacagtcagctaagcactaaagctttgcatttatatgtactttgctatgggggaaagaaccttatgattaataagacacatatcaaatgcatagtcaatcattcccacccccatccctggagctgtaacccaaaactgttaaactaagattcctttgttttttttgtttttttgagatggagtctcactctgtcgcccagactggagtgcagtggtgggatcctggctcactgcaacctccgccttctgggttccagcgattctcctctgcctcagcctcccaagtagctgggattacaggcacatgccaccatgcccaggtaattgttgtatttttagtagagatagagtttcaccatgttggccaggctggtctcaaactcctgacctcaggtgatccacctgcttcggcctcccaaagtgctgggattacaggtgtaagtcactgctcccggatgcatgtcaagcacattggaaagttcttacaacaattctgatggaggattttctctcccatcaaccaaacaccacttaagattaacctgtggctcagtctacttaaataaatgccatatttattttacttatcatttagaatttgccattctcaggaacaaaactttttgtacattggaaatggaaaacattgcagtttggtcttaatttccacatgaatatcaagtgtaatttttaataaattatttggagaaaaatgtattttattttagcatgcaattttatgcccaggttagactagagatttggctgatgttctggaatctcattgtactcttaagtaaaataacgagcatcccatgacgcaccctgtcaggggttgtgagaaagctgcagtgtccagtttcccacccctgtttcctgctgtctctctcccactcatccctgtttcttactcatcccttttccttctttgcccaaacatcatatttctaggcaaagataagagaggagatagtgatgtcctgaaaggggttcagaacaacgtagcatggcctttggtgaaagcgtcaccgatgggaaataattgagaattgtgcagtgcttgcagcgtcagaatcagcactgttttttgtgttggtgaaaatattccatgtgcgtaaagggagagcatcagggactttgcaaattcttcacaaggacccagaaatagcttaaagattcatggttttcctgttggcttaaatagccttaatctttcattttctactaccattaagtcggggaaatgacattgaactacctcattagcagccttcccttgattaactactgactaaaagtgtgctgaaaatggcctttgtttttgtgaagctcatcctatacactaacatttgcttaaccatggattattttgtctctacaaagctgtgccctgtattcgatttttacttcaatgagtggttattgctagaattcctacaaaaaaaaaaaaaaccgttgcagatatttttgtatgtagcttaatagatatttagtttaaggagactgcaacatttgcataaggtgcctaaaaactcaagaaccattgataagtgagatcactcaaaatgagctgatatattaaagaagaccttaaaacag

SEQ ID NO: 186885 - DNA, 768 bp, Homo sapiens
  Payload ID: 16796
  Gene Symbol: SRD5A3
  Gene Name: steroid 5 alpha-reductase 3
  ENST ID: ENST00000505210
  CDS Start-End: 1-549
ttcctgctgaccctactgctgcagctcctgccgcccggcctgctcccgggctgcgcgatcttccaggacctgatccgctatgggaaaaccaagtgtggggagccgtcgcgccccgccgcctgccgagcctttgatgtccccaagagatatttttcccacttttatatcatctcagtgctgtggaatggcttcctgctttggtgccttactcaatctctgttcctgggagcaccttttccaagctggcttcatggtttgctcagaattctcggggcggcacagttccagggagtggtcattcactgtaaccacaggatcccatttggagactggtttgaatatgtttcttcccctaactacttagcagagctgatgatctacgtttccatggccgtcacctttgggttccacaacttaacttggtggctagtggtgacaaatgtcttctttaatcaggccctgtctgcctttctcagccaccaattctacaaaagcaaatttgtctcttacccgaagcataggaaagctttcctaccatttttgttttaagttaacctcagtcatgaagaatgcaaaccaggtgatggtttcaatgcctaaggacagtgaagtctggagcccaaagtacagtttcagcaaagctgtttgaaactctccattccatttctataccccacaagttttcactgaatgagcatggcagtgccactcaagaaaatgaatctccaaagtatcttcaaagaataaatactaatggcagatctgcga

SEQ ID NO: 186886 - DNA, 2165 bp, Homo sapiens
  Payload ID: 16797
  Gene Symbol: SRA1
  Gene Name: steroid receptor RNA activator 1
  Uniprot ID: Q9HD15
  ENST ID: ENST00000336283
  CDS Start-End: 823-1533
ttatagcaaaatcagtgcaaataaaaatccctcagtgacctcactggatgtgagtatattgggcctgggacagggctgggggctaacaccctgtgtgagatgagtgtctttgtgtctgtgcttgatgttggtggctctctgtagtcacatgacagcatgggtgtgatggagatctgacttcattcaacaaacatattttctaaggagttccctgtgccaggcactaagctgggcactgggaatgtaataaaatagtcaaggtcccaccttctaagactgtccgacagggaaacgaacaagagtcaaataaggcagaagatgtgatgtaatacacctacgaaatctcagagggttgtagggtcgtgggagctcaagtgagacacttaacctggcctgagacattccagaaggcctcctgaagaactgacatctgaactgagaactgaaggaagatgagtactagtgaggctaccggacgtgaatgtggagattgtgcagggcaatgcaagaggaggctgtagaagtcaacctggctagatcacagcggggtgtatgtggggcaggagcttctttgtttgaatttgctcctgagaggatgaggcctcctagagcactggctcctggacagcaacctcctttggtgccttgtgaccagggccctgatggttcattagatggagccttcgagtcttagggagttgccgcagggtccccacagcggctcccgacggttgtgaaccagcatccatcctccacggattccggcaacccgcctggccctggacgtgtctcaactggcccgcgtgaggggccgccccggaaatgacgcgctgccccgctggccaagcggaagtggagatggcggagctgtacgtgaagccgggcaacaaggaacgcggctggaacgacccgccgcagttctcatacgggctgcagacccaggccggcggacccaggcgctcgctgcttaccaagagggtcgccgcaccccaggatggatcccccagagtccccgcatcagagacttctcctgggcctcccccaatggggcctccacctccttcaagtaaggctcccaggtccccacctgtggggagtggtcctgcctctggcgtggagcccacaagtttcccagtcgagtctgaggctgtgatggaggatgtgctgagacctttggaacaggcattggaagactgccgtggccacacaaggaagcaggtatgtgatgacatcagccgacgcctggcactgctgcaggaacagtgggctggaggaaagttgtcaatacctgtaaagaagagaatggctctactggtgcaagagctttcaagccaccggtgggacgcagcagatgacatccaccgctccctcatggttgaccatgtgactgaggtcagtcagtggatggtaggagttaaaagattaattgcagaaaagaggagtctgttttcagaggaggcagccaatgaagagaaatctgcagccacagctgagaagaaccataccataccaggcttccagcaggcttcataatcctcggttccccagactcaccggacaccatctcctatgccttggagaccttctgtcacttggctcccttcttaccaccaccaagactgtcccactgggcctgacccacctatgagggaagaagtcccacctgggccagagggagttcatgtgttactcataacatgcatttcaataaaaacatctctgcggtgggccttgggtaggagagatgaacccttccggtgccaagctagtcccctctggtgtcctcgactgccctgctccctgtgtatctgcaaacctctgttctcccttctccattcatcaggaagggatctgctgggtaaagtcagactactgcctaccactttttcccaaagtagactgaaagcacatcctgtgctgggcggagcagctgtgtttggatggtttcatttcagcatgagaacagactcaaatagaacggggagacttttccctcaacaaaaggaaagacagtcctatttgcactgtatcacccttgagatactactgttacagagattagaaccacattgagtggggttttctgtgtaaatcgaaggagaaaaagaccagattactgagattggggattgtaactctgacttgccaaacaaactgctgcctca

SEQ ID NO: 186887 - DNA, 461 bp, Homo sapiens
  Payload ID: 16797
  Gene Symbol: SRA1
  Gene Name: steroid receptor RNA activator 1
  ENST ID: ENST00000602657
  CDS Start-End: 1-226
gcaggaacagtgggctggaggaaagttgtcaatacctgtaaagaagagaatggctctactggtgcaagagctttcaagccaccggtgggacgcagcagatgacatccaccgctccctcatggttgaccatgtgactgaggaactaagttttaatggcaaacctacagcttacttaagatatccctccagagagagagcaaggcaattgtacctgacacagcattgacaccaaatgaccagattccactgtgtccaacgggagcgacaaaactggtccccgccggggcttgtgcaacagaccctccttgccgaattcgggccagtctctctgttccaattgggggaggtatctttcgatcttgactggcactgactccttttggttggcccaacgttggtggggcagaagtggctgaaagaggtgaagatgatcccgaagaaacagatggaataggagagtc

SEQ ID NO: 186888 - DNA, 6521 bp, Homo sapiens
  Payload ID: 16798
  Gene Symbol: STS
  Gene Name: steroid sulfatase (microsomal), isozyme S
  Uniprot ID: P08842
  ENST ID: ENST00000217961
  CDS Start-End: 221-1972
acagtgctgttggccaagcctccagcagctgacgggacccagctgtagtgaggttgcagtgattgagtaggattggcctgcttcaaagcagaggtttctcatgggaatatgcttattaaactcccactggtgcagaaaccatgaacagaggatgaacaagtgaagttgcaatctcctccatcacagctcagttccccaacaacaggatcacaagctggagatgcctttaaggaagatgaagatccctttcctcctactgttctttctgtgggaagccgagagccacgcagcatcaaggccgaacatcatcctggtgatggctgacgacctcggcattggagatcctgggtgctatgggaacaaaactatcaggactcccaatatcgaccggttggccagtgggggagtgaaactcactcagcacctggcagcatcaccgctgtgcacaccaagcagggcagccttcatgactggccggtaccctgtccgatcaggaatggcatcttggtcccgcactggagttttcctcttcacagcctcttcgggaggacttcccaccgatgagattacctttgctaagcttctgaaggatcaaggttattcaacagcactgatagggaaatggcaccttgggatgagctgtcacagcaagactgacttctgtcaccaccctttacatcacggcttcaattatttctatgggatctctttgaccaatctgagagactgcaagcccggagagggcagtgtcttcaccacgggcttcaagaggctggtcttcctccccctgcagatcgtcggggtcaccctccttacccttgctgcactcaattgtctggggctactccacgtgcctctaggcgtttttttcagccttctcttcctagcagccctaatcctgacccttttcttgggcttccttcattacttccggcccctgaactgcttcatgatgaggaactacgagatcattcagcagcccatgtcctatgacaatctcacccagaggctaacggtggaggcggcccagttcatacagcggaacactgagactccgttcctgcttgtcttgtcctacctccacgtgcacacagccctgttctccagcaaagactttgctggcaaaagtcaacacggagtctacggggatgctgttgaggaaatggactggagtgtggggcagatcttgaaccttctggatgagctgagattggctaatgataccctcatctacttcacatcggaccagggagcacatgtagaagaagtgtcttccaaaggagaaattcatggcggaagtaatgggatctataaaggaggaaaagcaaacaactgggaaggaggtatccgggttccaggcatccttcgttggcccagggtgatacaggctggccagaagattgatgagcccactagcaacatggacatatttcctacagtagccaagctggctggagctcccttgcctgaggacaggatcattgatggacgtgatctgatgcccctgcttgaaggaaaaagccaacgctccgatcatgagtttctcttccattactgcaacgcctacttaaatgctgtgcgctggcaccctcagaacagcacatccatctggaaggcctttttcttcacccccaacttcaaccccgtgggttccaacggatgctttgccacacacgtgtgcttctgtttcgggagttatgtcacccatcacgacccacctttactctttgatatttccaaagatcccagagagagaaacccactaactccagcatccgagccccggttttatgaaatcctcaaagtcatgcaggaagctgcggacagacacacccagaccctgccagaggtgcccgatcagttttcatggaacaactttctttggaagccctggcttcagctgtgctgtccttccaccggcctgtcttgccagtgtgatagagaaaaacaggataagagactgagccgctagcagcgcctggggaccagacagacgcatgtggcaaagctcaccatcttcactacaaacacgcctgagagtggcactggggaaacataactccatctacaccttggatttggactgattctccattttatcacctgaaggcttgggccagagctcaacagctactcaactggaggggtgagggggataaggtctgtagtatacagacaggaagatggtaggtttatgccttctgtggccagagtcttggactcatggaaatagaatgaatagaggggcattcacaaggcacaccagtgcaagcagatgacaaaaaggtgcagaaggcaatcttaaaacagaaaggtgcaggaggtaccttaactcacccctcagcaaatacctatgtcaacagtataagttaccatttactctataatctgcagtgatgcaataaccagcataataaaaaggcaatcacataaaaaagagtttagtcgtctaaacataagtaactttaaggtgaatgaaagatcttctttaggaataatagatgatggtaagttccactttggttattggaaggcaagtcattattactggtattagttaaaacacatatcaaatgcttgctcttcatcatatatatagttatgcatacatacacacacacacatacagtatattctttcctcaaaagggttaagatgtctaaaatagggacctagaagcttaacactatttaagtaaatacagtagaagctcacaaatagatttctttgcacaatgattttttgcaaaattttacagtaataataatcccaaggcaaatctctcctgaactgctttccattccataatttgtagtataattcttggattccactgttttctttggggaatggaagttctgaattaaaagcccactgtggagatgctgtggttcatggaatctcttccagtgtaattcagaatcattggcctagaaagtctctgatatttggaggggaacaaaaatcactcacaagcaatccatgatctatacacataagcataatttcctttagttctagttagtcatcagagaacagtcatgtatgcaagttttgtgactgagaaatttctgtgcttccaatccacaatgagatgcatgattttgttttcatcccatttcccccaagcccctgtaaatcagggaaaatgcgcaactgatcgcctaggagagggcctcgtagtggcacagctggagatagtttcaaagtctaaaccaccagcccatcctgaggaaagcctcctatggaatgtaaagtgcaatcatttcttcagatataagactttccccaacaatgtgattggattcctttatggcaaaatcgagagaagctgccatccacctgcttatgcatttatctcttttgtggacttgtctgaccaccttctatttgcccagagtttgctcaattccaagacagtgcccatgaatgggacacctgtaatgtaacccacacagcggtttgcagagaatgttagccatgacttgggctttctgaaagttggctataatttctctatccctacccacaaccctgggaagttggagcaagaggggcatactattgggctgggaggatttgacagcatttccccagttgccctttaagttcttctatttcaaacgttaattttgcttctctttctaaaaaaaaaaaaaaaaaagaaagagaagaaagaagtgattcctaccccctacctccagagttgttgaaagctgaaaagcatacaagattcttccttttaacttggatttctcgttccagaaattgtgggataatctgtattcttgctttagaaaacattcttagagagggtactagcttactgatgatgtgttaggattgctactgatgctgtcatgtggaaactatttaaaggcactattataaatttatcctataagatgacaatgtttactcaaagtctaacatattcaatgcaagtaagactttctgaaaacacttgatgatgtggaaatgctgcaggattaaataacttgaagagcctttatagattatatgaatgcctatttgtgtctagaaccagttatttaacctgtaaaatgtcaatagcaaatgaaggatgaagtatatctctagatgcaaatacattgagtttaaaagtgcctcaaaataattgagatcacatttcaggacatttggaaatcaggtcgatttgtggtaactgtagtcatcttaaatttcaaaccatttaccatctgaaagttttgatttgaatgtaaaacaggaaattggaattcctttgtccaggagaaacctcacaaaccttctttaaggcatagttttgttgtttgtttgcttgtttgttgcaggctgtaaggcatggctgcttgtttacaaagcatctcattcatattacctgtggagttgcatatccaaaccttagtgagttttgaagctttaagcaaattcttttaaaaaattcttgtatttctagcattactagatattaaaagttaagcaaatagattaatgacgtatacataggcatcatttcacaaggtcagtaatgctgcaggaaaagcaaaattgcaatctacgtatctatggtactaaggaagtcctgtttttcaaaaatggaagcccacttctcagatttttctgaagggcatacaatgaaaagtgaaggggaaacacacacacacaaaaaaacaagtatttggcttgtcacaggaatctgattgcattaagtgaaaggattatttagaatatgttaatgcaaagctaaaataaaattttccttggcaattaaaaatgctgtgcgctaataccctgctttctatcgtgactcaattcaacaatgtggggaatgtttactacatttccaacttgatgtcaagcaatggggaatacaagttccagttctgcaaagattcgtcaactttcttagctcaagagagaggctgagaaatgcagagaagaataagacataaaatagctccgacctccatgatccgagagtgggaaaaggcccgattattacccataaggcacactctctaaggccttttaaggggcctacaaaaatgttttattttataatcagaagaaaaggaaatgaacattggggattgaaaatcatattggtatttgcaccaacatagtcataaaatagtatgttaatatgtttttactttatatatttatatattaaaatatatttaatatgttttgcctttgtggcccatgaaagtcttactgggccctggggaaggtatcctaccctggtgaagcagctgctttgctctacaaatacctggggcagaaatttgatttgaaaagtattattctctcttctctttgtttcaactggattcctttggaaaaccaaactagtatcagaacaaaccccgaaacagtaagaaattggagtgagaagggcatggtattgggactaggatcggctctcattcgatcgagctattctcttaaaatgacaaaaagtgtccataaagaggctgctggagagtgcgtggccatagggagccgacatgcccgggaggaaaggtgttgattacatggatacttctaaaagctaaagccttgttgccttctctttaatgcctagagaatgggatgtgtgatgcaaatgctcaaaacctcttaaatcatagctgtctgacctctacggacctcacatccatctgaggcttcatggacaaagattctccacttggccaaactttagccaagctcctcaaccttctcccaggcccaatctgggcacttccttgtaaaatctagttttggcaagaagtctattaggtcagtttagcaagaacacctaacccccccatatctgttcaacctcagtatctgatcaggctcctcagcctccaccatcccccaggtgatgtctggtcaactggcctgccttcagctagaatcctgttaggtcggtttagatgaatgctccctgatatttcctcttggtaatcttccatccactgcccctgaccctgttccctgtctataaatccccagttttccatggtgtattcagagctgagtccagtctctctcccctactacaagtccccattgctgtggtccccgtacctgtcatgatggtcctaaataaagtcttactgtgctttaataggtagcattgaaaaatttttttctttgacatcattcatgacaacatgaaacctattgggacagcatgactgtgcagggtctttagagctcagctttctgaggccctgagcattcttggttttccgacatcgtgaacctgttctgtgttgcaagatatcactcaagccagtgttgcttaataccatctctttgtgtaatagatctgaataaagtaattgtaatacaccaatattttactttgttgagtattattttaatgggagcctttccaatgaaggaaacatcagctttccttgttagaatgcaagcagcttaaaaactacccatgtctttctggaaaggaaacattgccatgtaactatgtatcagttttctaagaacttcatgggccttccata

SEQ ID NO: 186889 - DNA, 7132 bp, Homo sapiens
  Payload ID: 16799
  Gene Symbol: SRD5A1
  Gene Name: steroid-5-alpha-reductase, alpha polypeptide 1 (3-oxo-5 alpha-steroid delta 4-dehydrogenase alpha 1)
  Uniprot ID: P18405
  ENST ID: ENST00000274192
  CDS Start-End: 235-1014
tggggcgcttgcaggtccctccccgcgcaagtgctcgccccgcccccggggccgcacccacagccccggctaccccggagaagcctgacttgagaaccctttctgcagagtcccggcagtgcgggactccggtagccgcccctccggtagccgcccctcctgcccccgcgccgccgccctatatgttgcccgccgcggcctctggggcatggagcacgctgcccagccctggcgatggcaacggcgacgggggtggcggaggagcgcctgctggccgcgctcgcctacctgcagtgcgccgtgggctgcgcggtcttcgcgcgcaatcgtcagacgaactcagtgtacggccgccacgcgctgcccagccacaggctccgagtgccggcgcgggccgcctgggtggtgcaggagctgccctcgctggccctgccgctctaccagtacgccagcgagtccgccccgcgtctccgcagcgcgcccaactgcatcctcctggccatgttcctcgtccactacgggcatcggtgcttaatttacccatttctgatgcgaggaggaaagcctatgccactgttggcgtgtacaatggcgattatgttctgtacctgtaacggctatttgcaaagcagatacttgagccattgtgcagtgtatgctgatgactgggtaacagatccccgttttctaataggttttggcttgtggttaacgggcatgttgataaacatccattcagatcatatcctaaggaatctcagaaaaccaggagatactggatacaaaataccaaggggaggcttatttgaatacgtaactgcagccaactattttggagaaatcatggagtggtgtggctatgccctggccagctggtctgtccaaggcgcggcttttgctttcttcacgttttgttttttatctggtagagcaaaagagcatcatgagtggtacctccggaaatttgaagagtatccaaagttcagaaaaattataattccatttttgttttaagtgcgtttttcatgaaattatcttcaacttgaagctttccaatggcgcttctctatggactttgtaaataagttatatctttgtaattttcctgctactttatcattttcaagatgtcctctaggaattttttttctagtaattttgcaatctacctaataagtacctaaatacgctgaaatggaggttgaatatcctactgtgtaacaggtcagaatttcaagctctgggtaataactgctgatattttttctaatttcaaatttacctcttttggctatgtcttgccaagtgtgtatgagactagactttacaactgtctttgatggcattttcagaacaataaatgtcacaatcccttctatagccccctacagtgatctcttcaaggtcaactgcagtgttgcttccctccccctatagggctggaatctgtctaggagccctctctcggaggccacagaggctgggggtagccattgtgcagtcatggcccgggggaaacttgccaaccttcgtgtcaggtgctgtgtgtaagtggagaacttggggatagaggaggaagctcctcgtggcccttccaaggtgaggcaaaggcatctggacttgttccagcccagcccaccgggtgacatcaccgggcagggaggggtgctggtggtggttcatacggagtaagctgctctgcctgtgtgagtggctcctgggccctaaacaggcacctttaggccatgggtcactcaccgtgagccatcaatgtgctctggtctgacatggtttctctctgtcttctagtctagacctagtttttttgttctgttccccacgtatggatatagtagagattgttgtctgtgaaatttctcttttgtagattttgagttttcccttgtagtgtaaagaatgatcactttctgtaacaataacaagaccactttttaagatttatcctgtttgttctttgttgattgaaacataataattgttaaaattctctacagccttctttttcttccatagctaatcttccttctaatagtttttgctttctgttttgctgttgttgctttgcaaagctttcccctcatagcctgtacctgttatcaatataaaataatcttcctgttgaatgcttcatgacttgaattctactttgataaaaacattgccatactgctttttatcttgatgaattcatctggcattgctttgccttatcatctcatctggagtttttaaatgccatttgtttcagttgtctttaacaacataataaatagactttgccatttaacaaggtagctcaaattcttttactaattgttacatcgaaacattctttcatcatatttcctgtttttatttggttttttcaacttcttctgtttactatctacagtgatttggaaaggagatttcctttaaaacaaacaagcttattgggaatggcttttatgatttttaaagtagccttgagagcttccagttaaatctgatgagctgaacatacacctttccttctcccctctctattctgaccccagttgaaatcacctcaaaggaatttaggtgggggagtggccccataaagagagtgagagagagtcaccactgcagatggaccacagcacgggtggagatgggcctgatgtggcagagcagagaggccatgacagtgcacaccctgcggagaccctgggtcctcacatctgggctgacagaaggcagagggaaatgagcatctcaaagtgagaccaactaaacatggcgcctgcagcagaaagcagtgtcctctgcacccccactctccagggagagcacagagagcccagaaatgagccatgtgcccattgccggggaagagaaggtaggctgaggaggtggcctttcctaacacaaaaattaactaagtggggaaaaccagagaactaggtgttggcatcccaggaaaaaaataaagtctccacattttggcctatagggatcctgccccataatggctggttacctcctgcctcaagctgcagggaagccagggggtggcatggccatggcttctccctcagagaggcctctgtgcacgacttcagtcacccaacactgacagaacttggaacccaaaagcccatttctctccttccgtccagaccctgtctgctgttatctgtaggaagaccacagccaactgctatcatgaccaaagctaaaatccaatgaggcagagaacaatagttgtacccatctcctccttagtctccaaggccagcggtgcatgcatttgtgcattcaacaacatttgccaagcacttactgtatatcaagcacagcagtgggtgctgaggacggatgggtagaaaaaacagtcctggcccaggtggagtgacaggtaagaaacaagtaagtagctaaaataatgttaggtagaaaaaaataacaagaataaaagcaaggaaaagggaagggaccctcacttgtgtctgatacagccataatcttctctatcggccattgctgtaaccaaagcttaaccacctttcttaagatattgatcaaccagatcattgcaaatactgctaattgattcctttttatggctgagtagtattccattgtatatatatatataccacttgttgactgatgggcatttgggttggttccacgattttgcagttgtgaattgtgctgctataaacatgtgcgtgcaagtatctttttttgaataatgacttcttttcctctgggtagatacccagtaatgggattgctggatcaaatggtagttctacttttagttctaaggaatttccacactgttttccatggtggctctaatagtttacattcccaccagcagtgtggaagtgttccatgattgccgcatgcatgccaacatctactgttttttgatttttttggttatggccgttcttgcaggagtaagggggtatcgcactgtagtttttatttgcatttccctgatcattagtgatgttgagcattttttcatactttgttggccatttgtatatcttcttttgagaattgtctattcatgtccttaacccactttttgatgggattgtttgtttttttcttactgatttgtttgagtttgttgtagattctggatattagtcctttgtctgatgtatagattgtgaagattttctcccactctgtgcgttgtctgtttactctgctgactgttgcttttaccatgcaaaagctctttagtttaattaagtcccatctatttatctttgtttttattgttggaaactattattctaagttaagtaactcaggaatggaaaaccaaacaacctatgttctcattgatatgtgggagctaagctatgaggacacaaaggcataagaatggtacaatggactttggggacttggggggaagggtaagggggggtgaggaataaaagacaacatatatggtatagtatatactactcaggagatgggtgcaccaggatctcacaaatcaccactaaagaatttactcatgtaaccaaataccacctgtacccccaataacttatgggaaaaaaagatattcatcgacctattccaggtcctctctccaccactgagcctcgtggggacataaagagctgcctgccctcccctgttccccttgcctttttgcagcaggattcctgaaaatgttgacttacagatacgtttttgagatatgaacgtttgttatttcctggtgcttagggaagaaaataattgatgttgtgagttgggcgggactttagggactatgctgaacaatccactgaccactgcaggctcccatttatgatcttgggccaacagccaccagcctctgttcatgcagtctcactgagggcagttacttctttggagtggcatgcctctgagcagataattccaataatcaatgtcaaactagatattgaaacagcccaagtgtcctggtaaagctagctgttgatactcctgactgttgcattattttgttttttgttttgttttgttttgagacggagtcttgctctgtcacccaggctggagtgcaatggtgcgatcttggctcactgcaagctgtgcctcccgggttcaaacaattcttctgcctcagcctcccgagtagctgggattacaggtgcatgccaccatgcccagctaattttgtatttttagtagagacagggtttcaccatgttgtccaggctggtcttgaactcctgacctcaagtgatccacccaccttggcctcccaaggtgctgggattacaggcacaagccacagctcccggcccaactgttgcattattatttgcaaatgttggctatccctgctgttgtctatatatcaattttgtctacccaacacagctgtaaacttctcaaggtgaggagtgagccatcactctttgcacctcttgctgtgattgacatggtataccttaagatatatgttaattcctatgtcttaataaatattggcttatggagaatttgttggagcaagtacagaccctatgtttaacttcttttattcaacagaattaaaaaactagctagttctctcaataaaataatactttcttttctttcttaaaatctagctgatctggtctaaaatacacatgtgggaggcgggattgtagaaatatctcaaattaattagcgtctagctctttgtaaggtaattgacagtctgagttagttgcttcccccactgcaaagcagcaaaatctgctctcaaaggcttcacgtagccgggaaaactccgttcccaattcagatcctctggggagggcatcaattatttcctattgtttttagcaccgattgttctgtctaatttgaaaggatccaaaaaaggaaatgatacttggcattagtatcattctccatcactcttgaaagatatatgaagggaatgttggcgcaatcagtctagaaacatatttctcccataacaataagccagttctttttgctttgaatcagaaatagctccatcaggcccatgaaggaaagggaaacaaaactgagtgccaagcatatgataacatgctcagcatcatatgacattaggggattgcaaattgaaacaacagtaccaccacacacctatcagaatggccaaaatccagaagactgacatcaccaatgctagtgagaatgtggagcaacaggaactctcattcacggctggtggggatgcaaagtggtggagccacttgggaagacagtctggcagattcctaaaaaggtaaacatactcttactaaacaatctagtagatttgctcctaggtgtttacccaaaggagttgaaaacatgtccacacagaaaacctgcacatgaatgtttatagcagctttactcaaaattgccaaaaattggaagcaaccaagatgtccttcaataggtgggcggataaagaaattgtatccaattctatttctatgaggaaaatctattcatacaatagaatactagtgtcagagatttttttttaacaaagagctatcaagccatgaaaagataaggaagaactttaatgcatattggtaagtgaaaaaagccagtttgcaaaggctagatactatatgatcccaactgtataacattctgaaaaaggcacaactatggagacaataaaaagaacagagttttggatgaagggagggatgaacaggcagaatacaaacaaattttagggcagtgaaactattattatgatactttatggatatagaatattatgcatttttcaaaacacatagaatatacaacatgaagaatgaatgctaatgtaaactctggatttttattaataatattatttaattaaaatgatttattttacttattttcattattatctaaaatgttatttaattattaaatttagatgctacttaatttttgctttattattattatgttaatatcatcaactgtaactagtgtacaacactaatgcaagatgttaataggggaaatcgtgttggagagagagatatgtgagaactctgtactttcttttcaatgtttctgtaaacataaagctgctctaaaaaattaaatctattaaaaaaaaaactgagtggaaaaa

SEQ ID NO: 186890 - DNA, 1467 bp, Homo sapiens
  Payload ID: 16799
  Gene Symbol: SRD5A1
  Gene Name: steroid-5-alpha-reductase, alpha polypeptide 1 (3-oxo-5 alpha-steroid delta 4-dehydrogenase alpha 1)
  ENST ID: ENST00000513117
  CDS Start-End: 151-558
ctgacttgagaaccctttctgcagagtcccggcagtgcgggactccggtagccgcccctccggtagccgcccctcctgcccccgcgccgccgccctatatgttgcccgccgcggcctctggggcatggagcacgctgcccagccctggcgatggcaacggcgacgggggtggcggaggagcgcctgctggccgcgctcgcctacctgcagtgcgccgtgggctgcgcggtcttcgcgcgcaatcgtcagacgaactcagtgtacggccgccacgcgctgcccagccacaggctccgagtgccggcgcgggccgcctgggtggtgcaggagctgccctcgctggccctgccgctctaccagtacgccagcgagtccgccccgcgtctccgcagcgcgcccaactgcatcctcctggccatgttcctcgtccactacgggcatcggttttggcttgtggttaacgggcatgttgataaacatccattcagatcatatcctaaggaatctcagaaaaccaggagatactggatacaaaataccaaggggaggcttatttgaatacgtaactgcagccaactattttggagaaatcatggagtggtgtggctatgccctggccagctggtctgtccaaggcgcggcttttgctttcttcacgttttgttttttatctggtagagcaaaagagcatcatgagtggtacctccggaaatttgaagagtatccaaagttcagaaaaattataattccatttttgttttaagtgcgtttttcatgaaattatcttcaacttgaagctttccaatggcgcttctctatggactttgtaaataagttatatctttgtaattttcctgctactttatcattttcaagatgtcctctaggaattttttttctagtaattttgcaatctacctaataagtacctaaatacgctgaaatggaggttgaatatcctactgtgtaacaggtcagaatttcaagctctgggtaataactgctgatattttttctaatttcaaatttacctcttttggctatgtcttgccaagtgtgtatgagactagactttacaactgtctttgatggcattttcagaacaataaatgtcacaatcccttctatagccccctacagtgatctcttcaaggtcaactgcagtgttgcttccctccccctatagggctggaatctgtctaggagccctctctcggaggccacagaggctgggggtagccattgtgcagtcatggcccgggggaaacttgccaaccttcgtgtcaggtgctgtgtgtaagtggagaacttggggatagaggaggaagctcctcgtggcccttccaaggtgaggcaaaggcatctggacttgttccagcccagcccaccgggtgacatcaccgggcagggaggggtgctggtggtggttcatacggagtaagctgctctgcctgtgtgagtggctcc

SEQ ID NO: 186891 - DNA, 2013 bp, Homo sapiens
  Payload ID: 16799
  Gene Symbol: SRD5A1
  Gene Name: steroid-5-alpha-reductase, alpha polypeptide 1 (3-oxo-5 alpha-steroid delta 4-dehydrogenase alpha 1)
  ENST ID: ENST00000510531
  CDS Start-End: 151-531
ctgacttgagaaccctttctgcagagtcccggcagtgcgggactccggtagccgcccctccggtagccgcccctcctgcccccgcgccgccgccctatatgttgcccgccgcggcctctggggcatggagcacgctgcccagccctggcgatggcaacggcgacgggggtggcggaggagcgcctgctggccgcgctcgcctacctgcagtgcgccgtgggctgcgcggtcttcgcgcgcaatcgtcagacgaactcagtgtacggccgccacgcgctgcccagccacaggctccgagtgccggcgcgggccgcctgggtggtgcaggagctgccctcgctggccctgccgctctaccagtacgccagcgagtccgccccgcgtctccgcagcgcgcccaactgcatcctcctggccatgttcctcgtccactacgggcatcggaaatgttggtatgcaagcacttgcagtgtgcctacatcccaaatgccagcccatggtacccattgtctgcccggatctgaatcatgattccaagacgcagagagaaattgctgggattcgttgttcttattcattgcttggcaacactgcagcttccaggagaatacccacctcactgatgacacaacatctgaatgcacacttactggccaacacgtgctttgctgtaaatcagtatgaagtcttcctaggggtcctggcctgaatgagatgagaaccttggaggctgcttttgactcatgtgaatgtcttccccaggagttaagtgggagtgctggggagagagtggcttgaggatgcacagccagcatgacactactattatgtgattactgtcgacgttcataaccataactaatgactaattatgactttaccctggcgcacatggtcagaatggaaacaaataacaagctttacagtttttcctgctctattaaggtgcttaatttacccatttctgatgcgaggaggaaagcctatgccactgttggcgtgtacaatggcgattatgttctgtacctgtaacggctatttgcaaagcagatacttgagccattgtgcagtgtatgctgatgactgggtaacagatccccgttttctaataggttttggcttgtggttaacgggcatgttgataaacatccattcagatcatatcctaaggaatctcagaaaaccaggagatactggatacaaaataccaaggggaggcttatttgaatacgtaactgcagccaactattttggagaaatcatggagtggtgtggctatgccctggccagctggtctgtccaaggcgcggcttttgctttcttcacgttttgttttttatctggtagagcaaaagagcatcatgagtggtacctccggaaatttgaagagtatccaaagttcagaaaaattataattccatttttgttttaagtgcgtttttcatgaaattatcttcaacttgaagctttccaatggcgcttctctatggactttgtaaataagttatatctttgtaattttcctgctactttatcattttcaagatgtcctctaggaattttttttctagtaattttgcaatctacctaataagtacctaaatacgctgaaatggaggttgaatatcctactgtgtaacaggtcagaatttcaagctctgggtaataactgctgatattttttctaatttcaaatttacctcttttggctatgtcttgccaagtgtgtatgagactagactttacaactgtctttgatggcattttcagaacaataaatgtcacaatcccttctatagccccctacagtgatctcttcaaggtcaactgcagtgttgcttccctccccctatagggctggaatctgtctaggagccctctctcggaggccacagaggctgggggtagccattgtgcagtcatggcccgggggaaacttgccaaccttcgtgtcaggtgctgtgtgtaagtggagaacttggggatagaggaggaagctcctcgtggcccttc

SEQ ID NO: 186892 - DNA, 4648 bp, Homo sapiens
  Payload ID: 16800
  Gene Symbol: SRD5A2
  Gene Name: steroid-5-alpha-reductase, alpha polypeptide 2 (3-oxo-5 alpha-steroid delta 4-dehydrogenase alpha 2)
  Uniprot ID: P31213
  ENST ID: ENST00000622030
  CDS Start-End: 168-932
tgcgaaccgcgccagggctggacgcggcgaggtgggaggcaggatggaggggcgggagccaaggccgagggggcggacacgggtggcgtctggcgctccataaaggggttgcgggggccgcgctctcttctgggagggcagcggccaccggcgaggaacacggcgcgatgcaggttcagtgccagcagagcccagtgctggcaggcagcgccactttggtcgcccttggggcactggccttgtacgtcgcgaagccctccggctacgggaagcacacggagagcctgaagccggcggctacccgcctgccagcccgcgccgcctggttcctgcaggagctgccttccttcgcggtgcccgcggggatcctcgcccggcagcccctctccctcttcgggccacctgggacggtacttctgggcctcttctgcctacattacttccacaggacatttgtgtactcactgctcaatcgagggaggccttatccagctatactcattctcagaggcactgccttctgcactggaaatggagtccttcaaggctactatctgatttactgtgctgaataccctgatgggtggtacacagacatacggtttagcttgggtgtcttcttatttattttgggaatgggaataaacattcatagtgactatatattgcgccagctcaggaagcctggagaaatcagctacaggattccacaaggtggcttgtttacgtatgtttctggagccaatttcctcggtgagatcattgaatggatcggctatgccctggccacttggtccctcccagcacttgcatttgcatttttctcactttgtttccttgggctgcgagcttttcaccaccataggttctacctcaagatgtttgaggactaccccaaatctcggaaagcccttattccattcatcttttaaaggaaccaaattaaaaaggagcagagctcccacaatgctgatgaaaactgtcaagctgctgaaactgtaattttcatgatataatagtcccgtatatatgtaatagtaggtctcctggcgttctgccagctggcctggggattctgagtggtgtctgcttagagtttactcctacccttccagggacccctatcctgatccccaactgaagcttcaaaaagccacttttccaaatggcgacagttgcttcttagctattgctctgagaaagtacaaacttctcctatgtctttcaccgggcaatccaagtacatgtggcttcatacccactccctgtcaatgcaggacaactctgtaatcaagaattttttgacttgaaggcagtacttatagaccttattaaaggtatgcattttatacatgtaacagagtagcagaaatttaaactctgaagccacaaagacccagagcaaacccactcccaaatgaaaaccccagtcatggcttcctttttcttggttaattaggaaagatgagaaattattaggtagaccttgaatacaggagccctctcctcatagtgctgaaaagatactgatgcattgacctcatttcaaatttgtgcagtgtcttagttgatgagtgcctctgttttccagaagatttcacaatccccggaaaactggtatggctattcttgaaggccaggttttaataaccacaaacaaaaaggcatgaacctgggtggcttatgagagagtagagaacaacatgaccctggatggctactaagaggatagagaacagttttacaatagacattgcaaactctcatgtttttggaaactagtggcaatatccaaataatgagtagtgtaaaacaaagagaattaatgatgaggttacatgctgcttgcctccaccagatgtccacaacaatatgaagtacagcagaagccccaagcaactttcctttcctggagcttcttccttgtagttctcaggacctgttcaagaaggtgtctcctaggggcagcctgaatgcctccctcaaaggacctgcaggcagagactgaaaattgcagacagaggggcacgtctgggcagaaaacctgttttgtttggctcagacatatagttttttttttttttacaaagtttcaaaaacttaaaaatcaggagattccttcataaaactctagcattctagtttcatttaaaaagttggaggatctgaacatacagagcccacatttccacaccagaactggaactacgtagctagtaagcatttgagtttgcaaactcttgtgaaggggtcaccccagcatgagtgctgagatatggactctctaaggaaggggccgaacgcttgtaattggaatacatggaaatatttgtcttctcaggcctatgtttgcggaatgcattgtcaatatttagcaaactgttttgacaaatgagcaccagtggtactaagcacagaaactcactatataagtcacataggaaacttgaaaggtctgaggatgatgtagattactgaaaaatgcaaattgcaatcatataaataagtgtttttgttgttcattaaatacctttaaatcatggatgttaagcagttttgtttgaattaaaatatcctgggacttctggagattttcacaaggtattggggtgtgcttccctgtcccgcctgtccctcattcccattcaccctgtctgtagtgtcgtttcctttcttctcttctctcttcatgaaattaggggctgtgtgctggaaataaagaagtatgacttatacagcctctcagccacaattcagaactacaaggaagtacaataaaggtgcaggaaaacgtcatgaggttagatgccactcctggtgctgaggaatacacagggggaatgaacacacttggtgaagtaaatcttcaggtgtagcttgagctctgtgacataaaagacttccagttctctccatgacattgaaaactaccttgcttaagtcctttattttactaccatgtaaaacatccaggccggtccttgagatgaaataaatatacaataaatggcagtactcagtctcaggacaaaaccgccatttggcaatttcactttttgccacaagagggcgctttctaaaatagtatttagtccaaccttgacttaattaggtccaaccccagtcctgttgcctgatcgtggacctttcaagttagcatgatcgtggaacttcttaatctgaatatagggtagagtagcgtgaactctatgaaagctgaaaccttcccttgataattcaggtattctcagtgttctagggctgttgtgttcaatgacagtttgtcattgtttagggctaggatatgtatgtggattaaatacagtaaaggtctgaacatgtgctcatctctaaacatatttcttcccacttttaaaaatagggtgcaacaaaattatagttaattgaggtttccatggactgttttttggctaaaataatctaacagtgtcctagctcacaagatactctatcttggtcttgctgaagctttcacggaagaggcgttttcctgccaaccttgaagaaaatgttgagttttgtttgtttttcagaatttagacttaaagagctgaagcagacctcagacatcagctattcctaccacttcacattataggtagtgacactgagacccacagagttaaaaggcctcctcacagctggtacagagctggtcagagcagccatctcattttgtccctttgagggtcagatgtatgcttcttctgcttaaggcacagcctttagggctgccatctggatttctacagagctcatgcaggagaaaaatagccagagcttaagtgctgttgcatagttcagtttatacacctattgtcccatgcctgtttgtgtgtgaggcttccctcgctccgtgggagcaccaggctcatgccctttcataaacctatttgacagaatagagagttttccctcattggtgtagtcaagacaacatgtgtgttcagcatggaaaaaaggtttcaggtcataaacccccttatccctaatgcttactttcataaagaacaacagtggctccactgtattctaaaaggaaaaaggagctctaatgagaaatacgcaattaaacagctatttaggcggcttagaccctttcaggaacaaataaataaatccgtggttttacaaccctgaagtttgataatagctctcttggatttttgtggttacctcatggcaatctcactaagaagcaggggagcaagctcttggcacatgaaggaataggctcatgaagattcatttcttttcccgcttggccttttggttctctaataagctgtgagctgaggtccatgcagggaaaacaaggagggtaacggcaaatgtaaagtgaatttttctggagaaggatgctgattattttatagcatctacactatcctatgatgaaagaggcatagagccgggtggcaatgtgagttcttgggtgatttaataagccatcgagtggatttaatttctaagtaagacatttgtttattctttgtacaagtccatggagttgtgatcttaaagagttctgtgttatttgcattgtgcctcatttctccccatcaaccttagcttgagatttggatgaataaaataaataactggagaaggttaaagtatgcaccaa

SEQ ID NO: 186893 - DNA, 1929 bp, Homo sapiens
  Payload ID: 16801
  Gene Symbol: STAR
  Gene Name: steroidogenic acute regulatory protein
  Uniprot ID: P49675
  ENST ID: ENST00000276449
  CDS Start-End: 448-1305
agctgagcctggagtttctgaagacaagggctagaaatctgcactttaaagtcttgaaaaccactgtgtgccttcatctaagctgcccctgcttctctcccctccatccctcgcctggccctgtcctccctactctcccctgcaccctcccccgccccaagctccccacaaacggccaaagcagcagtgtgaggcaatcgctctatccttgaccccttcctttgcacagtgagtgatggcgtttttatctcctgatgatgatgcacagccttcagcgggggacatttaagacgcagaacaccaggtccaggctgcagctgcgggactcagaggcgaagcttgaggggctcaggaaggacgaagaaccacccttgagagaagaggcagcagcagcggcggcagcagcagcggcagcgaccccaccactgccacatttgccaggaaacaatgctgctagcgacattcaagctgtgcgctgggagctcctacagacacatgcgcaacatgaaggggctgaggcaacaggctgtgatggccatcagccaggagctgaaccggagggccctggggggccccacccctagcacgtggattaaccaggttcggcggcggagctctctactcggttctcggctggaagagactctctacagtgaccaggagctggcctatctccagcagggggaggaggccatgcagaaggccttgggcatccttagcaaccaagagggctggaagaaggagagtcagcaggacaatggggacaaagtgatgagtaaagtggtcccagatgtgggcaaggtgttccggctggaggtcgtggtggaccagcccatggagaggctctatgaagagctcgtggagcgcatggaagcaatgggggagtggaaccccaatgtcaaggagatcaaggtcctgcagaagatcggaaaagatacattcattactcacgagctggctgccgaggcagcaggaaacctggtggggccccgtgactttgtgagcgtgcgctgtgccaagcgccgaggctccacctgtgtgctggctggcatggccacagacttcgggaacatgcctgagcagaagggtgtcatcagggcggagcacggtcccacttgcatggtgcttcacccgttggctggaagtccctctaagaccaaacttacgtggctactcagcatcgacctcaaggggtggctgcccaagagcatcatcaaccaggtcctgtcccagacccaggtggattttgccaaccacctgcgcaagcgcctggagtcccaccctgcctctgaagccaggtgttgaagaccagcctgctgttcccaactgtgcccagctgcactggtacacacgctcatcaggagaatccctactggaagcctgcaagtctaagatctccatctggtgacagtgggatgggtggggttcgtgtttagagtatgacactaggattcagattggtgaaagtttttagtaccaagaaaacagggatgaggctcttggattaaaaggtaacttcattcactgattagctatgacatgagggttcaggcccctaaaataattgtaaaactttttttctgggcccttatgtacccacctaaaaccatctttaaaatgctagtggctgatatgggtgtgggggatgctaaccacagggcctgagaagtcttgctttatgggctcaagaatgccatgcgctggcagtacatgtgcacaaagcagaatctcagagggtctcctgcagccctctgctcctcccggccgctgcacagcaacaccacagaacaagcagcaccccacagtgggtgccttccagaaatatagtccaagctttctctgtggaaaaagacaaaactcattagtagacatgtttccctattgctttcataggcaccagtcagaataaagaatcataattcacacaaa

SEQ ID NO: 186894 - DNA, 748 bp, Homo sapiens
  Payload ID: 16801
  Gene Symbol: STAR
  Gene Name: steroidogenic acute regulatory protein
  ENST ID: ENST00000522050
  CDS Start-End: 1-748
ggctgaggcaacaggctgtgatggccatcagccaggagctgaaccggagggccctggggggccccacccctagcacgtggattaaccaggttcggcggcggagctctctactcggttctcggctggaagagactctctacagtgaccaggagctggcctatctccagcagggggaggaggccatgcagaaggccttgggcatccttagcaaccaagagggctggaagaaggagagtcagcaggacaatggggacaaagtgatgagtaaagtggtcccagatgtgggcaaggtgttccggctggaggtcgtggtggaccagcccatggagaggctctatgaagagctcgtggagcgcatggaagcaatgggggagtggaaccccaatgtcaaggagatcaaggtcctgcagaagatcggaaaagatacattcattactcacgagctggctgccgaggcagcaggaaacctggtggggccccgtgactttgtgagcgtgcgctgtgccaagcgccgaggctccacctgtgtgctggctggcatggccacagacttcgggaacatgcctgagcagaagggtgtcatcaggggtggctgcccaagagcatcatcaaccaggtcctgtcccagacccaggtggattttgccaaccacctgcgcaagcgcctggagtcccaccctgcctctgaagccaggtgttgaagaccagcctgctgttcccaactgtgcccagctgcactggtacacacg

SEQ ID NO: 186895 - DNA, 402 bp, Homo sapiens
  Payload ID: 16801
  Gene Symbol: STAR
  Gene Name: steroidogenic acute regulatory protein
  ENST ID: ENST00000521236
  CDS Start-End: 258-402
catgcaagcacacaggcctcaggagttgtattctccttatgaaggctgaggcaacaggctgtgatggccatcagccaggagctgaaccggagggccctggggggccccacccctagcacgtggattaaccaggttcggcggcggagctctctactcggaagctctgtctctcctcggctgtgtatccaggttctcggctggaagagactctctacagtgaccaggagctggcctatctccagcagggggaggaggccatgcagaaggccttgggcatccttagcaaccaagagggctggaagaaggagagtcagcaggacaatggggacaaagtgatgagtaaagtggtcccagatgtgggcaaggtgttccggctggaggtcgtggtggaccagcccatgg

SEQ ID NO: 186896 - DNA, 1889 bp, Homo sapiens
  Payload ID: 16802
  Gene Symbol: SCP2
  Gene Name: sterol carrier protein 2
  Uniprot ID: P22307
  ENST ID: ENST00000371509
  CDS Start-End: 112-1623
gttgccgcccgcggccctggcttcgggcttcagggagctctggtgcagtctccgcctgtcagtgccggcagtcgtccgcggcgcccgccccggtcccgcactggtgcagccatgtcctcttccccgtgggagcctgcgaccctgcgccgggtgttcgtggtgggggttggcatgaccaagtttgtgaagcctggagctgagaattcaagagactaccctgacttggcagaagaagcaggcaagaaggctttagctgatgcacagatcccttattcagcagtggaccaggcatgtgttggctatgtttttggtgtggcagaatgtgtcttggctcttgggtttgagaagatgagtaagggaagccttggaataaaattttcagatagaaccattcccactgataagcatgttgacctcctgatcaataagtatggattgtctgctcacccagttgctcctcagatgtttgggtatgctggaaaagaacatatggaaaaatatggaacaaaaattgaacactttgcaaaaattggatggaaaaatcataaacattcagttaataacccgtattcccagttccaagatgaatacagtttagatgaagtgatggcatctaaagaagtttttgattttttgactatcttacaatgttgtcccacttcagatggtgctgcagcagcaattttggccagtgaagcatttgtacagaagtatggcctgcaatccaaagctgtggaaattttggcacaagaaatgatgactgatttgccaagctcgtttgaagaaaaaagcattattaaaatggttggctttgatatgagtaaagaagctgcaagaaaatgctatgagaaatctggcctgacaccaaatgatattgacgtaatagaacttcacgattgcttttctaccaacgaactccttacttatgaagcactgggactctgtccagaaggacaaggtgcaacgctggttgatagaggagataatacatatggaggaaagtgggtcataaatcctagtggtggactgatttcaaagggacacccactaggcgctacaggtcttgctcagtgtgcagaactctgctggcagctgagaggggaagccggaaagaggcaagttcctggtgcaaaggtggctctgcagcataatttaggcattggaggagctgtggttgtaacactctacaagatgggttttccggaagccgccagttcttttagaactcatcaaattgaagctgttccaaccagctctgcaagtgatggatttaaggcaaatcttgtttttaaggagattgagaagaaacttgaagaggaaggggaacagtttgtgaagaaaatcggtggtatttttgccttcaaggtgaaagatggccctgggggtaaagaggccacctgggtggtggatgtgaagaatggcaaaggatcagtgcttcctaactcagataagaaggctgactgcacaatcacaatggctgactcagacttcctggctttaatgactggtaaaatgaatcctcagtcggccttctttcaaggcaaattgaaaatcactggcaacatgggtctcgctatgaagttacaaaatcttcagcttcagccaggcaacgctaagctctgaagaactccctttggctacttttgaaaatcaagatgagatatatagatatatatccatacattttattgtcagaatttagactgaaactacacattggcaaatagcgtgggatagatttgtttcttaatgggtgtgaccaatcctgtttttcctatgctctgggtgaatagagcctgatggtatactactgctttgcggaattgcatacaactgtgcattacaaagttaatatggtaattatggtctggggtaaaattgagtttcag

SEQ ID NO: 186897 - DNA, 2003 bp, Homo sapiens
  Payload ID: 16802
  Gene Symbol: SCP2
  Gene Name: sterol carrier protein 2
  Uniprot ID: P22307
  ENST ID: ENST00000371513
  CDS Start-End: 80-1048
gggagctctggtgcagtctccgcctgtcagtgccggcagtcgtccgcggcgcccgccccggtcccgcactggtgcagccatgtcctcttccccgtgggagcctgcgaccctgcgccgggtgttcgtggtgggggttggcatgaccaagtttgtgaagcctggagctgagaattcaagagactaccctgacttggcagaagaagcaggcaagaaggctttagctgatgcacagatcccttattcagcagtggaccaggcatgtgttggctatgtttttggtgtggcagaatgtgtcttggctcttgggtttgagaagatgagtaagggaagccttggaataaaattttcagatagaaccattcccactgataagcatgttgacctcctgatcaataagtatggattgtctgctcacccagttgctcctcagatgtttgggtatgctggaaaagaacatatggaaaaatatggaacaaaaattgaacactttgcaaaaattggatggaaaaatcataaacattcagttaataacccgtattcccagttccaagatgaatacagtttagatgaagtgatggcatctaaagaagtttttgattttttgactatcttacaatgttgtcccacttcagatggtgctgcagcagcaattttggccagtgaagcatttgtacagaagtatggcctgcaatccaaagctgtggaaattttggcacaagaaatgatgactgatttgccaagctcgtttgaagaaaaaagcattattaaaatggttggctttgatatgagtaaagaagctgcaagaaaatgctatgagaaatctggcctgacaccaaatgatattgacgtaatagaacttcacgattgcttttctaccaacgaactccttacttatgaagcactgggactctgtccagaaggacaaggtgcaacgctggttgatagaggagataatacatatggaggaaagtgggtcataaatcctagtggtggactgatttcaaagggacacccactaggcgctacaggaggacattcctgctcttgaaatttcctgataacccggacaagttcatggaaagcttgatctacattcatcctaatctttgctgatgcctccatgtatgttaccttaagttgccgtgctaactgccgtccttcttcctgtgttacctgtctttgatgatccagatctgctttattaccaattaaaatcattgggaactcatcacgatcctttactctgagaatctgtctttgaaacttatagatttcttcaaaactgcctctatctgtgactgaaaagaccaacaggaagccctcgccagtcctcatatactgttctctcatggctccaagctcttcttgtcctgctgtatccaaaatatctagccgggctgctctgtcatctatcacacactgctttgtgtaagaatcttcattggttggatcataatccgttacaaaataggactcccaacttaggaaacaaaacatttgtaatatgattgaagactcctgcatgcctcctcaataatattcccctctctcctcccccagcaccaagaggtaatcaatatcctgaatttggtatctgtcattctcatgcatttatacaacattagtaatcatatgatagtattcctaagctatgttttggagaggacaccactgcaaatcttcagccctatactagcttttatcggtagccatcaattgcagttttaatagaaatacaaatacatcaagtgtctgttctttaatttgtaaagaaaatttgttttctagcgtgacaccctcaaggtaccgtatctgtatgtaaatgttgtgcccaatgctacacagacattattttaaaactattttctgcctttggtaaatagactaaactgttttctttattcctcaaaagaattagatcatacttcagtgttgattttgttgctaatgggacatggagatgtctggatgataataaatattcctgtggtatggtcactgaa

SEQ ID NO: 186898 - DNA, 2811 bp, Homo sapiens
  Payload ID: 16802
  Gene Symbol: SCP2
  Gene Name: sterol carrier protein 2
  Uniprot ID: P22307
  ENST ID: ENST00000371514
  CDS Start-End: 169-1812
gcgccccaccccgccccctcctcctgcccctacgcacgcgcactctcacgcgcctgtgttgccgcccgcggccctggcttcgggcttcagggagctctggtgcagtctccgcctgtcagtgccggcagtcgtccgcggcgcccgccccggtcccgcactggtgcagccatgtcctcttccccgtgggagcctgcgaccctgcgccgggtgttcgtggtgggggttggcatgaccaagtttgtgaagcctggagctgagaattcaagagactaccctgacttggcagaagaagcaggcaagaaggctttagctgatgcacagatcccttattcagcagtggaccaggcatgtgttggctatgtttttggtgactctacctgtgggcagagggctatctatcacagtttgggaatgactggaattcctataatcaatgtcaacaataactgtgctactggttctactgctttgtttatggcccgccagctgattcagggtggtgtggcagaatgtgtcttggctcttgggtttgagaagatgagtaagggaagccttggaataaaattttcagatagaaccattcccactgataagcatgttgacctcctgatcaataagtatggattgtctgctcacccagttgctcctcagatgtttgggtatgctggaaaagaacatatggaaaaatatggaacaaaaattgaacactttgcaaaaattggatggaaaaatcataaacattcagttaataacccgtattcccagttccaagatgaatacagtttagatgaagtgatggcatctaaagaagtttttgattttttgactatcttacaatgttgtcccacttcagatggtgctgcagcagcaattttggccagtgaagcatttgtacagaagtatggcctgcaatccaaagctgtggaaattttggcacaagaaatgatgactgatttgccaagctcgtttgaagaaaaaagcattattaaaatggttggctttgatatgagtaaagaagctgcaagaaaatgctatgagaaatctggcctgacaccaaatgatattgacgtaatagaacttcacgattgcttttctaccaacgaactccttacttatgaagcactgggactctgtccagaaggacaaggtgcaacgctggttgatagaggagataatacatatggaggaaagtgggtcataaatcctagtggtggactgatttcaaagggacacccactaggcgctacaggtcttgctcagtgtgcagaactctgctggcagctgagaggggaagccggaaagaggcaagttcctggtgcaaaggtggctctgcagcataatttaggcattggaggagctgtggttgtaacactctacaagatgggttttccggaagccgccagttcttttagaactcatcaaattgaagctgttccaaccagctctgcaagtgatggatttaaggcaaatcttgtttttaaggagattgagaagaaacttgaagaggaaggggaacagtttgtgaagaaaatcggtggtatttttgccttcaaggtgaaagatggccctgggggtaaagaggccacctgggtggtggatgtgaagaatggcaaaggatcagtgcttcctaactcagataagaaggctgactgcacaatcacaatggctgactcagacttcctggctttaatgactggtaaaatgaatcctcagtcggccttctttcaaggcaaattgaaaatcactggcaacatgggtctcgctatgaagttacaaaatcttcagcttcagccaggcaacgctaagctctgaagaactccctttggctacttttgaaaatcaagatgagatatatagatatatatccatacattttattgtcagaatttagactgaaactacacattggcaaatagcgtgggatagatttgtttcttaatgggtgtgaccaatcctgtttttcctatgctctgggtgaatagagcctgatggtatactactgctttgcggaattgcatacaactgtgcattacaaagttaatatggtaattatggtctggggtaaaattgagtttcagaataaaattaggaacagtaaaatccaaagaactatgtaaacaaaaaagcttttgttttgcttacaaagtatatttaaggattattctgctgaagattcagtttaagagttttccttgggagaactaagtaagaaacacaatgccaacagctggccagtaattagtgttgtgcacttcatgtcattaatcaatttctcaatagttcttaaaattagtgagattaaaaatctaaaaattttgcatttcatgctatcagaaacagtattttcttcccaaatcaaaataaaagaaatatgatcagagcttgaacacaggcttatttttaaaataaaaatatttttaacatgggtttccttattgaaaaatcagtgtattagtcataaaacaccatcattaagaataattgaacaataaagtttgctttcagatgcagttttcaaattataatctcatttcaatttataacgttctcagtcctttgttataattttcctttttcatgtaagtttaattatctgcatttatcttttttcctagtttttctaatactaatgttatttcttaaaattcagtgagatataggataaaataatgctttgagaagaatgtttaatagaaaattaaaataactttttctggcctctcttgtttttactgtgtatgttcttgctcagggctctctagataatgcagaataaagagaaacgttgggggatttataaactgaatgtta

SEQ ID NO: 186899 - DNA, 2239 bp, Homo sapiens
  Payload ID: 16802
  Gene Symbol: SCP2
  Gene Name: sterol carrier protein 2
  Uniprot ID: P22307
  ENST ID: ENST00000407246
  CDS Start-End: 112-1683
gttgccgcccgcggccctggcttcgggcttcagggagctctggtgcagtctccgcctgtcagtgccggcagtcgtccgcggcgcccgccccggtcccgcactggtgcagccatgtcctcttccccgtgggagcctgcgaccctgcgccgggtgttcgtggtgggggttggcatgaccaagtttgtgaagcctggagctgagaattcaagagactaccctgacttggcagaagaagcaggtgactctacctgtgggcagagggctatctatcacagtttgggaatgactggaattcctataatcaatgtcaacaataactgtgctactggttctactgctttgtttatggcccgccagctgattcagggtggtgtggcagaatgtgtcttggctcttgggtttgagaagatgagtaagggaagccttggaataaaattttcagatagaaccattcccactgataagcatgttgacctcctgatcaataagtatggattgtctgctcacccagttgctcctcagatgtttgggtatgctggaaaagaacatatggaaaaatatggaacaaaaattgaacactttgcaaaaattggatggaaaaatcataaacattcagttaataacccgtattcccagttccaagatgaatacagtttagatgaagtgatggcatctaaagaagtttttgattttttgactatcttacaatgttgtcccacttcagatggtgctgcagcagcaattttggccagtgaagcatttgtacagaagtatggcctgcaatccaaagctgtggaaattttggcacaagaaatgatgactgatttgccaagctcgtttgaagaaaaaagcattattaaaatggttggctttgatatgagtaaagaagctgcaagaaaatgctatgagaaatctggcctgacaccaaatgatattgacgtaatagaacttcacgattgcttttctaccaacgaactccttacttatgaagcactgggactctgtccagaaggacaaggtgcaacgctggttgatagaggagataatacatatggaggaaagtgggtcataaatcctagtggtggactgatttcaaagggacacccactaggcgctacaggtcttgctcagtgtgcagaactctgctggcagctgagaggggaagccggaaagaggcaagttcctggtgcaaaggtggctctgcagcataatttaggcattggaggagctgtggttgtaacactctacaagatgggttttccggaagccgccagttcttttagaactcatcaaattgaagctgttccaaccagctctgcaagtgatggatttaaggcaaatcttgtttttaaggagattgagaagaaacttgaagaggaaggggaacagtttgtgaagaaaatcggtggtatttttgccttcaaggtgaaagatggccctgggggtaaagaggccacctgggtggtggatgtgaagaatggcaaaggatcagtgcttcctaactcagataagaaggctgactgcacaatcacaatggctgactcagacttcctggctttaatgactggtaaaatgaatcctcagtcggccttctttcaaggcaaattgaaaatcactggcaacatgggtctcgctatgaagttacaaaatcttcagcttcagccaggcaacgctaagctctgaagaactccctttggctacttttgaaaatcaagatgagatatatagatatatatccatacattttattgtcagaatttagactgaaactacacattggcaaatagcgtgggatagatttgtttcttaatgggtgtgaccaatcctgtttttcctatgctctgggtgaatagagcctgatggtatactactgctttgcggaattgcatacaactgtgcattacaaagttaatatggtaattatggtctggggtaaaattgagtttcagaataaaattaggaacagtaaaatccaaagaactatgtaaacaaaaaagcttttgttttgcttacaaagtatatttaaggattattctgctgaagattcagtttaagagttttccttgggagaactaagtaagaaacacaatgccaacagctggccagtaattagtgttgtgcacttcatgtcattaatcaatttctcaatagttcttaaaattagtgagattaaaaatctaaaaattttgcatttcatgctatcagaaacagtattttcttcccaaatcaaaataaaaga

SEQ ID NO: 186900 - DNA, 1298 bp, Homo sapiens
  Payload ID: 16802
  Gene Symbol: SCP2
  Gene Name: sterol carrier protein 2
  Uniprot ID: P22307
  ENST ID: ENST00000408941
  CDS Start-End: 84-263
gaaagaggcaagttcctggtgcaaaggtggctctgcagcataatttaggcattggaggagctgtggttgtaacactctacaagatgggttttccggaagccgccagttcttttagaactcatcaaattgaagctgttccaaccagctctgcaagtgatggatttaaggcaaatcttgtttttaaggagattgagaagaaacttgaagagataagaaggctgactgcacaatcacaatggctgactcagacttcctggctttaatgactggtaaaatgaatcctcagtcggccttctttcaaggcaaattgaaaatcactggcaacatgggtctcgctatgaagttacaaaatcttcagcttcagccaggcaacgctaagctctgaagaactccctttggctacttttgaaaatcaagatgagatatatagatatatatccatacattttattgtcagaatttagactgaaactacacattggcaaatagcgtgggatagatttgtttcttaatgggtgtgaccaatcctgtttttcctatgctctgggtgaatagagcctgatggtatactactgctttgcggaattgcatacaactgtgcattacaaagttaatatggtaattatggtctggggtaaaattgagtttcagaataaaattaggaacagtaaaatccaaagaactatgtaaacaaaaaagcttttgttttgcttacaaagtatatttaaggattattctgctgaagattcagtttaagagttttccttgggagaactaagtaagaaacacaatgccaacagctggccagtaattagtgttgtgcacttcatgtcattaatcaatttctcaatagttcttaaaattagtgagattaaaaatctaaaaattttgcatttcatgctatcagaaacagtattttcttcccaaatcaaaataaaagaaatatgatcagagcttgaacacaggcttatttttaaaataaaaatatttttaacatgggtttccttattgaaaaatcagtgtattagtcataaaacaccatcattaagaataattgaacaataaagtttgctttcagatgcagttttcaaattataatctcatttcaatttataacgttctcagtcctttgttataattttcctttttcatgtaagtttaattatctgcatttatcttttttcctagtttttctaatactaatgttatttcttaaaattcagtgagatataggataaaataatgctttgagaagaatgtttaatagaaaattaaaataactttttctggcctctctt

SEQ ID NO: 186901 - DNA, 894 bp, Homo sapiens
  Payload ID: 16802
  Gene Symbol: SCP2
  Gene Name: sterol carrier protein 2
  Uniprot ID: P22307
  ENST ID: ENST00000435345
  CDS Start-End: 54-485
ctctgcagcataatttaggcattggaggagctgtggttgtaacactctacaagatgggttttccggaagccgccagttcttttagaactcatcaaattgaagctgttccaaccagctctgcaagtgatggatttaaggcaaatcttgtttttaaggagattgagaagaaacttgaagaggaaggggaacagtttgtgaagaaaatcggtggtatttttgccttcaaggtgaaagatggccctgggggtaaagaggccacctgggtggtggatgtgaagaatggcaaaggatcagtgcttcctaactcagataagaaggctgactgcacaatcacaatggctgactcagacttcctggctttaatgactggtaaaatgaatcctcagtcggccttctttcaaggcaaattgaaaatcactggcaacatgggtctcgctatgaagttacaaaatcttcagcttcagccaggcaacgctaagctctgaagaactccctttggctacttttgaaaatcaagatgagatatatagatatatatccatacattttattgtcagaatttagactgaaactacacattggcaaatagcgtgggatagatttgtttcttaatgggtgtgaccaatcctgtttttcctatgctctgggtgaatagagcctgatggtatactactgctttgcggaattgcatacaactgtgcattacaaagttaatatggtaattatggtctggggtaaaattgagtttcagaataaaattaggaacagtaaaatccaaagaactatgtaaacaaaaaagcttttgttttgcttacaaagtatatttaaggattattctgctgaagattcagtttaagagttttccttgggagaactaagtaagaaacacaatgc

SEQ ID NO: 186902 - DNA, 938 bp, Homo sapiens
  Payload ID: 16802
  Gene Symbol: SCP2
  Gene Name: sterol carrier protein 2
  Uniprot ID: P22307
  ENST ID: ENST00000430330
  CDS Start-End: 94-516
ggggaagccggaaagaggcaagttcctggtgcaaaggtggctctgcagcataatttaggcattggaggagctgtggttgtaacactctacaagatgggttttccggaagccgccagaactcatcaaattgaagctgttccaaccagctctgcaagtgatggatttaaggcaaatcttgtttttaaggagattgagaagaaacttgaagaggaaggggaacagtttgtgaagaaaatcggtggtatttttgccttcaaggtgaaagatggccctgggggtaaagaggccacctgggtggtggatgtgaagaatggcaaaggatcagtgcttcctaactcagataagaaggctgactgcacaatcacaatggctgactcagacttcctggctttaatgactggtaaaatgaatcctcagtcggccttctttcaaggcaaattgaaaatcactggcaacatgggtctcgctatgaagttacaaaatcttcagcttcagccaggcaacgctaagctctgaagaactccctttggctacttttgaaaatcaagatgagatatatagatatatatccatacattttattgtcagaatttagactgaaactacacattggcaaatagcgtgggatagatttgtttcttaatgggtgtgaccaatcctgtttttcctatgctctgggtgaatagagcctgatggtatactactgctttgcggaattgcatacaactgtgcattacaaagttaatatggtaattatggtctggggtaaaattgagtttcagaataaaattaggaacagtaaaatccaaagaactatgtaaacaaaaaagcttttgttttgcttacaaagtatatttaaggattattctgctgaagattcagtttaagagttttccttgggagaactaagtaagaaacacaatgccaacagctggcca

SEQ ID NO: 186903 - DNA, 720 bp, Homo sapiens
  Payload ID: 16802
  Gene Symbol: SCP2
  Gene Name: sterol carrier protein 2
  ENST ID: ENST00000529363
  CDS Start-End: 1-720
agcctggagctgagaattcaagagactaccctgacttggcagaagaagcaggcaagaaggctttagctgatgcacagatcccttattcagcagtggaccaggcatgtgttggctatgtttttggtgactctacctgtgggcagagggctatctatcacagtttgggaatgactggaattcctataatcaatgtcaacaataactgtgctactggttctactgctttgtttatggcccgccagctgattcagggtggtgtggcagaatgtgtcttggctcttgggtttgagaagatgagtaagggaagccttggaataaaattttcagatagaaccattcccactgataagcatgttgacctcctgatcaataagtatggattgtctgctcacccagttgctcctcagatgtttgggtatgctggaaaagaacatatggaaaaatatggaacaaaaattgaacactttgcaaaaattggatggaaaaatcataaacattcagttaataaccctcccacttcagatggtgctgcagcagcaattttggccagtgaagcatttgtacagaagtatggcctgcaatccaaagctgtggaaattttggcacaagaaatgatgactgatttgccaagctcgtttgaagaaaaaagcattattaaaatggttggctttgatatgagtaaagaagctgcaagaaaatgctatgagaaatctggcctga

SEQ ID NO: 186904 - DNA, 671 bp, Homo sapiens
  Payload ID: 16802
  Gene Symbol: SCP2
  Gene Name: sterol carrier protein 2
  ENST ID: ENST00000484100
  CDS Start-End: 1-235
ggctctgcagcataatttaggcattggaggagctgtggttgtaacactctacaagatgggttttccggaagccgccagttcttttagaactcatcaaattgaagctgttccaaccagctctgcaagtgatggatttaaggcaaatcttgtttttaaggagattgagaagaaacttgaagagataagaaggctgactgcacaatcacaatggctgactcagacttcctggctttaatgactggtaaaatgaatcctcagtcggccttctttcaaggcaaattgaaaatcactggcaacatgggtctcgctatgaagttacaaaatcttcagcttcagccaggcaacgctaagctctgaagaactccctttggctacttttgaaaatcaagatgagatatatagatatatatccatacattttattgtcagaatttagactgaaactacacattggcaaatagcgtgggatagatttgtttcttaatgggtgtgaccaatcctgtttttcctatgctctgggtgaatagagcctgatggtatactactgctttgcggaattgcatacaactgtgcattacaaagttaatatggtaattatggtctggggtaaaattgagtttcagaataaaattaggaacagtaaaatccaaagaactatgtaaacaaaaaag

SEQ ID NO: 186905 - DNA, 1896 bp, Homo sapiens
  Payload ID: 16802
  Gene Symbol: SCP2
  Gene Name: sterol carrier protein 2
  Uniprot ID: P22307
  ENST ID: ENST00000528311
  CDS Start-End: 297-1697
gttgccgcccgcggccctggcttcgggcttcagggagctctggtgcagtctccgcctgtcagtgccggcagtcgtccgcggcgcccgccccggtcccgcactggtgcagccatgtcctcttccccgtgggagcctgcgaccctgcgccgggtgttcgtggtgggggttggcatgaccaaggcaagaaggctttagctgatgcacagatcccttattcagcagtggaccaggcatgtgttggctatgtttttggtgactctacctgtgggcagagggctatctatcacagtttgggaatgactggaattcctataatcaatgtcaacaataactgtgctactggttctactgctttgtttatggcccgccagctgattcagggtggtgtggcagaatgtgtcttggctcttgggtttgagaagatgagtaagggaagccttggaataaaattttcagatagaaccattcccactgataagcatgttgacctcctgatcaataagtatggattgtctgctcacccagttgctcctcagatgtttgggtatgctggaaaagaacatatggaaaaatatggaacaaaaattgaacactttgcaaaaattggatggaaaaatcataaacattcagttaataacccgtattcccagttccaagatgaatacagtttagatgaagtgatggcatctaaagaagtttttgattttttgactatcttacaatgttgtcccacttcagatggtgctgcagcagcaattttggccagtgaagcatttgtacagaagtatggcctgcaatccaaagctgtggaaattttggcacaagaaatgatgactgatttgccaagctcgtttgaagaaaaaagcattattaaaatggttggctttgatatgagtaaagaagctgcaagaaaatgctatgagaaatctggcctgacaccaaatgatattgacgtaatagaacttcacgattgcttttctaccaacgaactccttacttatgaagcactgggactctgtccagaaggacaaggtgcaacgctggttgatagaggagataatacatatggaggaaagtgggtcataaatcctagtggtggactgatttcaaagggacacccactaggcgctacaggtcttgctcagtgtgcagaactctgctggcagctgagaggggaagccggaaagaggcaagttcctggtgcaaaggtggctctgcagcataatttaggcattggaggagctgtggttgtaacactctacaagatgggttttccggaagccgccagttcttttagaactcatcaaattgaagctgttccaaccagctctgcaagtgatggatttaaggcaaatcttgtttttaaggagattgagaagaaacttgaagaggaaggggaacagtttgtgaagaaaatcggtggtatttttgccttcaaggtgaaagatggccctgggggtaaagaggccacctgggtggtggatgtgaagaatggcaaaggatcagtgcttcctaactcagataagaaggctgactgcacaatcacaatggctgactcagacttcctggctttaatgactggtaaaatgaatcctcagtcggccttctttcaaggcaaattgaaaatcactggcaacatgggtctcgctatgaagttacaaaatcttcagcttcagccaggcaacgctaagctctgaagaactccctttggctacttttgaaaatcaagatgagatatatagatatatatccatacattttattgtcagaatttagactgaaactacacattggcaaatagcgtgggatagatttgtttcttaatgggtgtgaccaatcctgtttttcctatgctctgggtgaatagagcctgatggtatactactgctttgcgga

SEQ ID NO: 186906 - DNA, 5204 bp, Homo sapiens
  Payload ID: 16802
  Gene Symbol: SCP2
  Gene Name: sterol carrier protein 2
  ENST ID: ENST00000478631
  CDS Start-End: 121-1221
cgcgcctgtgttgccgcccgcggccctggcttcgggcttcagggagctctggtgcagtctccgcctgtcagtgccggcagtcgtccgcggcgcccgccccggtcccgcactggtgcagccatgtcctcttccccgtgggagcctgcgaccctgcgccgggtgttcgtggtgggggttggcatgaccaagtttgtgaagcctggagctgagaattcaagagactaccctgacttggcagaagaagcaggcaagaaggctttagctgatgcacagatcccttattcagcagtggaccaggcatgtgttggctatgtttttggtgactctacctgtgggcagagggctatctatcacagtttgggaatgactggaattcctataatcaatgtcaacaataactgtgctactggttctactgctttgtttatggcccgccagctgattcagggtggtgtggcagaatgtgtcttggctcttgggtttgagaagatgagtaagggaagccttggaataaaattttcagatagaaccattcccactgataagcatgttgacctcctgatcaataagtatggattgtctgctcacccagttgctcctcagatgtttgggtatgctggaaaagaacatatggaaaaatatggaacaaaaattgaacactttgcaaaaattggatggaaaaatcataaacattcagttaataacccgtattcccagttccaagatgaatacagtttagatgaagtgatggcatctaaagaagtttttgattttttgactatcttacaatgttgtcccacttcagatggtgctgcagcagcaattttggccagtgaagcatttgtacagaagtatggcctgcaatccaaagctgtggaaattttggcacaagaaatgatgactgatttgccaagctcgtttgaagaaaaaagcattattaaaatggttggctttgatatgagtaaagaagctgcaagaaaatgctatgagaaatctggcctgacaccaaatgatattgacgtaatagaacttcacgattgcttttctaccaacgaactccttacttatgaagcactgggactctgtccagaaggacaaggtgcaacgctggttgatagaggagataatacatatggaggaaagtgggtcataaatcctagtggtggactgatttcaaagggacacccactaggcgctacaggaggacattcctgctcttgaaatttcctgataacccggacaagttcatggaaagcttgatctacattcatcctaatctttgctgatgcctccatgtatgttaccttaagttgccgtgctaactgccgtccttcttcctgtgttacctgtctttgatgatccagatctgctttattaccaattaaaatcattgggaactcatcacgatcctttactctgagaatctgtctttgaaacttatagatttcttcaaaactgcctctatctgtgactgaaaagaccaacaggaagccctcgccagtcctcatatactgttctctcatggctccaagctcttcttgtcctgctgtatccaaaatatctagccgggctgctctgtcatctatcacacactgctttgtgtaagaatcttcattggttggatcataatccgttacaaaataggactcccaacttaggaaacaaaacatttgtaatatgattgaagactcctgcatgcctcctcaataatattcccctctctcctcccccagcaccaagaggtaatcaatatcctgaatttggtatctgtcattctcatgcatttatacaacattagtaatcatatgatagtattcctaagctatgttttggagaggacaccactgcaaatcttcagccctatactagcttttatcggtagccatcaattgcagttttaatagaaatacaaatacatcaagtgtctgttctttaatttgtaaagaaaatttgttttctagcgtgacaccctcaaggtaccgtatctgtatgtaaatgttgtgcccaatgctacacagacattattttaaaactattttctgcctttggtaaatagactaaactgttttctttattcctcaaaagaattagatcatacttcagtgttgattttgttgctaatgggacatggagatgtctggatgataataaatattcctgtggtatggtcactgaagcctttaagagttatgctgtagtttgtgtgtaaagaagtgacttaaatcctcctttcagacagcttccttacgcatataggaaacctctgtttcattaggagatgaatatgatatttcattttagttgttcttgttgacatacaacttttttctcttctgaaatagcatgtttttattataatttgcttgattgccattattagatatttttgtcatgccatccactgaaatactcagaaatcatgctttatagtaacaatataatttttcatatctatatttgttattaaaatttagatctaatttttatacaataaaatgcacagttctgcctctcagaaccttcctgctgccacatttgcaccttgctgctctagcctctggggtgcattccatcctttcagcctgcaactagcagagaaaaaaagttacatattttcttgccccatgcataccttgaggcgagcaaaaaaattaaaataaattttaaccatgagggaaatcgtgcacatccaggcctgtcagtgtggcaaccggatgggtgccaagtgctgggatgtgatcagtgatgaacgtgaaatcgaccccaccagcacctaacatggggacagcgacctgcagctggactgtgtctccatgtactacagtgaagccatagatggcaaatatgttccttgtgctaacctggtggatctagaacctgggaccatggactctgctagctcaggcccttttggccaggtgcttaaaccagacaactttgtttttggtcaatctggggcaggcaacaactgggccaaaggccactacatagagggggccaagctggttgattcagttgtagatgtggtgcaggaggagtaagagagctgtgactgcctgcagggcttgcagctgacccactcaatgggctctggaatgggtactctctttatcagcaagatccgagaagagtgccctgattgcatcatgaacaccctcagtgtggtgcctccacccaaagtgtctgacaccgtggtcgagccctacaacatcaccctctccatccatcagtcggtagagaacactgatgagacctactgcattgacaatgaggccctctatgacatctgctcccgcactttgaagctgaccacaccaaactatggggacttgaaccaccttgtctcagccaccacaagcagtgttaccacctgtctccacttccctggccagctcaatgctgacctccgcaagttggcagtcaaactggtgcccttaccacatctccactacttcatggctggctttgccctctcaccagctgtggaagctagcagcatcgagctttcacagtgcccaaactcatcaggtaggatttcaatgccaagaacataatgagacccctgccacagcttatatctcaccgtggctgctgtctttgtggatggatgtccatgagcagttgctcaacgtgcagaaccagaacagcagctactttgtggagtggatccccaacaacatcaagacagctgtctgtgacatcccacctcatggcttcaagatggcggtcaccttaatcggcagcagcacggccatccaggagctcttcaggtgcatcttggagcagttcactgccatgttcccctggaaggccttcctccactggtacacagctgagggcatggatgagacgagagttcaacaaggctgagagcaacatgaacgacctcgtctctgagtatcagcagtaccaggatgccaccacagaagaggaggaggattttggtcttgctcagtgtgcagaactctgctggcagctgagaggggaagccggaaagaggcaagttcctggtgcaaaggtggctctgcagcataatttaggcattggaggagctgtggttgtaacactctacaagatgggttttccggaagccgccagttcttttagaactcatcaaattgaagctgttccaaccagctctgcaagtgatggatttaaggcaaatcttgtttttaaggagattgagaagaaacttgaagaggaaggggaacagtttgtgaagaaaatcggtggtatttttgccttcaaggtgaaagatggccctgggggtaaagaggccacctgggtggtggatgtgaagaatggcaaaggatcagtgcttcctaactcagataagaaggctgactgcacaatcacaatggctgactcagacttcctggctttaatgactggtaaaatgaatcctcagtcggccttctttcaaggcaaattgaaaatcactggcaacatgggtctcgctatgaagttacaaaatcttcagcttcagccaggcaacgctaagctctgaagaactccctttggctacttttgaaaatcaagatgagatatatagatatatatccatacattttattgtcagaatttagactgaaactacacattggcaaatagcgtgggatagatttgtttcttaatgggtgtgaccaatcctgtttttcctatgctctgggtgaatagagcctgatggtatactactgctttgcggaattgcatacaactgtgcattacaaagttaatatggtaattatggtctggggtaaaattgagtttcagaataaaattaggaacagtaaaatccaaagaactatgtaaacaaaaaagcttttgttttgcttacaaagtatatttaaggattattctgctgaagattcagtttaagagttttccttgggagaactaagtaagaaacacaatgccaacagctggccagtaattagtgttgtgcacttcatgtcattaatcaatttctcaatagttcttaaaattagtgagattaaaaatctaaaaattttgcatttcatgctatcagaaacagtattttcttcccaaatcaaaataaaagaaatatgatcagagcttgaacacaggcttatttttaaaataaaaatatttttaacatgggtttccttattgaaaaatcagtgtattagtcataaaacaccatcattaagaataattgaacaataaagtttgctttcagatgc

SEQ ID NO: 186907 - DNA, 3926 bp, Homo sapiens
  Payload ID: 16802
  Gene Symbol: SCP2
  Gene Name: sterol carrier protein 2
  Uniprot ID: P22307
  ENST ID: ENST00000488965
  CDS Start-End: 48-227
agcataatttaggcattggaggagctgtggttgtaacactctacaagatgggttttccggaagccgccagttcttttagaactcatcaaattgaagctgttccaaccagctctgcaagtgatggatttaaggcaaatcttgtttttaaggagattgagaagaaacttgaagagataagaaggctgactgcacaatcacaatggctgactcagacttcctggctttaatgactggtaaaatgaatcctcagtcggtaagtatgatggagcttatatcctgctagtaggtaggtctttcagccctttctactccatctcctgactcagactctaaagtgcaaagtggtcagactcacaaaactcagtgttccccaaacagttgacagacgtctgtggagcaagctgtgtgccacacactgtcttgtgtgctggaagtgcccagaagagtaagaaagttcccacgctcagggcatccacagatgtgtaaaagagtcagtgcagccagagatccaaggtgccacacctggcttgtggtcaggggaggatgaaggcaggagcagccatatctctctgggccatcagggagagcaccacagaggaagcagctcttgagcttagtacccaggcggaaagtaggagtgttccaggaggagggaggggtggcatgaacaaaggcctgaccttttacattccatttatttgcccatgctcttctttttgcctgacctgtccttacctgacaaatgacttgtctttcaaaattagctcagatattatctccaaggacctctttccaagttgctggggagctgtaaccagtccctctcctgagccacgtactggactgccagcttagtgcctgttgtgttatgttagtcataatatgcctctctctcttccctgttaggctgtgagtgtctcaaagcatcaaagcacatcttatttgtctttatgtttccagaatttagcacagtatctgatgtttttaggtattctgtaaacaactgttggactaaattgcatttgtctaaagtgtgtttatgccttgtatagattttcctagtccccaaattgtcaagggtcctcttaggctcttcagctgcagtgttgaatggacttgatatagtgagctttctgtcaacttgatatatactgagctttccattaataaaaaagaaactaagacgtttctttccaatgtaacttaattttttctgttgtctcagtctggtttgttttaggttttattcctgtggttctctggtaatttccaagattggataaaacaactaaatctcactcccacttgcttttttaaaatgctttttctacgtaaccaagcacattttagttgatgccatgacaagtgagaaatttgcatctgtgatgtttcagctgaatacacaccattggcactgacatttccactgagcctgctccagaaatctggacagaacagaggccaccagtataggagctggctgtcatcctccttcccacccactgcacatgccatgcacagctttggcaggctgttcagacttcacacatcagctgccttcattctctcaatttatctttgtactgcccattttgggggcaaggtgtcagcttattttccttcagcacctgttaacacccaaaggaattaaagataaaaatagcagacctttctattaatgtgctaatggacttcccttatgctcagaggatttccagaggatttgactggaaatcgttaaatgcagtggaaattctaatttcagtgtttggctccagcagcaagcgtacatgaagaacacctaggggccagattaaaatcatctttatgtatggactctctgaagggtgaagattcatgttttctctattgttagtaaataaaaagtgattttctttgttaacttacaaaggagaaaggtggcgagtttctcctgtactactggtccgtatttttaaatgatgtttgttcaatatattgtgttctgagacacctgacctttaaggcatcagacagaaggctttgtgccatatagaaaggaaatatttagtttgtccagacagaggaaggggaaaaaaaggaattagtcacccttaccaggaggtacagaaaaaaacagagctccttacattcccatggatgatgtagaagagctcctagcttcttaatgtactgttaaaaacctaggactaccagaagctttttttttaaatctagcccttccttattttaagcattcagttaaaatactgagatcatggcagggaaattatgctacgttcccaattttgctgtttctcttaagttttcctgggattttgttacatggtaaatttagcaaacatcatgtgatctaatcccaggcagttgttaaatggaacaaattgtggctctgcacttcagattggtttgatttttcttgttgagccaaagagtaacacaagcacctcattctcagcaggctctgtgccctctgtagggataagtcctttatcattggtggcatttcattcacatgcatgttggattgaatcccaagagtttctgtgttttttgtgtatgctttttctctcagcagcctgctaaaaatttcagttcatatttcccacctacatggaatgttttaaaacataatcagtgtagtatgaacccactttgaggaggacaggtgaaaacaggctcaatttctatgagaaatttgggaaagctgctcctttctgctgatctgcaaaaagtgtggcctttacaaattcttccttttgaagaatgtggttccaaatctattccagaaagccaagtttcatattttagagaaagtcatgtgacctggataaataaatgatctcagggctagatagtgtagaaacatcagcaatcttaaaacaaaaaaacaccaagtaatgaattttctttcttcttcacaggccttctttcaaggcaaattgaaaatcactggcaacatgggtctcgctatgaagttacaaaatcttcagcttcagccaggcaacgctaagctctgaagaactccctttggctacttttgaaaatcaagatgagatatatagatatatatccatacattttattgtcagaatttagactgaaactacacattggcaaatagcgtgggatagatttgtttcttaatgggtgtgaccaatcctgtttttcctatgctctgggtgaatagagcctgatggtatactactgctttgcggaattgcatacaactgtgcattacaaagttaatatggtaattatggtctggggtaaaattgagtttcagaataaaattaggaacagtaaaatccaaagaactatgtaaacaaaaaagcttttgttttgcttacaaagtatatttaaggattattctgctgaagattcagtttaagagttttccttgggagaactaagtaagaaacacaatgccaacagctggccagtaattagtgttgtgcacttcatgtcattaatcaatttctcaatagttcttaaaattagtgagattaaaaatctaaaaattttgcatttcatgctatcagaaacagtattttcttcccaaatcaaaataaaagaaatatgatcagagcttgaacacaggcttatttttaaaataaaaatatttttaacatgggtttccttattgaaaaatcagtgtattagtcataaaacaccatcattaagaataattgaacaataaagtttgctttcagatgcagttttcaaattataatctcatttcaatttataacgttctcagtcctttgttataattttcctttttcatgtaagtttaattatctgcatttatcttttttcctagtttttctaatactaatgttatttcttaaaattcagtgagatataggataaaataatgctttgagaagaatgtttaatagaaaattaaaataactttttctggc

SEQ ID NO: 186908 - DNA, 742 bp, Homo sapiens
  Payload ID: 16802
  Gene Symbol: SCP2
  Gene Name: sterol carrier protein 2
  ENST ID: ENST00000533119
  CDS Start-End: 1-97
ggctctgcagcataatttaggcattggaggagctgtggttgtaacactctacaagatgggttttccggaagccgccaggaaggggaacagtttgtgaagaaaatcggtggtatttttgccttcaaggtgaaagatggccctgggggtaaagaggccacctgggtggtggatgtgaagaatggcaaaggatcagtgcttcctaactcagataagaaggctgactgcacaatcacaatggctgactcagacttcctggctttaatgactggtaaaatgaatcctcagtcggccttctttcaaggcaaattgaaaatcactggcaacatgggtctcgctatgaagttacaaaatcttcagcttcagccaggcaacgctaagctctgaagaactccctttggctacttttgaaaatcaagatgagatatatagatatatatccatacattttattgtcagaatttagactgaaactacacattggcaaatagcgtgggatagatttgtttcttaatgggtgtgaccaatcctgtttttcctatgctctgggtgaatagagcctgatggtatactactgctttgcggaattgcatacaactgtgcattacaaagttaatatggtaattatggtctggggtaaaattgagtttcagaataaaattaggaacagtaaaatccaaagaactatgtaaacaaaaaagcttttgttttgcttacaaagtatatttaaggattattctgctga

SEQ ID NO: 186909 - DNA, 969 bp, Homo sapiens
  Payload ID: 16802
  Gene Symbol: SCP2
  Gene Name: sterol carrier protein 2
  ENST ID: ENST00000478274
  CDS Start-End: 1-421
ggctctgcagcataatttaggcattggaggagctgtggttgtaacactctacaagatgggttttccggaagccgccagttcttttagaactcatcaaattgaagctgttccaaccagctctgcaagtgatggatttaaggcaaatcttgtttttaaggagattgagaagaaacttgaagaggaaggggaacagtttgtgaagaaaatcggtggtatttttgccttcaaggtgaaagatggccctgggggtaaagaggccacctgggtggtggatgtgaagaatggcaaaggatcagtgcttcctaactcagataagaaggctgactgcacaatcacaatggctgactcagacttcctggctttaatgactggtaaaatgaatcctcagtcggtaagtatgatggagcttatatcctgctagtaggtaggtctttcagccctttctactccatctcctgactcagactctaaagtgcaaagtggtcagactcacaaaactcagtgttccccaaacagttgacagacgtctgtggagcaagctgtgtgccacacactgtcttgtgtgctggaagtgcccagaagagtaagaaagttcccacgctcagggcatccacagatgtgtaaaagagtcagtgcagccagagatccaaggtgccacacctggcttgtggtcaggggaggatgaaggcaggagcagccatatctctctgggccatcagggagagcaccacagaggaagcagctcttgagcttagtacccaggcggaaagtaggagtgttccaggaggagggaggggtggcatgaacaaaggcctgaccttttacattccatttatttgcccatgctcttctttttgcctgacctgtccttacctgacaaatgacttgtctttcaaaattagctcagatattatctccaaggacctctttccaagttgctggggagctgtaaccagtccctctcctgag

SEQ ID NO: 186910 - DNA, 6835 bp, Homo sapiens
  Payload ID: 16803
  Gene Symbol: SOAT1
  Gene Name: sterol O-acyltransferase 1
  Uniprot ID: P35610
  ENST ID: ENST00000367619
  CDS Start-End: 144-1796
agcttagcaggcgacgttgcgggccctgggcgccaggagagcttcccggagtcgaccttcctgctggctgctctgtgaccgcttcccggctctgccctcttggccgaagtgcccgctgccgggcgcgggcctcagacaatacaatggtgggtgaagagaagatgtctctaagaaaccggctgtcaaagtccagggaaaatcctgaggaagatgaagaccagagaaaccctgcaaaggagtccctagagacacctagtaatggtcgaattgacataaaacagttgatagcaaagaagataaagttgacagcagaggcagaggaattgaagccattttttatgaaggaagttggcagtcactttgatgattttgtgaccaatctcattgaaaagtcagcatcattagataatggtgggtgcgctctcacaaccttttctgttcttgaaggagagaaaaacaaccatagagcgaaggatttgagagcacctccagaacaaggaaagatttttattgcaaggcgctctctcttagatgaactgcttgaagtggaccacatcagaacaatatatcacatgtttattgccctcctcattctctttatcctcagcacacttgtagtagattacattgatgaaggaaggctggtgcttgagttcagcctcctgtcttatgcttttggcaaatttcctaccgttgtttggacctggtggatcatgttcctgtctacattttcagttccctattttctgtttcaacattgggccactggctatagcaagagttctcatccgctgatccgttctctcttccatggctttcttttcatgatcttccagattggagttctaggttttggaccaacatatgttgtgttagcatatacactgccaccagcttcccggttcatcattatattcgagcagattcgttttgtaatgaaggcccactcatttgtcagagagaacgtgcctcgggtactaaattcagctaaggagaaatcaagcactgttccaatacctacagtcaaccagtatttgtacttcttatttgctcctacccttatctaccgtgacagctatcccaggaatcccactgtaagatggggttatgtcgctatgaagtttgcacaggtctttggttgctttttctatgtgtactacatctttgaaaggctttgtgcccccttgtttcggaatatcaaacaggagcccttcagcgctcgtgttctggtcctatgtgtatttaactccatcttgccaggtgtgctgattctcttccttactttttttgcctttttgcactgctggctcaatgcctttgctgagatgttacgctttggtgacaggatgttctataaggattggtggaactccacgtcatactccaactattatagaacctggaatgtggtggtccatgactggctatattactatgcttacaaggactttctctggtttttctccaagagattcaaatctgctgccatgttagctgtctttgctgtatctgctgtagtacacgaatatgccttggctgtttgcttgagctttttctatcccgtgctcttcgtgctcttcatgttctttggaatggctttcaacttcattgtcaatgatagtcggaaaaagccgatttggaatgttctgatgtggacttctcttttcttgggcaatggagtcttactctgcttttattctcaagaatggtatgcacgtcagcactgtcctctgaaaaatcccacatttttggattatgtccggccacgttcctggacttgtcgttacgtgttttagaagcttggactttgtttcctccttgtcactgaagattgggtagctccctgatttggagccagctgtttccagttgttactgaagttatctgtgttatttggaccactccaggctttacagatgactcactccattcctaggtcacttgaagccaaactgttggaagttcactggagtcttgtacacttaagcagagcagaactttttttgtggggctgggtggggggagaagaccgactaacagctgaagtaatgacagattgttgctgggtcatatcagctttatcccttggtaattatatctgttttgtttcttgactctgtccaatcagagaataaacatcatagtttcttggccactgaattagccaaaacacttaggaagaaatcacttaaatacctctggcttagaaattttttcatgcacactgttggaatgtatgctaattgaacatgcaattggggaagaaaaaatgtagaatgatttttgctatttctagtagaaagaaaatgtctgttttccaaagataatgttatacatcctattttgtaatttttttgaaaaaagttcaatgttcagttttccttagtttttaccttgttttctctataggtcatgatttctgtgaagcaaaaagatgccttttaccatgaattcttgagtttacatcaataatattgtatattaaggggatcagaagtaggaaggaaaaaataagagatagcagaggaaaaagaaaaacatttcctcttataacttctgaagtaatttgtaaaaaagatttgtagagtcaatcatgtgtttaaattattttatcacaaacttaacatggaagatattcctttttaactttgtggtaacttctttgaagttatttagaaatatcctttggaacaattattttattgtctaataaatattgacttctcttgaattattttgcagactagtgagtctgtaccataagtattaatcacctccactcatattaaagtgatcattaagaatccagaagctggcttctgcatttgctcagttatacttttaatggtagtatgtttttaggtggaataaattaatatgtgattggtttcaaggaaatgtactctattatgtaatacttccattttataagatgcccatttctaatacaatgtgtgtaggaattatttgtatgtatgaggtatgattgtaaagattgagcattggaaggggtatcagagaccatgtagttcaactttccactcaaagtaagatttatgaattatttaaatgatagttgttacttggaacagccacttgagaggctctcttggtattgtttggaattgttttaaagtcagtttgagtctcacaagaaggtaagtagagtttcttaatagtcacaacttaatttgaaccacaagtatccagcttaatcacgtatcttactcacgataccactggtccagatgagtttaggtaattttcaaacattaaatccaacttcaacggaaacaaatacactcaagggaagttatttttaaaaaggtactctgcatgttcccgcagtaatgttctgcacaacagtattgtaattgtaatggaatcataacctgctaactagtttgctttaatatggcttgtaattcttgacatttttcttaaaattaaaacgaatttttattttgaatttataactgcattttaaatatattggggacagattgcgctgagacctggttatgagcaagccaatcttttgaatctagagaatggaattcttaggtttatatttctgttaagaaatactataaatatgactcttatgagaagactttgttgctctgtagtgtttctgaatactgtatttgttggattgatcaaggctatttttcaaaaagctctctgcttcctgtttgtttgtttgtttgtttttgagacagagtcttgctctgtcgccggggctggagtgcaatggcgtgaactcagctcactgcaacctctgcctccctggttcaagctattctcctgcctcagcctcctgagtagctgggattacagggccacgcctggctaatttttgtatttttagtagagatggggtttcaccctgttggtcaggctggtctcaaactcctgaccttgtgatctgcccacctcagcctcccaaagtgctgggaagacaggcgttagccaccgtgcccggcctctgtttcctgttattagtgattttcctgcccaagattgcaacaacaaatatgtagaactacagactgtttagaatgctgagactgttctaagaaactttcaaaaacagtagcacttcaaggaatggtcactttctatgaaagaaactggtttgatagccataatcttattgctagctgcttttagcaaaagtcttttcttgaaaccaccacctatactctttaaacaaataaaaactaaaatctcttgctaatgtttcaggaagatttattttttctattttgctattgtggcgaaaattattttcagttataggatacttttttccttctgaaaagtaataagcttaaagtttttgtttctgtaagatgtaatgatagtaactattattttgggcatattaaccaacagaacaattatgtagtatgtatatcactttctcattagatctctaacttgaccttctagtacctttatgtgtgaggataaatttgttagatccttttattctcaatcttggataatgatgcaaaatggaattttgttttgtttgttggtagattcacatactaaaactttgcaggtaaagttgcttgcctcatgttagaatttaattagaaaactgaggctgcctttttttttttttttttttttttttaagacagagtcttgttctgtcgcccaggccagttttttttttcttgtacagatggggttttaccatgttgctcaggctggtctcaaactcctggagtcaagggatctatttgcctcagcctctcaaagtgctgggattacaggtgtgagccacggctcctggctccttgctccagaatcagttttttaatggaagatagctcatactttgtttttgtttttaaagagacagggtctcactctgttgcccaggctggtagtagcgtgatcatagctcactgcagtctcaaactcctggactcaaatagtgctctggagtacctagaactacaagtgcctaccaccacacccagctaatttatttgtttttttttttttagagatggggggggtctccctatgttgcccaggctggtctcaaactcttcacctcaagcaaaactcccactgcagaaagctttgggattacaggcatgagccaccatgccaagcccatacttattgttaataaagtttcagtgacttgcttactaatcttatgcaaaatttcatgtaatttatgtaatactacataacaatgctacatatggtatgtatacatacactgtatacacacaaaggtctgttctgggtattttatgtatcttatctctaggctttatggctctgaaatggagggaactggacataaatgtttcaaggaataaagtgaatgttttgtttgtttgtttgttttgagacggagtctcagtcaccaggctggagtgcagtgctgtgatctcagctcactgcaacctctgcctcctgggttcaagcgattctcctgcctcagcctcccgagtagctggcattacaggtgcctgccaccatgtccagctaatttttgtgtttttagtagagatggggtttcaccatgatggtcaggctggtctcgaactcctgacctcatgatccgccagcctcagcctcccatagtgctgggattataggcatgagccatgctcccggccaaagtgaatgttttgggtgaagtttatataaggatttgacttttgtatcattattaaagtttctgtcaggtaatacagtgttggccctctgttgaaataaaatgttacatatcgctgggtgtagtggctcatgcctttaatcccagtactttgggaggccaaggcaggaggattgcttgagctcagaagtttgagaccagcctgggcaacatagcaaaaccttgtcactataaaaaatacaaaaattagccaggcgtggtggtgcacgcctgtagtctcagctactcagtcggctgaggtgggaagatggcttcaagccgggagatggaggcttcagtgacctgtgacctgtgatcacaccacttaattcctcaaaacatttatgtcccagttccctccatttcagagccatgggcaacagagcgagaccctgtctcaaaaaaaaaattacatataagcccggtttaaagagaggataatatgcaaccaccctagttgaaacagagtgtatcacttctttctcaccctaaatttaatgcctagtttgaaaatcagtagacaataataaagttgataagctttaggttggtaggaaagctatgtaatctatatagtgtactaaatccttatatgtttttggtaaaaaaagactttaatagctaatttggacttcagaaaatgggttaatttcacgagtgcatatcacttttgactatattagtcaagcatattattaaagtttaaaaaactctaaaacttctgtactgtttttttcttaagtgctctcttccttatttctacattactacattcacatttctgctgtcaataagccctaatggagtgataaactttaagctagtagatactgcaccatgtcttgtggtggtgttttcttaatgaaatggaagctgtacttcctgtttgtttttaaatacttttgaaacagacagttcatgtaccccatcatttagagatgcagtttgaatttccatggaaaaaggtgccaattttggattgggaaaggagctgaagccccagtcaagactttgccatttggggtaatgcagcagattcctgtgtctgtatctttccagtgtgtgtgttaatccatagtgttctgagcaccagaagggtcatgtaaatctgaagttgttattaaaggtttttctatagtgaaa

SEQ ID NO: 186911 - DNA, 870 bp, Homo sapiens
  Payload ID: 16803
  Gene Symbol: SOAT1
  Gene Name: sterol O-acyltransferase 1
  ENST ID: ENST00000426956
  CDS Start-End: 91-870
gtattagcaagacatgaaaatctgtaggggcaccagaacctttaatcaagctcatgttttattgtaaaatattaggatgtagacaatacaatggtgggtgaagagaagatgtctctaagaaaccggctgtcaaagtccagggaaaatcctgaggaagatgaagaccagagaaaccctgcaaaggagtccctagagacacctagtaatggtcgaattgacataaaacagttgatagcaaagaagataaagttgacagcagaggcagaggaattgaagccattttttatgaaggaagttggcagtcactttgatgattttgtgaccaatctcattgaaaagtcagcatcattagataatggtgggtgcgctctcacaaccttttctgttcttgaaggagagaaaaacaaccatagagcgaaggatttgagagcacctccagaacaaggaaagatttttattgcaaggcgctctctcttagatgaactgcttgaagtggaccacatcagaacaatatatcacatgtttattgccctcctcattctctttatcctcagcacacttgtagtagattacattgatgaaggaaggctggtgcttgagttcagcctcctgtcttatgcttttggcaaatttcctaccgttgtttggacctggtggatcatgttcctgtctacattttcagttccctattttctgtttcaacattgggccactggctatagcaagagttctcatccgctgatccgttctctcttccatggctttcttttcatgatcttccagattggagttctaggttttggaccaacatatgttgtgttagcatatacactgccaccagcttcccggttcatcattatattcgagcag

SEQ ID NO: 186912 - DNA, 6794 bp, Homo sapiens
  Payload ID: 16803
  Gene Symbol: SOAT1
  Gene Name: sterol O-acyltransferase 1
  Uniprot ID: P35610
  ENST ID: ENST00000539888
  CDS Start-End: 301-1758
aataggatgctcagccggaggtggccctgcgcgtgacgcagcggtgctcggaggcagggggcgtaggggccgggctgtccggcgctttagcttagcaggcgacgttgcgggccctgggcgccaggagagcttcccggagtcgaccttcctgctggctgctctgtgaccgcttcccggctctgccctcttggccgaagtgcccgctgccgggcgcgggcctcaggtcgaattgacataaaacagttgatagcaaagaagataaagttgacagcagaggcagaggaattgaagccattttttatgaaggaagttggcagtcactttgatgattttgtgaccaatctcattgaaaagtcagcatcattagataatggtgggtgcgctctcacaaccttttctgttcttgaaggagagaaaaacaaccatagagcgaaggatttgagagcacctccagaacaaggaaagatttttattgcaaggcgctctctcttagatgaactgcttgaagtggaccacatcagaacaatatatcacatgtttattgccctcctcattctctttatcctcagcacacttgtagtagattacattgatgaaggaaggctggtgcttgagttcagcctcctgtcttatgcttttggcaaatttcctaccgttgtttggacctggtggatcatgttcctgtctacattttcagttccctattttctgtttcaacattgggccactggctatagcaagagttctcatccgctgatccgttctctcttccatggctttcttttcatgatcttccagattggagttctaggttttggaccaacatatgttgtgttagcatatacactgccaccagcttcccggttcatcattatattcgagcagattcgttttgtaatgaaggcccactcatttgtcagagagaacgtgcctcgggtactaaattcagctaaggagaaatcaagcactgttccaatacctacagtcaaccagtatttgtacttcttatttgctcctacccttatctaccgtgacagctatcccaggaatcccactgtaagatggggttatgtcgctatgaagtttgcacaggtctttggttgctttttctatgtgtactacatctttgaaaggctttgtgcccccttgtttcggaatatcaaacaggagcccttcagcgctcgtgttctggtcctatgtgtatttaactccatcttgccaggtgtgctgattctcttccttactttttttgcctttttgcactgctggctcaatgcctttgctgagatgttacgctttggtgacaggatgttctataaggattggtggaactccacgtcatactccaactattatagaacctggaatgtggtggtccatgactggctatattactatgcttacaaggactttctctggtttttctccaagagattcaaatctgctgccatgttagctgtctttgctgtatctgctgtagtacacgaatatgccttggctgtttgcttgagctttttctatcccgtgctcttcgtgctcttcatgttctttggaatggctttcaacttcattgtcaatgatagtcggaaaaagccgatttggaatgttctgatgtggacttctcttttcttgggcaatggagtcttactctgcttttattctcaagaatggtatgcacgtcagcactgtcctctgaaaaatcccacatttttggattatgtccggccacgttcctggacttgtcgttacgtgttttagaagcttggactttgtttcctccttgtcactgaagattgggtagctccctgatttggagccagctgtttccagttgttactgaagttatctgtgttatttggaccactccaggctttacagatgactcactccattcctaggtcacttgaagccaaactgttggaagttcactggagtcttgtacacttaagcagagcagaactttttttgtggggctgggtggggggagaagaccgactaacagctgaagtaatgacagattgttgctgggtcatatcagctttatcccttggtaattatatctgttttgtttcttgactctgtccaatcagagaataaacatcatagtttcttggccactgaattagccaaaacacttaggaagaaatcacttaaatacctctggcttagaaattttttcatgcacactgttggaatgtatgctaattgaacatgcaattggggaagaaaaaatgtagaatgatttttgctatttctagtagaaagaaaatgtctgttttccaaagataatgttatacatcctattttgtaatttttttgaaaaaagttcaatgttcagttttccttagtttttaccttgttttctctataggtcatgatttctgtgaagcaaaaagatgccttttaccatgaattcttgagtttacatcaataatattgtatattaaggggatcagaagtaggaaggaaaaaataagagatagcagaggaaaaagaaaaacatttcctcttataacttctgaagtaatttgtaaaaaagatttgtagagtcaatcatgtgtttaaattattttatcacaaacttaacatggaagatattcctttttaactttgtggtaacttctttgaagttatttagaaatatcctttggaacaattattttattgtctaataaatattgacttctcttgaattattttgcagactagtgagtctgtaccataagtattaatcacctccactcatattaaagtgatcattaagaatccagaagctggcttctgcatttgctcagttatacttttaatggtagtatgtttttaggtggaataaattaatatgtgattggtttcaaggaaatgtactctattatgtaatacttccattttataagatgcccatttctaatacaatgtgtgtaggaattatttgtatgtatgaggtatgattgtaaagattgagcattggaaggggtatcagagaccatgtagttcaactttccactcaaagtaagatttatgaattatttaaatgatagttgttacttggaacagccacttgagaggctctcttggtattgtttggaattgttttaaagtcagtttgagtctcacaagaaggtaagtagagtttcttaatagtcacaacttaatttgaaccacaagtatccagcttaatcacgtatcttactcacgataccactggtccagatgagtttaggtaattttcaaacattaaatccaacttcaacggaaacaaatacactcaagggaagttatttttaaaaaggtactctgcatgttcccgcagtaatgttctgcacaacagtattgtaattgtaatggaatcataacctgctaactagtttgctttaatatggcttgtaattcttgacatttttcttaaaattaaaacgaatttttattttgaatttataactgcattttaaatatattggggacagattgcgctgagacctggttatgagcaagccaatcttttgaatctagagaatggaattcttaggtttatatttctgttaagaaatactataaatatgactcttatgagaagactttgttgctctgtagtgtttctgaatactgtatttgttggattgatcaaggctatttttcaaaaagctctctgcttcctgtttgtttgtttgtttgtttttgagacagagtcttgctctgtcgccggggctggagtgcaatggcgtgaactcagctcactgcaacctctgcctccctggttcaagctattctcctgcctcagcctcctgagtagctgggattacagggccacgcctggctaatttttgtatttttagtagagatggggtttcaccctgttggtcaggctggtctcaaactcctgaccttgtgatctgcccacctcagcctcccaaagtgctgggaagacaggcgttagccaccgtgcccggcctctgtttcctgttattagtgattttcctgcccaagattgcaacaacaaatatgtagaactacagactgtttagaatgctgagactgttctaagaaactttcaaaaacagtagcacttcaaggaatggtcactttctatgaaagaaactggtttgatagccataatcttattgctagctgcttttagcaaaagtcttttcttgaaaccaccacctatactctttaaacaaataaaaactaaaatctcttgctaatgtttcaggaagatttattttttctattttgctattgtggcgaaaattattttcagttataggatacttttttccttctgaaaagtaataagcttaaagtttttgtttctgtaagatgtaatgatagtaactattattttgggcatattaaccaacagaacaattatgtagtatgtatatcactttctcattagatctctaacttgaccttctagtacctttatgtgtgaggataaatttgttagatccttttattctcaatcttggataatgatgcaaaatggaattttgttttgtttgttggtagattcacatactaaaactttgcaggtaaagttgcttgcctcatgttagaatttaattagaaaactgaggctgcctttttttttttttttttttttttttaagacagagtcttgttctgtcgcccaggccagttttttttttcttgtacagatggggttttaccatgttgctcaggctggtctcaaactcctggagtcaagggatctatttgcctcagcctctcaaagtgctgggattacaggtgtgagccacggctcctggctccttgctccagaatcagttttttaatggaagatagctcatactttgtttttgtttttaaagagacagggtctcactctgttgcccaggctggtagtagcgtgatcatagctcactgcagtctcaaactcctggactcaaatagtgctctggagtacctagaactacaagtgcctaccaccacacccagctaatttatttgtttttttttttttagagatggggggggtctccctatgttgcccaggctggtctcaaactcttcacctcaagcaaaactcccactgcagaaagctttgggattacaggcatgagccaccatgccaagcccatacttattgttaataaagtttcagtgacttgcttactaatcttatgcaaaatttcatgtaatttatgtaatactacataacaatgctacatatggtatgtatacatacactgtatacacacaaaggtctgttctgggtattttatgtatcttatctctaggctttatggctctgaaatggagggaactggacataaatgtttcaaggaataaagtgaatgttttgtttgtttgtttgttttgagacggagtctcagtcaccaggctggagtgcagtgctgtgatctcagctcactgcaacctctgcctcctgggttcaagcgattctcctgcctcagcctcccgagtagctggcattacaggtgcctgccaccatgtccagctaatttttgtgtttttagtagagatggggtttcaccatgatggtcaggctggtctcgaactcctgacctcatgatccgccagcctcagcctcccatagtgctgggattataggcatgagccatgctcccggccaaagtgaatgttttgggtgaagtttatataaggatttgacttttgtatcattattaaagtttctgtcaggtaatacagtgttggccctctgttgaaataaaatgttacatatcgctgggtgtagtggctcatgcctttaatcccagtactttgggaggccaaggcaggaggattgcttgagctcagaagtttgagaccagcctgggcaacatagcaaaaccttgtcactataaaaaatacaaaaattagccaggcgtggtggtgcacgcctgtagtctcagctactcagtcggctgaggtgggaagatggcttcaagccgggagatggaggcttcagtgacctgtgacctgtgatcacaccacttaattcctcaaaacatttatgtcccagttccctccatttcagagccatgggcaacagagcgagaccctgtctcaaaaaaaaaattacatataagcccggtttaaagagaggataatatgcaaccaccctagttgaaacagagtgtatcacttctttctcaccctaaatttaatgcctagtttgaaaatcagtagacaataataaagttgataagctttaggttggtaggaaagctatgtaatctatatagtgtactaaatccttatatgtttttggtaaaaaaagactttaatagctaatttggacttcagaaaatgggttaatttcacgagtgcatatcacttttgactatattagtcaagcatattattaaagtttaaaaaactctaaaacttctgtactgtttttttcttaagtgctctcttccttatttctacattactacattcacatttctgctgtcaataagccctaatggagtgataaactttaagctagtagatactgcaccatgtcttgtggtggtgttttcttaatgaaatggaagctgtacttcctgtttgtttttaaatacttttgaaacagacagttcatgtaccccatcatttagagatgcagtttgaatttccatggaaaaaggtgccaattttggattgggaaaggagctgaagccccagtcaagactttgccatttggggtaatgcagcagattcctgtgtctgtatctttccagtgtgtgtgttaatccatagtgttctgagcaccagaagggtcatgtaaatctgaagttgttattaaaggtttttctatagtg

SEQ ID NO: 186913 - DNA, 6861 bp, Homo sapiens
  Payload ID: 16803
  Gene Symbol: SOAT1
  Gene Name: sterol O-acyltransferase 1
  Uniprot ID: P35610
  ENST ID: ENST00000540564
  CDS Start-End: 347-1825
aataggatgctcagccggaggtggccctgcgcgtgacgcagcggtgctcggaggcagggggcgtaggggccgggctgtccggcgctttagcttagcaggcgacgttgcgggccctgggcgccaggagagcttcccggagtcgaccttcctgctggctgctctgtgaccgcttcccggctctgccctcttggccgaagtgcccgctgccgggcgcgggcctcagacaatacaatggtgggtgaagagaagatgtctctaagaaaccggctgtcaaagtccagggaaaatcctgaggaagatgaagaccagagaaaccctgcaaaggagtccctagagacacctagtaatggaattgaagccattttttatgaaggaagttggcagtcactttgatgattttgtgaccaatctcattgaaaagtcagcatcattagataatggtgggtgcgctctcacaaccttttctgttcttgaaggagagaaaaacaaccatagagcgaaggatttgagagcacctccagaacaaggaaagatttttattgcaaggcgctctctcttagatgaactgcttgaagtggaccacatcagaacaatatatcacatgtttattgccctcctcattctctttatcctcagcacacttgtagtagattacattgatgaaggaaggctggtgcttgagttcagcctcctgtcttatgcttttggcaaatttcctaccgttgtttggacctggtggatcatgttcctgtctacattttcagttccctattttctgtttcaacattgggccactggctatagcaagagttctcatccgctgatccgttctctcttccatggctttcttttcatgatcttccagattggagttctaggttttggaccaacatatgttgtgttagcatatacactgccaccagcttcccggttcatcattatattcgagcagattcgttttgtaatgaaggcccactcatttgtcagagagaacgtgcctcgggtactaaattcagctaaggagaaatcaagcactgttccaatacctacagtcaaccagtatttgtacttcttatttgctcctacccttatctaccgtgacagctatcccaggaatcccactgtaagatggggttatgtcgctatgaagtttgcacaggtctttggttgctttttctatgtgtactacatctttgaaaggctttgtgcccccttgtttcggaatatcaaacaggagcccttcagcgctcgtgttctggtcctatgtgtatttaactccatcttgccaggtgtgctgattctcttccttactttttttgcctttttgcactgctggctcaatgcctttgctgagatgttacgctttggtgacaggatgttctataaggattggtggaactccacgtcatactccaactattatagaacctggaatgtggtggtccatgactggctatattactatgcttacaaggactttctctggtttttctccaagagattcaaatctgctgccatgttagctgtctttgctgtatctgctgtagtacacgaatatgccttggctgtttgcttgagctttttctatcccgtgctcttcgtgctcttcatgttctttggaatggctttcaacttcattgtcaatgatagtcggaaaaagccgatttggaatgttctgatgtggacttctcttttcttgggcaatggagtcttactctgcttttattctcaagaatggtatgcacgtcagcactgtcctctgaaaaatcccacatttttggattatgtccggccacgttcctggacttgtcgttacgtgttttagaagcttggactttgtttcctccttgtcactgaagattgggtagctccctgatttggagccagctgtttccagttgttactgaagttatctgtgttatttggaccactccaggctttacagatgactcactccattcctaggtcacttgaagccaaactgttggaagttcactggagtcttgtacacttaagcagagcagaactttttttgtggggctgggtggggggagaagaccgactaacagctgaagtaatgacagattgttgctgggtcatatcagctttatcccttggtaattatatctgttttgtttcttgactctgtccaatcagagaataaacatcatagtttcttggccactgaattagccaaaacacttaggaagaaatcacttaaatacctctggcttagaaattttttcatgcacactgttggaatgtatgctaattgaacatgcaattggggaagaaaaaatgtagaatgatttttgctatttctagtagaaagaaaatgtctgttttccaaagataatgttatacatcctattttgtaatttttttgaaaaaagttcaatgttcagttttccttagtttttaccttgttttctctataggtcatgatttctgtgaagcaaaaagatgccttttaccatgaattcttgagtttacatcaataatattgtatattaaggggatcagaagtaggaaggaaaaaataagagatagcagaggaaaaagaaaaacatttcctcttataacttctgaagtaatttgtaaaaaagatttgtagagtcaatcatgtgtttaaattattttatcacaaacttaacatggaagatattcctttttaactttgtggtaacttctttgaagttatttagaaatatcctttggaacaattattttattgtctaataaatattgacttctcttgaattattttgcagactagtgagtctgtaccataagtattaatcacctccactcatattaaagtgatcattaagaatccagaagctggcttctgcatttgctcagttatacttttaatggtagtatgtttttaggtggaataaattaatatgtgattggtttcaaggaaatgtactctattatgtaatacttccattttataagatgcccatttctaatacaatgtgtgtaggaattatttgtatgtatgaggtatgattgtaaagattgagcattggaaggggtatcagagaccatgtagttcaactttccactcaaagtaagatttatgaattatttaaatgatagttgttacttggaacagccacttgagaggctctcttggtattgtttggaattgttttaaagtcagtttgagtctcacaagaaggtaagtagagtttcttaatagtcacaacttaatttgaaccacaagtatccagcttaatcacgtatcttactcacgataccactggtccagatgagtttaggtaattttcaaacattaaatccaacttcaacggaaacaaatacactcaagggaagttatttttaaaaaggtactctgcatgttcccgcagtaatgttctgcacaacagtattgtaattgtaatggaatcataacctgctaactagtttgctttaatatggcttgtaattcttgacatttttcttaaaattaaaacgaatttttattttgaatttataactgcattttaaatatattggggacagattgcgctgagacctggttatgagcaagccaatcttttgaatctagagaatggaattcttaggtttatatttctgttaagaaatactataaatatgactcttatgagaagactttgttgctctgtagtgtttctgaatactgtatttgttggattgatcaaggctatttttcaaaaagctctctgcttcctgtttgtttgtttgtttgtttttgagacagagtcttgctctgtcgccggggctggagtgcaatggcgtgaactcagctcactgcaacctctgcctccctggttcaagctattctcctgcctcagcctcctgagtagctgggattacagggccacgcctggctaatttttgtatttttagtagagatggggtttcaccctgttggtcaggctggtctcaaactcctgaccttgtgatctgcccacctcagcctcccaaagtgctgggaagacaggcgttagccaccgtgcccggcctctgtttcctgttattagtgattttcctgcccaagattgcaacaacaaatatgtagaactacagactgtttagaatgctgagactgttctaagaaactttcaaaaacagtagcacttcaaggaatggtcactttctatgaaagaaactggtttgatagccataatcttattgctagctgcttttagcaaaagtcttttcttgaaaccaccacctatactctttaaacaaataaaaactaaaatctcttgctaatgtttcaggaagatttattttttctattttgctattgtggcgaaaattattttcagttataggatacttttttccttctgaaaagtaataagcttaaagtttttgtttctgtaagatgtaatgatagtaactattattttgggcatattaaccaacagaacaattatgtagtatgtatatcactttctcattagatctctaacttgaccttctagtacctttatgtgtgaggataaatttgttagatccttttattctcaatcttggataatgatgcaaaatggaattttgttttgtttgttggtagattcacatactaaaactttgcaggtaaagttgcttgcctcatgttagaatttaattagaaaactgaggctgcctttttttttttttttttttttttttaagacagagtcttgttctgtcgcccaggccagttttttttttcttgtacagatggggttttaccatgttgctcaggctggtctcaaactcctggagtcaagggatctatttgcctcagcctctcaaagtgctgggattacaggtgtgagccacggctcctggctccttgctccagaatcagttttttaatggaagatagctcatactttgtttttgtttttaaagagacagggtctcactctgttgcccaggctggtagtagcgtgatcatagctcactgcagtctcaaactcctggactcaaatagtgctctggagtacctagaactacaagtgcctaccaccacacccagctaatttatttgtttttttttttttagagatggggggggtctccctatgttgcccaggctggtctcaaactcttcacctcaagcaaaactcccactgcagaaagctttgggattacaggcatgagccaccatgccaagcccatacttattgttaataaagtttcagtgacttgcttactaatcttatgcaaaatttcatgtaatttatgtaatactacataacaatgctacatatggtatgtatacatacactgtatacacacaaaggtctgttctgggtattttatgtatcttatctctaggctttatggctctgaaatggagggaactggacataaatgtttcaaggaataaagtgaatgttttgtttgtttgtttgttttgagacggagtctcagtcaccaggctggagtgcagtgctgtgatctcagctcactgcaacctctgcctcctgggttcaagcgattctcctgcctcagcctcccgagtagctggcattacaggtgcctgccaccatgtccagctaatttttgtgtttttagtagagatggggtttcaccatgatggtcaggctggtctcgaactcctgacctcatgatccgccagcctcagcctcccatagtgctgggattataggcatgagccatgctcccggccaaagtgaatgttttgggtgaagtttatataaggatttgacttttgtatcattattaaagtttctgtcaggtaatacagtgttggccctctgttgaaataaaatgttacatatcgctgggtgtagtggctcatgcctttaatcccagtactttgggaggccaaggcaggaggattgcttgagctcagaagtttgagaccagcctgggcaacatagcaaaaccttgtcactataaaaaatacaaaaattagccaggcgtggtggtgcacgcctgtagtctcagctactcagtcggctgaggtgggaagatggcttcaagccgggagatggaggcttcagtgacctgtgacctgtgatcacaccacttaattcctcaaaacatttatgtcccagttccctccatttcagagccatgggcaacagagcgagaccctgtctcaaaaaaaaaattacatataagcccggtttaaagagaggataatatgcaaccaccctagttgaaacagagtgtatcacttctttctcaccctaaatttaatgcctagtttgaaaatcagtagacaataataaagttgataagctttaggttggtaggaaagctatgtaatctatatagtgtactaaatccttatatgtttttggtaaaaaaagactttaatagctaatttggacttcagaaaatgggttaatttcacgagtgcatatcacttttgactatattagtcaagcatattattaaagtttaaaaaactctaaaacttctgtactgtttttttcttaagtgctctcttccttatttctacattactacattcacatttctgctgtcaataagccctaatggagtgataaactttaagctagtagatactgcaccatgtcttgtggtggtgttttcttaatgaaatggaagctgtacttcctgtttgtttttaaatacttttgaaacagacagttcatgtaccccatcatttagagatgcagtttgaatttccatggaaaaaggtgccaattttggattgggaaaggagctgaagccccagtcaagactttgccatttggggtaatgcagcagattcctgtgtctgtatctttccagtgtgtgtgttaatccatagtgttctgagcaccagaagggtcatgtaaatctgaagttgttattaaaggtttttctatagtg

SEQ ID NO: 186914 - DNA, 2044 bp, Homo sapiens
  Payload ID: 16804
  Gene Symbol: SOAT2
  Gene Name: sterol O-acyltransferase 2
  Uniprot ID: O75908
  ENST ID: ENST00000301466
  CDS Start-End: 61-1629
actgcgaaggaaggaggcaacacgggcaagggctgcctgctgcccgctggagaccgcaccatggagccaggcggggcccgtctgcgtctgcagaggacagaagggctgggaggggagcgggagcgccaaccctgtggagatggaaacactgagacgcacagagccccggacttggtacaatggacccgacacatggaggctgtgaaggcacaattgctggagcaagcgcagggacaactgagggagctgctggatcgggccatgcgggaggctatacaatcctacccatcacaagacaaacctctgcccccacctcccccaggttccttgagcaggacccaggagccatccctggggaaacagaaagttttcatcatccgcaagtccctgcttgatgagctgatggaggtgcagcatttccgcaccatctaccacatgttcatcgctggcctgtgtgtcttcatcatcagcaccctggccatcgacttcattgatgagggcaggctgctgctggagtttgacctactgatcttcagcttcggacagctgccattggcgctggtgacctgggtgcccatgtttctgtccaccctgttggcgccgtaccaggccctacggctgtgggccaggggcacctggacgcaggcgacgggcctgggctgtgcgctgctagccgcccacgccgtggtgctctgcgcgctgccggtccacgtggccgtggagcatcagctcccgccggcctcccgttgtgtcctggtcttcgagcaggttaggttcctgatgaaaagctactccttcctgagagaggctgtgcctgggacccttcgtgccagacgaggtgaggggatccaggcccccagtttctccagctacctctacttcctcttctgcccaacactcatctacagggagacttaccctaggacgccctatgtcaggtggaattatgtggccaagaactttgcccaggccctgggatgtgtgctctatgcctgcttcatcctgggccgcctctgtgttcctgtctttgccaacatgagccgagagcccttcagcacccgtgccctggtgctctctatcctgcatgccacgttgccaggcatcttcatgctgctgctcatcttctttgccttcctccattgctggctcaacgcctttgccgagatgctacgatttggagacaggatgttctaccgggactggtggaactcaacgtccttctccaactactaccgcacttggaacgtggtggtccatgactggctgtacagctacgtgtatcaggatgggctgcggctccttggtgcccgggcccgaggggtagccatgctgggtgtgttcctggtctccgcagtggcccatgagtatatcttctgcttcgtcctggggttcttctatcccgtcatgctgatactcttccttgtcattggaggaatgttgaacttcatgatgcatgaccagcgcaccggcccggcatggaacgtgctgatgtggaccatgctgtttctaggccagggaatccaggtcagcctgtactgccaggagtggtacgcacggcggcactgccccttaccccaggcaactttctgggggctggtgacacctcgatcttggtcctgccatacctagaggtcgggacagacgacgctacctgcccagacaccaccaagttctctgcctgcaaaacctgggaccaggactcctgtctgcattcccaaatttggctctgagtcgaggcaacctgcacacaagaccccaccaaggaatgtgcaaggactgagatctgcagacttgtgggtaactgatcacagacctcagcatgggggtgaccagggtgactcttcaatccctatccccatgggctgggtacaggatatcctcctaccccatgactgtcttagggagacttggggtaccttatggatttgatgaatgtgggggaactcagaggaactggggccaccaaggttggaaaagggtttggttcttgactttgtattccttccaatacagcaataaactttgtctccctttttattcattc

SEQ ID NO: 186915 - DNA, 1797 bp, Homo sapiens
  Payload ID: 16804
  Gene Symbol: SOAT2
  Gene Name: sterol O-acyltransferase 2
  Uniprot ID: O75908
  ENST ID: ENST00000542365
  CDS Start-End: 48-980
gaggcaacacgggcaagggctgcctgctgcccgctggagaccgcaccatggagccaggcggggcccgtctgcgtctgcagaggacagaagggctgggaggggagcgggagcgccaaccctgtggagatggaaacactgagacgcacagagccccggacttggtacaatggacccgacacatggaggctgtgaaggcacaattgctggagcaagcgcagggacaactgagggagctgctggatcgggccatgcgggaggctatacaatcctacccatcacaagacaaacctctgcccccacctcccccaggttccttgagcaggacccaggagccatccctggggaaacagaaagttttcatcatccgcaagtccctgcttgatgagctgatggaggtgcagcatttccgcaccatctaccacatgttcatcgctggcctgtgtgtcttcatcatcagcaccctggccatcgacttcattgatgagggcaggctgctgctggagtttgacctactgatcttcagcttcggacagctgccattggcgctggtgacctgggtgcccatgtttctgtccaccctgttggcgccgtaccaggccctacggctgtgggccaggggcacctggacgcaggcgacgggcctgggctgtgcgctgctagccgcccacgccgtggtgctctgcgcgctgccggtccacgtggccgtggagcatcagctcccgccggcctcccgttgtgtcctggtcttcgagcaggttaggttcctgatgaaaagctactccttcctgagagaggctgtgcctgggacccttcgtgccagacgaggtgaggggatccaggcccccagtttctccagctacctctacttcctcttctgcccaacactcatctacagggagacttaccctaggccctgggatgtgtgctctatgcctgcttcatcctgggccgcctctgtgttcctgtctttgccaacatgagccgagagcccttcagcacccgtgccctggtgctctctatcctgcatgccacgttgccaggcatcttcatgctgctgctcatcttctttgccttcctccattgctggctcaacgcctttgccgagatgctacgatttggagacaggatgttctaccgggactggtggaactcaacgtccttctccaactactaccgcacttggaacgtggtggtccatgactggctgtacagctacgtgtatcaggatgggctgcggctccttggtgcccgggcccgaggggtagccatgctgggtgtgttcctggtctccgcagtggcccatgagtatatcttctgcttcgtcctggggttcttctatcccgtcatgctgatactcttccttgtcattggaggaatgttgaacttcatgatgcatgaccagcgcaccggcccggcatggaacgtgctgatgtggaccatgctgtttctaggccagggaatccaggtcagcctgtactgccaggagtggtacgcacggcggcactgccccttaccccaggcaactttctgggggctggtgacacctcgatcttggtcctgccatacctagaggtcgggacagacgacgctacctgcccagacaccaccaagttctctgcctgcaaaacctgggaccaggactcctgtctgcattcccaaatttggctctgagtcgaggcaacctgcacacaagaccccaccaaggaatgtgcaaggactgagatctgcagacttgtgggtaactgatcacagacctcagcatgggggtgaccagggtgactcttcaatccctatccc

SEQ ID NO: 186916 - DNA, 570 bp, Homo sapiens
  Payload ID: 16804
  Gene Symbol: SOAT2
  Gene Name: sterol O-acyltransferase 2
  ENST ID: ENST00000551896
  CDS Start-End: 61-570
actgcgaaggaaggaggcaacacgggcaagggctgcctgctgcccgctggagaccgcaccatggagccaggcggggcccgtctgcgtctgcagaggacagaagggctgggaggggagcgggagcgccaaccctgtggagatggaaacactgagacgcacagagccccggacttggtacaatggacccgacacatggaggctgtgaaggcacaattgctggagcaagcgcagggacaactgagggagctgctggatcgggccatgcgggaggctatacaatcctacccatcacaagacaaacctctgcccccacctcccccaggttccttgagcagtgagctgatggaggtgcagcatttccgcaccatctaccacatgttcatcgctggcctgtgtgtcttcatcatcagcaccctggccatcgacttcattgatgagggcaggctgctgctggagtttgacctactgatcttcagcttcggacagctgccattggcgctggtgacctgggtgcccatgtttctgtccaccctgttggcgccgtaccaggccctacggctgtgggccagg

SEQ ID NO: 186917 - DNA, 4178 bp, Homo sapiens
  Payload ID: 16805
  Gene Symbol: SREBF1
  Gene Name: sterol regulatory element binding transcription factor 1
  Uniprot ID: P36956
  ENST ID: ENST00000261646
  CDS Start-End: 186-3629
gcggccgggggaacccagtttccgaggaacttttcgccggcgccgggccgcctctgaggccagggcaggacacgaacgcgcggagcggcggcggcgactgagagccggggccgcggcggcgctccctaggaagggccgtacgaggcggcgggcccggcgggcctcccggaggaggcggctgcgccatggacgagccacccttcagcgaggcggctttggagcaggcgctgggcgagccgtgcgatctggacgcggcgctgctgaccgacatcgaagacatgcttcagcttatcaacaaccaagacagtgacttccctggcctatttgacccaccctatgctgggagtggggcagggggcacagaccctgccagccccgataccagctccccaggcagcttgtctccacctcctgccacattgagctcctctcttgaagccttcctgagcgggccgcaggcagcgccctcacccctgtcccctccccagcctgcacccactccattgaagatgtacccgtccatgcccgctttctcccctgggcctggtatcaaggaagagtcagtgccactgagcatcctgcagacccccaccccacagcccctgccaggggccctcctgccacagagcttcccagccccagccccaccgcagttcagctccacccctgtgttaggctaccccagccctccgggaggcttctctacaggaagccctcccgggaacacccagcagccgctgcctggcctgccactggcttccccgccaggggtcccgcccgtctccttgcacacccaggtccagagtgtggtcccccagcagctactgacagtcacagctgcccccacggcagcccctgtaacgaccactgtgacctcgcagatccagcaggtcccggtcctgctgcagccccacttcatcaaggcagactcgctgcttctgacagccatgaagacagacggagccactgtgaaggcggcaggtctcagtcccctggtctctggcaccactgtgcagacagggcctttgccgaccctggtgagtggcggaaccatcttggcaacagtcccactggtcgtagatgcggagaagctgcctatcaaccggctcgcagctggcagcaaggccccggcctctgcccagagccgtggagagaagcgcacagcccacaacgccattgagaagcgctaccgctcctccatcaatgacaaaatcattgagctcaaggatctggtggtgggcactgaggcaaagctgaataaatctgctgtcttgcgcaaggccatcgactacattcgctttctgcaacacagcaaccagaaactcaagcaggagaacctaagtctgcgcactgctgtccacaaaagcaaatctctgaaggatctggtgtcggcctgtggcagtggagggaacacagacgtgctcatggagggcgtgaagactgaggtggaggacacactgaccccacccccctcggatgctggctcacctttccagagcagccccttgtcccttggcagcaggggcagtggcagcggtggcagtggcagtgactcggagcctgacagcccagtctttgaggacagcaaggcaaagccagagcagcggccgtctctgcacagccggggcatgctggaccgctcccgcctggccctgtgcacgctcgtcttcctctgcctgtcctgcaaccccttggcctccttgctgggggcccgggggcttcccagcccctcagataccaccagcgtctaccatagccctgggcgcaacgtgctgggcaccgagagcagagatggccctggctgggcccagtggctgctgcccccagtggtctggctgctcaatgggctgttggtgctcgtctccttggtgcttctctttgtctacggtgagccagtcacacggccccactcaggccccgccgtgtacttctggaggcatcgcaagcaggctgacctggacctggcccggggagactttgcccaggctgcccagcagctgtggctggccctgcgggcactgggccggcccctgcccacctcccacctggacctggcttgtagcctcctctggaacctcatccgtcacctgctgcagcgtctctgggtgggccgctggctggcaggccgggcagggggcctgcagcaggactgtgctctgcgagtggatgctagcgccagcgcccgagacgcagccctggtctaccataagctgcaccagctgcacaccatggggaagcacacaggcgggcacctcactgccaccaacctggcgctgagtgccctgaacctggcagagtgtgcaggggatgccgtgtctgtggcgacgctggccgagatctatgtggcggctgcattgagagtgaagaccagtctcccacgggccttgcattttctgacacgcttcttcctgagcagtgcccgccaggcctgcctggcacagagtggctcagtgcctcctgccatgcagtggctctgccaccccgtgggccaccgtttcttcgtggatggggactggtccgtgctcagtaccccatgggagagcctgtacagcttggccgggaacccagtggaccccctggcccaggtgactcagctattccgggaacatctcttagagcgagcactgaactgtgtgacccagcccaaccccagccctgggtcagctgatggggacaaggaattctcggatgccctcgggtacctgcagctgctgaacagctgttctgatgctgcgggggctcctgcctacagcttctccatcagttccagcatggccaccaccaccggcgtagacccggtggccaagtggtgggcctctctgacagctgtggtgatccactggctgcggcgggatgaggaggcggctgagcggctgtgcccgctggtggagcacctgccccgggtgctgcaggagtctgagagacccctgcccagggcagctctgcactccttcaaggctgcccgggccctgctgggctgtgccaaggcagagtctggtccagccagcctgaccatctgtgagaaggccagtgggtacctgcaggacagcctggctaccacaccagccagcagctccattgacaaggccgtgcagctgttcctgtgtgacctgcttcttgtggtgcgcaccagcctgtggcggcagcagcagcccccggccccggccccagcagcccagggcaccagcagcaggccccaggcttccgcccttgagctgcgtggcttccaacgggacctgagcagcctgaggcggctggcacagagcttccggcccgccatgcggagggtgttcctacatgaggccacggcccggctgatggcgggggccagccccacacggacacaccagctcctcgaccgcagtctgaggcggcgggcaggccccggtggcaaaggaggcgcggtggcggagctggagccgcggcccacgcggcgggagcacgcggaggccttgctgctggcctcctgctacctgccccccggcttcctgtcggcgcccgggcagcgcgtgggcatgctggctgaggcggcgcgcacactcgagaagcttggcgatcgccggctgctgcacgactgtcagcagatgctcatgcgcctgggcggtgggaccactgtcacttccagctagaccccgtgtccccggcctcagcacccctgtctctagccactttggtcccgtgcagcttctgtcctgcgtcgaagctttgaaggccgaaggcagtgcaagagactctggcctccacagttcgacctgcggctgctgtgtgccttcgcggtggaaggcccgaggggcgcgatcttgaccctaagaccggcggccatgatggtgctgacctctggtggccgatcggggcactgcaggggccgagccattttggggggcccccctccttgctctgcaggcaccttagtggcttttttcctcctgtgtacagggaagagaggggtacatttccctgtgctgacggaagccaacttggctttcccggactgcaagcagggctctgccccagaggcctctctctccgtcgtgggagagagacgtgtacatagtgtaggtcagcgtgcttagcctcctgacctgaggctcctgtgctactttgccttttgcaaactttattttcatagattgagaagttttgtacagagaattaaaaatgaaattatttataatctg

SEQ ID NO: 186918 - DNA, 4253 bp, Homo sapiens
  Payload ID: 16805
  Gene Symbol: SREBF1
  Gene Name: sterol regulatory element binding transcription factor 1
  Uniprot ID: P36956
  ENST ID: ENST00000355815
  CDS Start-End: 171-3704
cagtttccgaggaacttttcgccggcgccgggccgcctctgaggccagggcaggacacgaacgcgcggagcggcggcggcgactgagagccggggccgcggcggcgctccctaggaagggccgtacgaggcggcgggcccggcgggcctcccggaggaggcggctgcgccatggacgagccacccttcagcgaggcggctttggagcaggcgctgggcgagccgtgcgatctggacgcggcgctgctgaccgacatcgaaggtgaagtcggcgcggggaggggtagggccaacggcctggacgccccaagggcgggcgcagatcgcggagccatggattgcactttcgaagacatgcttcagcttatcaacaaccaagacagtgacttccctggcctatttgacccaccctatgctgggagtggggcagggggcacagaccctgccagccccgataccagctccccaggcagcttgtctccacctcctgccacattgagctcctctcttgaagccttcctgagcgggccgcaggcagcgccctcacccctgtcccctccccagcctgcacccactccattgaagatgtacccgtccatgcccgctttctcccctgggcctggtatcaaggaagagtcagtgccactgagcatcctgcagacccccaccccacagcccctgccaggggccctcctgccacagagcttcccagccccagccccaccgcagttcagctccacccctgtgttaggctaccccagccctccgggaggcttctctacaggaagccctcccgggaacacccagcagccgctgcctggcctgccactggcttccccgccaggggtcccgcccgtctccttgcacacccaggtccagagtgtggtcccccagcagctactgacagtcacagctgcccccacggcagcccctgtaacgaccactgtgacctcgcagatccagcaggtcccggtcctgctgcagccccacttcatcaaggcagactcgctgcttctgacagccatgaagacagacggagccactgtgaaggcggcaggtctcagtcccctggtctctggcaccactgtgcagacagggcctttgccgaccctggtgagtggcggaaccatcttggcaacagtcccactggtcgtagatgcggagaagctgcctatcaaccggctcgcagctggcagcaaggccccggcctctgcccagagccgtggagagaagcgcacagcccacaacgccattgagaagcgctaccgctcctccatcaatgacaaaatcattgagctcaaggatctggtggtgggcactgaggcaaagctgaataaatctgctgtcttgcgcaaggccatcgactacattcgctttctgcaacacagcaaccagaaactcaagcaggagaacctaagtctgcgcactgctgtccacaaaagcaaatctctgaaggatctggtgtcggcctgtggcagtggagggaacacagacgtgctcatggagggcgtgaagactgaggtggaggacacactgaccccacccccctcggatgctggctcacctttccagagcagccccttgtcccttggcagcaggggcagtggcagcggtggcagtggcagtgactcggagcctgacagcccagtctttgaggacagcaaggcaaagccagagcagcggccgtctctgcacagccggggcatgctggaccgctcccgcctggccctgtgcacgctcgtcttcctctgcctgtcctgcaaccccttggcctccttgctgggggcccgggggcttcccagcccctcagataccaccagcgtctaccatagccctgggcgcaacgtgctgggcaccgagagcagagatggccctggctgggcccagtggctgctgcccccagtggtctggctgctcaatgggctgttggtgctcgtctccttggtgcttctctttgtctacggtgagccagtcacacggccccactcaggccccgccgtgtacttctggaggcatcgcaagcaggctgacctggacctggcccggggagactttgcccaggctgcccagcagctgtggctggccctgcgggcactgggccggcccctgcccacctcccacctggacctggcttgtagcctcctctggaacctcatccgtcacctgctgcagcgtctctgggtgggccgctggctggcaggccgggcagggggcctgcagcaggactgtgctctgcgagtggatgctagcgccagcgcccgagacgcagccctggtctaccataagctgcaccagctgcacaccatggggaagcacacaggcgggcacctcactgccaccaacctggcgctgagtgccctgaacctggcagagtgtgcaggggatgccgtgtctgtggcgacgctggccgagatctatgtggcggctgcattgagagtgaagaccagtctcccacgggccttgcattttctgacacgcttcttcctgagcagtgcccgccaggcctgcctggcacagagtggctcagtgcctcctgccatgcagtggctctgccaccccgtgggccaccgtttcttcgtggatggggactggtccgtgctcagtaccccatgggagagcctgtacagcttggccgggaacccagtggaccccctggcccaggtgactcagctattccgggaacatctcttagagcgagcactgaactgtgtgacccagcccaaccccagccctgggtcagctgatggggacaaggaattctcggatgccctcgggtacctgcagctgctgaacagctgttctgatgctgcgggggctcctgcctacagcttctccatcagttccagcatggccaccaccaccggcgtagacccggtggccaagtggtgggcctctctgacagctgtggtgatccactggctgcggcgggatgaggaggcggctgagcggctgtgcccgctggtggagcacctgccccgggtgctgcaggagtctgagagacccctgcccagggcagctctgcactccttcaaggctgcccgggccctgctgggctgtgccaaggcagagtctggtccagccagcctgaccatctgtgagaaggccagtgggtacctgcaggacagcctggctaccacaccagccagcagctccattgacaaggccgtgcagctgttcctgtgtgacctgcttcttgtggtgcgcaccagcctgtggcggcagcagcagcccccggccccggccccagcagcccagggcaccagcagcaggccccaggcttccgcccttgagctgcgtggcttccaacgggacctgagcagcctgaggcggctggcacagagcttccggcccgccatgcggagggtgttcctacatgaggccacggcccggctgatggcgggggccagccccacacggacacaccagctcctcgaccgcagtctgaggcggcgggcaggccccggtggcaaaggaggcgcggtggcggagctggagccgcggcccacgcggcgggagcacgcggaggccttgctgctggcctcctgctacctgccccccggcttcctgtcggcgcccgggcagcgcgtgggcatgctggctgaggcggcgcgcacactcgagaagcttggcgatcgccggctgctgcacgactgtcagcagatgctcatgcgcctgggcggtgggaccactgtcacttccagctagaccccgtgtccccggcctcagcacccctgtctctagccactttggtcccgtgcagcttctgtcctgcgtcgaagctttgaaggccgaaggcagtgcaagagactctggcctccacagttcgacctgcggctgctgtgtgccttcgcggtggaaggcccgaggggcgcgatcttgaccctaagaccggcggccatgatggtgctgacctctggtggccgatcggggcactgcaggggccgagccattttggggggcccccctccttgctctgcaggcaccttagtggcttttttcctcctgtgtacagggaagagaggggtacatttccctgtgctgacggaagccaacttggctttcccggactgcaagcagggctctgccccagaggcctctctctccgtcgtgggagagagacgtgtacatagtgtaggtcagcgtgcttagcctcctgacctgaggctcctgtgctactttgccttttgcaaactttattttcatagattgagaagttttgtacagagaattaaaaatgaaattatttataatctg

SEQ ID NO: 186919 - DNA, 4653 bp, Homo sapiens
  Payload ID: 16805
  Gene Symbol: SREBF1
  Gene Name: sterol regulatory element binding transcription factor 1
  ENST ID: ENST00000395751
  CDS Start-End: 1379-2029
agagctcaggctctgaagtctgcagtcttgggcccgaccctgggctcagccccagcctagctgtggggcaagattgtgagccttgtggtgcccaccttgtccaggtattgtgatgcactcgcagcagcaggcattgctttagacagcacaggtgctcgcaaaatggctgtatgtccgggaacaccagctcctgtgggtggctttctgtcctggtggcattgcccacacatacagctgtgtgccaacaagggttgtgcaaataaggttgtgtttggatgtgtgtgatgccctgtttgggggtcagtctctgcctcactcacgcaccctcttctccttttcacagacatgcttcagcttatcaacaaccaagacagtgacttccctggcctatttgacccaccctatgctgggagtggggcagggggcacagaccctgccagccccgataccagctccccaggcagcttgtctccacctcctgccacattgagctcctctcttgaagccttcctgagcgggccgcaggcagcgccctcacccctgtcccctccccagcctgcacccactccattgaagatgtacccgtccatgcccgctttctcccctgggcctggtatcaaggaagagtcagtgccactgagcatcctgcagacccccaccccacagcccctgccaggggccctcctgccacagagcttcccagccccagccccaccgcagttcagctccacccctgtgttaggctaccccagccctccgggaggcttctctacaggtaagggggatgtgtggcgggaggggacacccggggtggggcttccaggagcacaggaagaagcttctgctgtgatgtgagtagaggtctgtgcaggctttagaaactggggctccactcggctgcttgagatgccctgttactagcagtcctggtgtgcttgttgccggggtaggcgcaacctcgcactggaggcctggcttgaagccagtgcatttgcatcagagcccaggcagggactgtccataggaagccacatggggcaatgactcatccaaggccagtcggtgatagagacctgaagagcaggttgaaagtgggagagggaggtctgtgtctgcagccccatgctttatttctgcaggaagccctcccgggaacacccagcagccgctgcctggcctgccactggcttccccgccaggggtcccgcccgtctccttgcacacccaggtccagagtgtggtcccccagcagctactgacagtcacagctgcccccacggcagcccctgtaacgaccactgtgacctcgcagatccagcaggtcccggtcctgctgcagccccacttcatcaaggcagactcgctgcttctgacagccatgaagacagacggagccactgtgaaggcggcaggtctcagtcccctggtctctggcaccactgtgcagacagggcctttgccgaccctggtgagtggcggaaccatcttggcaacagtcccactggtcgtagatgcggagaagctgcctatcaaccggctcgcagctggcagcaaggccccggcctctgcccagagccgtggagagaagcgcacagcccacaacgccattgagaagcgctaccgctcctccatcaatgacaaaatcattgagctcaaggatctggtggtgggcactgaggcaaagctgaataaatctgctgtcttgcgcaaggccatcgactacattcgctttctgcaacacagcaaccagaaactcaagcaggagaacctaagtctgcgcactgctgtccacaaaagcaaatctctgaaggatctggtgtcggcctgtggcagtggagggaacacagacgtgctcatggagggcgtgaagactgaggtggaggacacactgaccccacccccctcggatgctggctcacctttccagagcagccccttgtcccttggcagcaggggcagtggcagcggtggcagtggcagtgactcggagcctgacagcccagtctttgaggacagcaagacagaataactgaggcctggagccacgtggggtcccacagtaaggcaaagccagagcagcggccgtctctgcacagccggggcatgctggaccgctcccgcctggccctgtgcacgctcgtcttcctctgcctgtcctgcaaccccttggcctccttgctgggggcccgggggcttcccagcccctcagataccaccagcgtctaccatagccctgggcgcaacgtgctgggcaccgagagcagagatggccctggctgggcccagtggctgctgcccccagtggtctggctgctcaatgggctgttggtgctcgtctccttggtgcttctctttgtctacggtgagccagtcacacggccccactcaggccccgccgtgtacttctggaggcatcgcaagcaggctgacctggacctggcccggggagactttgcccaggctgcccagcagctgtggctggccctgcgggcactgggccggcccctgcccacctcccacctggacctggcttgtagcctcctctggaacctcatccgtcacctgctgcagcgtctctgggtgggccgctggctggcaggccgggcagggggcctgcagcaggactgtgctctgcgagtggatgctagcgccagcgcccgagacgcagccctggtctaccataagctgcaccagctgcacaccatggggaagcacacaggcgggcacctcactgccaccaacctggcgctgagtgccctgaacctggcagagtgtgcaggggatgccgtgtctgtggcgacgctggccgagatctatgtggcggctgcattgagagtgaagaccagtctcccacgggccttgcattttctgacacgcttcttcctgagcagtgcccgccaggcctgcctggcacagagtggctcagtgcctcctgccatgcagtggctctgccaccccgtgggccaccgtttcttcgtggatggggactggtccgtgctcagtaccccatgggagagcctgtacagcttggccgggaacccagtggaccccctggcccaggtgactcagctattccgggaacatctcttagagcgagcactgaactgtgtgacccagcccaaccccagccctgggtcagctgatggggacaaggaattctcggatgccctcgggtacctgcagctgctgaacagctgttctgatgctgcgggggctcctgcctacagcttctccatcagttccagcatggccaccaccaccggcgtagacccggtggccaagtggtgggcctctctgacagctgtggtgatccactggctgcggcgggatgaggaggcggctgagcggctgtgcccgctggtggagcacctgccccgggtgctgcaggagtctgagagacccctgcccagggcagctctgcactccttcaaggctgcccgggccctgctgggctgtgccaaggcagagtctggtccagccagcctgaccatctgtgagaaggccagtgggtacctgcaggacagcctggctaccacaccagccagcagctccattgacaaggccgtgcagctgttcctgtgtgacctgcttcttgtggtgcgcaccagcctgtggcggcagcagcagcccccggccccggccccagcagcccagggcaccagcagcaggccccaggcttccgcccttgagctgcgtggcttccaacgggacctgagcagcctgaggcggctggcacagagcttccggcccgccatgcggagggtgttcctacatgaggccacggcccggctgatggcgggggccagccccacacggacacaccagctcctcgaccgcagtctgaggcggcgggcaggccccggtggcaaaggaggcgcggtggcggagctggagccgcggcccacgcggcgggagcacgcggaggccttgctgctggcctcctgctacctgccccccggcttcctgtcggcgcccgggcagcgcgtgggcatgctggctgaggcggcgcgcacactcgagaagcttggcgatcgccggctgctgcacgactgtcagcagatgctcatgcgcctgggcggtgggaccactgtcacttccagctagaccccgtgtccccggcctcagcacccctgtctctagccactttggtcccgtgcagcttctgtcctgcgtcgaagctttgaaggccgaaggcagtgcaagagactctggcctccacagttcgacctgcggctgctgtgtgccttcgcggtggaaggcccgaggggcgcgatcttgaccctaagaccggcggccatgatggtgctgacctctggtggccgatcggggcactgcaggggccgagccattttggggggcccccctccttgctctgcaggcaccttagtggcttttttcctcctgtgtacagggaagagaggggtacatttccctgtgctgacggaagccaacttggctttcccggactgcaagcagggctctgccccagaggcctctctctccgtcgtgggagagagacgtgtacatagtgtaggtcagcgtgcttagcctcctgacctgaggctcctgtgctactttgccttttgcaaactttattttcatagattgagaagttttgtacagagaattaaaaatgaaattatttataatctg

SEQ ID NO: 186920 - DNA, 3696 bp, Homo sapiens
  Payload ID: 16805
  Gene Symbol: SREBF1
  Gene Name: sterol regulatory element binding transcription factor 1
  ENST ID: ENST00000395757
  CDS Start-End: 466-3147
gttactagcagtcctggtgtgcttgttgccggggtaggcgcaacctcgcactggaggcctggcttgaagccagtgcatttgcatcagagcccaggcagggactgtccataggaagccacatggggcaatgactcatccaaggccagtcggtgatagagacctgaagagcaggttgaaagtgggagagggaggtctgtgtctgcagccccatgctttatttctgcaggaagccctcccgggaacacccagcagccgctgcctggcctgccactggcttccccgccaggggtcccgcccgtctccttgcacacccaggtccagagtgtggtcccccagcagctactgacagtcacagctgcccccacggcagcccctgtaacgaccactgtgacctcgcagatccagcaggtcccggtcctgctgcagccccacttcatcaaggcagactcgctgcttctgacagccatgaagacagacggagccactgtgaaggcggcaggtctcagtcccctggtctctggcaccactgtgcagacagggcctttgccgaccctggtgagtggcggaaccatcttggcaacagtcccactggtcgtagatgcggagaagctgcctatcaaccggctcgcagctggcagcaaggccccggcctctgcccagagccgtggagagaagcgcacagcccacaacgccattgagaagcgctaccgctcctccatcaatgacaaaatcattgagctcaaggatctggtggtgggcactgaggcaaagctgaataaatctgctgtcttgcgcaaggccatcgactacattcgctttctgcaacacagcaaccagaaactcaagcaggagaacctaagtctgcgcactgctgtccacaaaagcaaatctctgaaggatctggtgtcggcctgtggcagtggagggaacacagacgtgctcatggagggcgtgaagactgaggtggaggacacactgaccccacccccctcggatgctggctcacctttccagagcagccccttgtcccttggcagcaggggcagtggcagcggtggcagtggcagtgactcggagcctgacagcccagtctttgaggacagcaaggcaaagccagagcagcggccgtctctgcacagccggggcatgctggaccgctcccgcctggccctgtgcacgctcgtcttcctctgcctgtcctgcaaccccttggcctccttgctgggggcccgggggcttcccagcccctcagataccaccagcgtctaccatagccctgggcgcaacgtgctgggcaccgagagcagagatggccctggctgggcccagtggctgctgcccccagtggtctggctgctcaatgggctgttggtgctcgtctccttggtgcttctctttgtctacggtgagccagtcacacggccccactcaggccccgccgtgtacttctggaggcatcgcaagcaggctgacctggacctggcccggggagactttgcccaggctgcccagcagctgtggctggccctgcgggcactgggccggcccctgcccacctcccacctggacctggcttgtagcctcctctggaacctcatccgtcacctgctgcagcgtctctgggtgggccgctggctggcaggccgggcagggggcctgcagcaggactgtgctctgcgagtggatgctagcgccagcgcccgagacgcagccctggtctaccataagctgcaccagctgcacaccatggggaagcacacaggcgggcacctcactgccaccaacctggcgctgagtgccctgaacctggcagagtgtgcaggggatgccgtgtctgtggcgacgctggccgagatctatgtggcggctgcattgagagtgaagaccagtctcccacgggccttgcattttctgacacgcttcttcctgagcagtgcccgccaggcctgcctggcacagagtggctcagtgcctcctgccatgcagtggctctgccaccccgtgggccaccgtttcttcgtggatggggactggtccgtgctcagtaccccatgggagagcctgtacagcttggccgggaacccagtggaccccctggcccaggtgactcagctattccgggaacatctcttagagcgagcactgaactgtgtgacccagcccaaccccagccctgggtcagctgatggggacaaggaattctcggatgccctcgggtacctgcagctgctgaacagctgttctgatgctgcgggggctcctgcctacagcttctccatcagttccagcatggccaccaccaccggcgtagacccggtggccaagtggtgggcctctctgacagctgtggtgatccactggctgcggcgggatgaggaggcggctgagcggctgtgcccgctggtggagcacctgccccgggtgctgcaggagtctgagagacccctgcccagggcagctctgcactccttcaaggctgcccgggccctgctgggctgtgccaaggcagagtctggtccagccagcctgaccatctgtgagaaggccagtgggtacctgcaggacagcctggctaccacaccagccagcagctccattgacaaggccgtgcagctgttcctgtgtgacctgcttcttgtggtgcgcaccagcctgtggcggcagcagcagcccccggccccggccccagcagcccagggcaccagcagcaggccccaggcttccgcccttgagctgcgtggcttccaacgggacctgagcagcctgaggcggctggcacagagcttccggcccgccatgcggagggtgttcctacatgaggccacggcccggctgatggcgggggccagccccacacggacacaccagctcctcgaccgcagtctgaggcggcgggcaggccccggtggcaaaggaggcgcggtggcggagctggagccgcggcccacgcggcgggagcacgcggaggccttgctgctggcctcctgctacctgccccccggcttcctgtcggcgcccgggcagcgcgtgggcatgctggctgaggcggcgcgcacactcgagaagcttggcgatcgccggctgctgcacgactgtcagcagatgctcatgcgcctgggcggtgggaccactgtcacttccagctagaccccgtgtccccggcctcagcacccctgtctctagccactttggtcccgtgcagcttctgtcctgcgtcgaagctttgaaggccgaaggcagtgcaagagactctggcctccacagttcgacctgcggctgctgtgtgccttcgcggtggaaggcccgaggggcgcgatcttgaccctaagaccggcggccatgatggtgctgacctctggtggccgatcggggcactgcaggggccgagccattttggggggcccccctccttgctctgcaggcaccttagtggcttttttcctcctgtgtacagggaagagaggggtacatttccctgtgctgacggaagccaacttggctttcccggactgcaagcagggctctgccccagaggcctctctctccgtcgtgggagagagacgtgtacatagtgtaggtcagcgtgcttagcctcctgacctgaggctcctgtgctactttgccttttgcaaactttattttcatagattgagaagttttgtacagagaattaaaaatgaaattatttataatctg

SEQ ID NO: 186921 - DNA, 1058 bp, Homo sapiens
  Payload ID: 16805
  Gene Symbol: SREBF1
  Gene Name: sterol regulatory element binding transcription factor 1
  ENST ID: ENST00000423161
  CDS Start-End: 83-1058
cgccttgacaggtgaagtcggcgcggggaggggtagggccaacggcctggacgccccaagggcgggcgcagatcgcggagccatggattgcactttcgaagacatgcttcagcttatcaacaaccaagacagtgacttccctggcctatttgacccaccctatgctgggagtggggcagggggcacagaccctgccagccccgataccagctccccaggcagcttgtctccacctcctgccacattgagctcctctcttgaagccttcctgagcgggccgcaggcagcgccctcacccctgtcccctccccagcctgcacccactccattgaagatgtacccgtccatgcccgctttctcccctgggcctggtatcaaggaagagtcagtgccactgagcatcctgcagacccccaccccacagcccctgccaggggccctcctgccacagagcttcccagccccagccccaccgcagttcagctccacccctgtgttaggctaccccagccctccgggaggcttctctacaggaagccctcccgggaacacccagcagccgctgcctggcctgccactggcttccccgccaggggtcccgcccgtctccttgcacacccaggtccagagtgtggtcccccagcagctactgacagtcacagctgcccccacggcagcccctgtaacgaccactgtgacctcgcagatccagcaggtcctgctgcagccccacttcatcaaggcagactcgctgcttctgacagccatgaagacagacggagccactgtgaaggcggcaggtctcagtcccctggtctctggcaccactgtgcagacagggcctttgccgaccctggtgagtggcggaaccatcttggcaacagtcccactggtcgtagatgcggagaagctgcctatcaaccggctcgcagctggcagcaaggccccggcctctgcccagagccgtggagagaagcgcacagcccacaacgccattgagaagcgctaccgctcctccatcaatgacaaaatcattgagctcaaggatctggtggtgg

SEQ ID NO: 186922 - DNA, 536 bp, Homo sapiens
  Payload ID: 16805
  Gene Symbol: SREBF1
  Gene Name: sterol regulatory element binding transcription factor 1
  ENST ID: ENST00000577897
  CDS Start-End: 339-536
cttatcaacaaccaagacagtgacttccctggcctatttgacccaccctatgctgggagtggggcagggggcacagaccctgccagccccgataccagctccccaggcagcttgtctccacctcctgccacattgagctcctctcttgaagccttcctgagcgggccgcaggcagcgccctcacccctgtccagagtgtggtcccccagcagctactgacagtcacagctgcccccacggcagcccctgtaacgaccactgtgacctcgcagatccagcaggtcccggtcctgctgcagccccacttcatcaaggcagactcgctgcttctgacagccatgaagacagacggagccactgtgaaggcggcaggtctcagtcccctggtctctggcaccactgtgcagacagggcctttgccgaccctggtgagtggcggaaccatcttggcaacagtcccactggtcgtagatgcggagaagctgcctatcaaccggctcgcagctggcagcaaggccccggcctctgcccagagc

SEQ ID NO: 186923 - DNA, 882 bp, Homo sapiens
  Payload ID: 16805
  Gene Symbol: SREBF1
  Gene Name: sterol regulatory element binding transcription factor 1
  ENST ID: ENST00000478616
  CDS Start-End: 1-492
ggctgtgccaaggcagagtctggtccagccagcctgaccatctgtgagaaggccagtgggtacctgcaggacagcctggctaccacaccagccagcagctccattgacaaggccgtgcagctgttcctgtgtgacctgcttcttgtggtgcgcaccagcctgtggcggcagcagcagcccccggccccggccccagcagcccagggcaccagcagcaggccccaggcttccgcccttgagctgcgtggcttccaacgggacctgagcagcctgaggcggctggcacagagcttccggcccgccatgcggagggtgttcctacatgaggccacggcccggctgatggcgggggccagccccacacggacacaccagctcctcgaccgcagtctgaggcggcgggcaggccccggtggcaaaggaggtgagggggcagctgctgaccagggatgtgctgtctgctcagcagggaagggcgcacatgggatgtgataccaagggaggctgtgtgtgtgtcagacgggacagacaggcctggcgcagtggctcacacctagcactttgggaggctcagttgggaggacagcttgagcccaggagttggaggccgcagtgagcctgagtgacagggagagtccctgtctcaaaaaaaaaaaaagaccaagcatcttcttgatggttacctgatgacaattcctttcacaaggaatcagtggggtgactgtcatttgtgggatacatgactgcacgtgcgtgactcagtctgtggactttgtgtgtgggctgagactagggtggggagaggggaacccgccaggcccccgccaggtacctgtgtgccaggtacaggcggctggtgccgtggcttgtgtgtgggcaggg

SEQ ID NO: 186924 - DNA, 588 bp, Homo sapiens
  Payload ID: 16805
  Gene Symbol: SREBF1
  Gene Name: sterol regulatory element binding transcription factor 1
  ENST ID: ENST00000578469
  CDS Start-End: 1-95
gggccagccccacacggacacaccagctcctcgaccgcagtctgaggcggcgggcaggccccggtggcaaaggagctgatggatgtgctgactagtgagagtgcttgggccctcccccagcacctagggaaaggcttcccctccccctccggccacaaggtccctgggtggcacgggaggatggactgacttccaggacctgttgtgtgacaggagctacagcttgggtctccctgcaagaagtctggcacgtctcacctcccccatcccggcccctggtcatctcacagcaaagaagcctcctccctcccgacctgccgccacactggagagggggcacaggggcgggggaggtttcctgttctgtgaaaggccgactccctgactccattcatgcccccccccccagcccctcccttcattcccattccccaacctaaagcctggcccggctcccagctgaatctggtcggaatccacgggctgcagattttccaaaacaatcgttgtatctttattgacttttttttttttttttttctgaatgcaatgactgttttttactcttaaggaaaataaacatctttt

SEQ ID NO: 186925 - DNA, 473 bp, Homo sapiens
  Payload ID: 16805
  Gene Symbol: SREBF1
  Gene Name: sterol regulatory element binding transcription factor 1
  ENST ID: ENST00000486311
  CDS Start-End: 1-473
aaggctgcccgggccctgctgggctgtgccaaggcagagtctggtccagccagcctgaccatctgtgagaaggccagtgggtacctgcaggacagcctggctaccacaccagccagcagctccattgacaaggccgtgcagctgttcctgtgtgacctgcttcttgtggtgcgcaccagcctgtggcggcagcagcagcccccggccccggccccagcagcccagggcaccagcagcaggccccaggcttccgcccttgagctgcgtggcttccaacgggacctgagcagcctgaggcggctggcacagagcttccggcccgccatgcggagggcgcggtggcggagctggagccgcggcccacgcggcgggagcacgcggaggccttgctgctggcctcctgctacctgccccccggcttcctgtcggcgcccgggcagcgcgtgggcatgctggctgaggcggcgcgcaca

SEQ ID NO: 186926 - DNA, 1230 bp, Homo sapiens
  Payload ID: 16805
  Gene Symbol: SREBF1
  Gene Name: sterol regulatory element binding transcription factor 1
  ENST ID: ENST00000485080
  CDS Start-End: 1-333
gccgtgcagctgttcctgtgtgacctgcttcttgtggtgcgcaccagcctgtggcggcagcagcagcccccggccccggccccagcagcccagggcaccagcagcaggccccaggcttccgcccttgagctgcgtggcttccaacgggacctgagcagcctgaggcggctggcacagagcttccggcccgccatgcggagggtgttcctacatgaggccacggcccggctgatggcgggggccagccccacacggacacaccagctcctcgaccgcagtctgaggcggcgggcaggccccggtggcaaaggagctgatggatgtgctgactagtgagagtgcttgggccctcccccagcacctagggaaaggcttcccctccccctccggccacaaggagctacagcttgggtctccctgcaagaagtctggcacgtctcacctcccccatcccggcccctggtcatctcacagcaaagaagcctcctccctcccgacctgccgccacactggagagggggcacaggggcgggggaggtttcctgttctgtgaaaggccgactccctgactccattcatgcccccccccccagcccctcccttcattcccattccccaacctaaagcctggcccggctcccagctgaatctggtcggaatccacgggctgcagattttccaaaacaatcgttgtatctttattgacttttttttttttttttttctgaatgcaatgactgttttttactcttaaggaaaataaacatcttttagaaacagctcgatacacacaatcttcagtgtgaagcaatatactaataagaacactagtcgtcttaacatttacagtcttcatatatattatatatatgtatatgtatacatatatatacactatataacgaggccagatataatacacacgtttaccattttacagtcatatgtacaggaagttgctagggcggccctgggctgggggctgcgtcaggcctatcgaagcgtggacagagctgaggacacggacggacaggcggacggactggcagggactggcccgggccggtggtggctgcgtggacaagtggcgtcgcggtagccccttacccggcaaaggcttcctttctcccccgcctagtccacggagctaggagccgccctccgcctcttccagtactgtttcgacccccacccccaagcccagggctcccagctgcacgccacgaccga

SEQ ID NO: 186927 - DNA, 3026 bp, Homo sapiens
  Payload ID: 16805
  Gene Symbol: SREBF1
  Gene Name: sterol regulatory element binding transcription factor 1
  ENST ID: ENST00000395756
  CDS Start-End: 1-340
tctgcaacacagcaaccagaaactcaagcaggagaacctaagtctgcgcactgctgtccacaaaagcaaatctctgaaggatctggtgtcggcctgtggcagtggagggaacacagacgtgctcatggagggcgtgaagactgaggtggaggacacactgaccccacccccctcggatgctggctcacctttccagagcagccccttgtcccttggcagcaggggcagtggcagcggtggcagtggcagtgactcggagcctgacagcccagtctttgaggacagcaaggttgggccctgccacggtgcccccttccccactcccagccatatcctctgagcctcatgacagggccgggaagaccctaacagatcctacctcccatttcatagacagaataactgaggcctggagccacgtggggtcccacagtaaggcaaagccagagcagcggccgtctctgcacagccggggcatgctggaccgctcccgcctggccctgtgcacgctcgtcttcctctgcctgtcctgcaaccccttggcctccttgctgggggcccgggggcttcccagcccctcagataccaccagcgtctaccatagccctgggcgcaacgtgctgggcaccgagagcagagatggccctggctgggcccagtggctgctgcccccagtggtctggctgctcaatgggctgttggtgctcgtctccttggtgcttctctttgtctacggtgagccagtcacacggccccactcaggccccgccgtgtacttctggaggcatcgcaagcaggctgacctggacctggcccggggagactttgcccaggctgcccagcagctgtggctggccctgcgggcactgggccggcccctgcccacctcccacctggacctggcttgtagcctcctctggaacctcatccgtcacctgctgcagcgtctctgggtgggccgctggctggcaggccgggcagggggcctgcagcaggactgtgctctgcgagtggatgctagcgccagcgcccgagacgcagccctggtctaccataagctgcaccagctgcacaccatggggaagcacacaggcgggcacctcactgccaccaacctggcgctgagtgccctgaacctggcagagtgtgcaggggatgccgtgtctgtggcgacgctggccgagatctatgtggcggctgcattgagagtgaagaccagtctcccacgggccttgcattttctgacacgcttcttcctgagcagtgcccgccaggcctgcctggcacagagtggctcagtgcctcctgccatgcagtggctctgccaccccgtgggccaccgtttcttcgtggatggggactggtccgtgctcagtaccccatgggagagcctgtacagcttggccgggaacccagtggaccccctggcccaggtgactcagctattccgggaacatctcttagagcgagcactgaactgtgtgacccagcccaaccccagccctgggtcagctgatggggacaaggaattctcggatgccctcgggtacctgcagctgctgaacagctgttctgatgctgcgggggctcctgcctacagcttctccatcagttccagcatggccaccaccaccggcgtagacccggtggccaagtggtgggcctctctgacagctgtggtgatccactggctgcggcgggatgaggaggcggctgagcggctgtgcccgctggtggagcacctgccccgggtgctgcaggagtctgagagacccctgcccagggcagctctgcactccttcaaggctgcccgggccctgctgggctgtgccaaggcagagtctggtccagccagcctgaccatctgtgagaaggccagtgggtacctgcaggacagcctggctaccacaccagccagcagctccattgacaaggccgtgcagctgttcctgtgtgacctgcttcttgtggtgcgcaccagcctgtggcggcagcagcagcccccggccccggccccagcagcccagggcaccagcagcaggccccaggcttccgcccttgagctgcgtggcttccaacgggacctgagcagcctgaggcggctggcacagagcttccggcccgccatgcggagggtgttcctacatgaggccacggcccggctgatggcgggggccagccccacacggacacaccagctcctcgaccgcagtctgaggcggcgggcaggccccggtggcaaaggaggcgcggtggcggagctggagccgcggcccacgcggcgggagcacgcggaggccttgctgctggcctcctgctacctgccccccggcttcctgtcggcgcccgggcagcgcgtgggcatgctggctgaggcggcgcgcacactcgagaagcttggcgatcgccggctgctgcacgactgtcagcagatgctcatgcgcctgggcggtgggaccactgtcacttccagctagaccccgtgtccccggcctcagcacccctgtctctagccactttggtcccgtgcagcttctgtcctgcgtcgaagctttgaaggccgaaggcagtgcaagagactctggcctccacagttcgacctgcggctgctgtgtgccttcgcggtggaaggcccgaggggcgcgatcttgaccctaagaccggcggccatgatggtgctgacctctggtggccgatcggggcactgcaggggccgagccattttggggggcccccctccttgctctgcaggcaccttagtggcttttttcctcctgtgtacagggaagagaggggtacatttccctgtgctgacggaagccaacttggctttcccggactgcaagcagggctctgccccagaggcctctctctccgtcgtgggagagagacgtgtacatagtgtaggtcagcgtgcttagcctcctgacctgaggctcctgtgctactttgccttttgcaaactttattttcatagattgagaagttttgtacagagaattaaaaatgaaattatttataatctg

SEQ ID NO: 186928 - DNA, 5240 bp, Homo sapiens
  Payload ID: 16806
  Gene Symbol: SREBF2
  Gene Name: sterol regulatory element binding transcription factor 2
  Uniprot ID: Q12772
  ENST ID: ENST00000361204
  CDS Start-End: 167-3592
ctttctgtgcggcgcccgggcgcaacgcaaacatggcggcgggtggcacccgtcggtgaggcggtgccgggcgggggttgtcgggtgtcatgggcggtggcgacggcaccgcccccgcgtctccctgagcgggacggcagggggggcttctgcgctgagccgggcgatggacgacagcggcgagctgggtggtctggagaccatggagaccctcacggagctgggcgacgagctgaccctgggagacatcgacgagatgctgcaatttgtcagtaatcaagtgggagagttccctgacttgttttcagaacagctgtgtagctcctttcctggcagtggtggtagtggtagcagcagcggcagcagtggcagcagcagcagcagcagcaatggcaggggcagcagcagcggagctgtggacccttcagtgcaacggtcattcacccaggtcacattaccttccttctctccctcggcggcctccccacaggctccaactctgcaagtcaaggtttctcccacctcagttcccaccacacccagggcaactcctattcttcagccccgcccccagccccagcctcaacctcaaactcagctgcaacaacagacggtaatgatcacgccaacattcagcaccactccgcagacgaggatcatccagcagcctttgatataccagaatgcagctactagctttcaagtccttcagcctcaagtccaaagcctggtgacatcctcccaggtacagccggtcaccattcagcagcaggtgcagacagtacaggcccagcgggtgctgacacaaacggccaatggcacgctgcagacccttgccccggctacggtgcagacagttgctgcgccacaggtgcagcaggtcccggtcctggtccagcctcagatcatcaagacagattcccttgttttgaccacactgaagacagatggcagccctgttatggctgcggtccagaacccggccctcaccgccctcaccacccctatccagacggctgcccttcaagtaccaaccctggtgggcagcagtgggaccattctgaccacaatgcctgtaatgatggggcaagagaaagtgcccattaagcaggtacctgggggagtcaagcagcttgagccccccaaagaaggagaaaggcggacaacccataatatcattgagaaacgatatcgctcctccatcaatgacaaaatcatcgaattgaaagacctggtcatggggacagacgccaagatgcacaagtctggcgttctgaggaaggccattgattacatcaaatacttgcagcaggtcaatcataaactgcgccaggagaacatggtgctgaagctggcaaatcaaaagaacaagcttctaaagggcatcgacctaggcagtctggtggacaatgaggtggacctgaagatcgaggactttaatcagaatgtccttctgatgtcccccccagcctctgactcagggtcccaggctggcttctctccctactccattgactctgagccaggaagccctctattggatgatgcaaaggtcaaagatgagccagactctcctcctgtggcgctgggcatggtagaccgctcacggattcttctgtgtgtcctcaccttcctgtgcctctcctttaaccccctgacttccctgctgcagtggggaggggcccacgactctgaccagcacccacactcaggctctggccgcagtgtcctgtcattcgagtcaggttctgggggctggtttgactggatgatgcctactcttctcttatggctggtaaatggtgtgattgtcctgagcgtctttgtgaagctgctggttcatggggagccagtgatccggccacactcgcgctcctcggtcaccttctggaggcaccggaaacaggcagatctggatctcgccagaggagattttgcagctgctgccggcaacctacaaacctgcctggcagttttgggccgggcactgcccacctcccgcctggacctggcctgcagcctctcctggaacgtgatccgctacagcctgcagaagctacgcctggtgcgctggctgctcaagaaagtcttccagtgccggcgggccacgccagccactgaggcaggctttgaagacgaagctaagaccagcgcccgggatgcggctctggcctatcaccggctgcaccagctgcacatcacagggaagcttcctgcaggatccgcctgttccgatgtacacatggcgttgtgtgccgtgaacctggctgaatgtgcagaggagaagatcccaccgagcacactggttgagatccatctgactgctgccatggggctcaagacccggtgtggaggcaagctgggcttcctggccagctacttcctcagccgagcccagagcctgtgtggccccgagcacagtgctgttcctgactccctgcgctggctctgccaccccctgggccagaagtttttcatggagcggagctggtctgtgaagtcagctgccaaggagagtctatactgtgcccagaggaacccagctgaccccattgcgcaggtccaccaggccttctgcaagaacctgctggagcgagctatagagtccttggtgaaacctcaggccaagaagaaggctggagaccaggaagaagagagctgtgaattctccagtgctctggagtacttgaaattacttcattcttttgtggactctgtgggggttatgagccccccactctccaggagctccgtgctcaagtccgccctgggtccagacatcatctgtcggtggtggacgtctgcaatcactgtggccatcagctggctccagggagacgatgcagctgtgcgctctcattttaccaaagtggaacgcatccccaaggccctggaagtgacagagagccccctggtgaaggccatcttccatgcctgcagagccatgcatgcctcactccctgggaaagcagatgggcagcagagttccttctgccattgcgagagggccagtggccacctatggagcagcctcaacgtcagtggggccacctctgaccctgccctcaaccacgtggtccagctgctcacctgtgacctgctactgtcgctacggacagcgctctggcaaaaacaggccagtgccagccaggctgtgggggagacctaccacgcgtcaggcgctgaactggcgggcttccaacgggacctgggcagcctgcgcaggctggcacacagcttccgcccagcataccgcaaggtgttcctgcatgaagccaccgtgcgcctgatggcaggagccagccccacccgcacccaccagctgctggaacacagcctgcggcggcgcaccacgcagagcaccaagcacggagaggtggatgcctggcccggccagcgagagcgggccaccgccatcctgctggcctgccgccacctgcccctctccttcctctcctccccgggccagcgggcagtgctgctggccgaagctgcccgcaccctggagaaggtgggcgaccggcgctcctgcaacgactgccagcagatgattgttaagctgggtggtggcactgccattgccgcctcctgaccaccaggctcagcccacccctccacctctctctcgatttctctctctccccctcagcatcttcccgctgagagtggtggggaagagccttgtcttcttagctgtcacctgccgaggcttctgggccactcaggccagtgcacccctgggcagagccccttaaagctgctgtcactagatgcccatggtccagggcctggtgggcgtgagaggataggtggcagggcagaaactgggcagccctgacttgatagcagcagggggagctcccaagctgccaagcccctgcctccagccttcctgagtttctctctcctgaaccctactctctcctttttgcttcctcagtttttatcaggctttctctgggggacagcagtctctgagcaccagggagcagttgccctcaggcctgtgcccagcatgccctcccctttttatacgaatgttttctaccagtgtgcttgggtttgccatgatgcgaggctgagttgctgtagcgtcttgattctctccctgggtctgcgttccctcccctgggcctgactgagcctgctcattgtttttccctttattacacaggacagccaggggaggaggggggcccagccctgggaggctggtgggaggcagggggcaggcctgcggatgcatgaaataatgttggcattattttttaattttttaaaaaataaatggtatcttatttaattgtcctgttccttcccactccccgcctcctaggatgttagcccaagctcagggtaggcccagggggctgggagaaatgaagccacccatggggactggggaccaggggccttcagcatggcttctaggttccctcctccccctaccccatctcctacctccacagtacagactgtccccaacttaacagtggttcaacttaaaccatgtttcaactttacaattggtctgttggggtattaaatgaatttgtgacttaggatattttcatttatgatgggtttatcaggaagtaaccccatggtaagttgaggcatatctgtatatatttaaacctaattaattcttgagctgaaaataaataaaccaggatggcagggaccaacccctaatccctccccagcggcaagcccctcttttcagagtgggcagagggttgcctatggtgggcactaggaatgaggtcccctgcctcgatgcgggtcctaggagaaaaagtcctacttttctgggtccccaggtgcagcacctcccggagactgtttctcccatggcctcctgagtgatgggccctgcctccctgtgcctcatcctcaggctggttggagcagagggtgggcaggagccccagcacagactggggggtgctcacagcagggccaccttgatgcaggctggaatgttatccctggggtgtgcttggaccccacctgctttctttctctcctgcccctcccctactctcactgtaatttatggaccctgcccgcctgcgtgttgtgtgtatgtcctgtgccttttctcactattgtttgggtgtgggagggggtggtttttcactgaaaaggggggtacacctatagctttcttgatgttcaatcaatcagtcactgtgtcccagacatattcaataaacacagattggtaccacccagca

SEQ ID NO: 186929 - DNA, 5699 bp, Homo sapiens
  Payload ID: 16806
  Gene Symbol: SREBF2
  Gene Name: sterol regulatory element binding transcription factor 2
  ENST ID: ENST00000424354
  CDS Start-End: 108-2162
ggcggtgccgggcgggggttgtcgggtgtcatgggcggtggcgacggcaccgcccccgcgtctccctgagcgggacggcagggggggcttctgcgctgagccgggcgatggacgacagcggcgagctgggtggtctggagaccatggagaccctcacggagctgggcgacgagctgaccctgggagacatcgacgagatgctgcaatttgtcagtaatcaagtgggagagttccctgacttgttttcagaacagctgtgtagctcctttcctggcagtggtggtagtggtagcagcagcggcagcagtggcagcagcagcagcagcagcaatggcaggggcagcagcagcggagctgtggacccttcagtgcaacggtcattcacccaggtcacattaccttccttctctccctcggcggcctccccacaggctccaactctgcaagtcaaggtttctcccacctcagttcccaccacacccagggcaactcctattcttcagccccgcccccagccccagcctcaacctcaaactcagctgcaacaacagacggtaatgatcacgccaacattcagcaccactccgcagacgaggatcatccagcagcctttgatataccagaatgcagctactagctttcaagtccttcagcctcaagtccaaagcctggtgacatcctcccaggtacagccggtcaccattcagcagcaggtgcagacagtacaggcccagcgggtgctgacacaaacggccaatggcacgctgcagacccttgccccggctacggtgcagacagttgctgcgccacaggtgcagcaggtcccggtcctggtccagcctcagatcatcaagacagattcccttgttttgaccacactgaagacagatggcagccctgttatggctgcggtccagaacccggccctcaccgccctcaccacccctatccagacggctgcccttcaagtaccaaccctggtgggcagcagtgggaccattctgaccacaatgcctgtaatgatggggcaagagaaagtgcccattaagcaggtacctgggggagtcaagcagcttgagccccccaaagaaggagaaaggcggacaacccataatatcattgagaaacgatatcgctcctccatcaatgacaaaatcatcgaattgaaagacctggtcatggggacagacgccaagatgcacaagtctggcgttctgaggaaggccattgattacatcaaatacttgcagcaggtcaatcataaactgcgccaggagaacatggtgctgaagctggcaaatcaaaagaacaagcttctaaagggcatcgacctaggcagtctggtggacaatgaggtggacctgaagatcgaggactttaatcagaatgtccttctgatgtcccccccagcctctgactcagggtcccaggctggcttctctccctactccattgactctgagccaggaagccctctattggatgatgcaaaggtcaaagatgagccagactctcctcctgtggcgctgggcatggtagaccgctcacggattcttctgtgtgtcctcaccttcctgtgcctctcctttaaccccctgacttccctgctgcagtggggaggggcccacgactctgaccagcacccacactcaggctctggccgcagtgtcctgtcattcgagtcaggttctgggggctggtttgactggatgatgcctactcttctcttatggctggtaaatggtgtgattgtcctgagcgtctttgtgaagctgctggttcatggggagccagtgatccggccacactcgcgctcctcggtcaccttctggaggcaccggaaacaggcagatctggatctcgccagaggagtttacggaaaaaaatctggggcaactcacagcattgaggaagagttaaacatccacatttcaagaggaacaagaaccagaacactcctcagcagcaggagattttgcagctgctgccggcaacctacaaacctgcctggcagttttgggccgggcactgcccacctcccgcctggacctggcctgcagcctctcctggaacgtgatccgctacagcctgcagaagctacgcctggtgcgctggctgctcaagaaagtcttccagtgccggcgggccacgccagccactgaggcaggctttgaagacgaagctaagaccagcgcccgggatgcggctctggcctatcaccggctgcaccagctgcacatcacagggaagcttcctgcaggatccgcctgttccgatgtacacatggcgttgtgtgccgtgaacctggctgaatgtgcagaggagaagatcccaccgagcacactggttgagatccatctgactgctgccatggggctcaagacccggtgtggaggcaagctgggcttcctggccagctacttcctcagccgagcccagagcctgtgtggccccgagcacagtgctgttcctgactccctgcgctggctctgccaccccctgggccagaagtttttcatggagcggagctggtctgtgaagtcagctgccaaggagagtctatactgtgcccagaggaacccagctgaccccattgcgcaggtccaccaggccttctgcaagaacctgctggagcgagctatagagtccttggtgaaacctcaggccaagaagaaggctggagaccaggaagaagagagctgtgaattctccagtgctctggagtacttgaaattacttcattcttttgtggactctgtgggggttatgagccccccactctccaggagctccgtgctcaagtccgccctgggtccagacatcatctgtcggtggtggacgtctgcaatcactgtggccatcagctggctccagggagacgatgcagctgtgcgctctcattttaccaaagtggaacgcatccccaaggccctggaagtgacagaccacctccacccccaccatcaaccctggcaactttgtcctgtaactaaaatagcctttagcacatggcataaccggagagcttttgacattcctctttggagattcatgtctgcgtcttgggggcattcggcactagtgatgggcagccctgcctgctgactccccggctgtttctaattggatctgagtattctaagagaaactgtaaaatgctccaagacagaaaggccccacgaggtcctatccttagagccaaggctgtagcatttcctatcaagcagacccttaaccggcgcacaggaaggagctgagaagagtaaggaaactgaggcacacgttggaatgactatcttgggtggcttcttagcagcagacgtgatggtgaagcctgtgtctctgacttccagcattgaatgaaggagccccctggtgaaggccatcttccatgcctgcagagccatgcatgcctcactccctgggaaagcagatgggcagcagagttccttctgccattgcgagagggccagtggccacctatggagcagcctcaacgtcagtggggccacctctgaccctgccctcaaccacgtggtccagctgctcacctgtgacctgctactgtcgctacggacagcgctctggcaaaaacaggccagtgccagccaggctgtgggggagacctaccacgcgtcaggcgctgaactggcgggcttccaacgggacctgggcagcctgcgcaggctggcacacagcttccgcccagcataccgcaaggtgttcctgcatgaagccaccgtgcgcctgatggcaggagccagccccacccgcacccaccagctgctggaacacagcctgcggcggcgcaccacgcagagcaccaagcacggagaggtggatgcctggcccggccagcgagagcgggccaccgccatcctgctggcctgccgccacctgcccctctccttcctctcctccccgggccagcgggcagtgctgctggccgaagctgcccgcaccctggagaaggtgggcgaccggcgctcctgcaacgactgccagcagatgattgttaagctgggtggtggcactgccattgccgcctcctgaccaccaggctcagcccacccctccacctctctctcgatttctctctctccccctcagcatcttcccgctgagagtggtggggaagagccttgtcttcttagctgtcacctgccgaggcttctgggccactcaggccagtgcacccctgggcagagccccttaaagctgctgtcactagatgcccatggtccagggcctggtgggcgtgagaggataggtggcagggcagaaactgggcagccctgacttgatagcagcagggggagctcccaagctgccaagcccctgcctccagccttcctgagtttctctctcctgaaccctactctctcctttttgcttcctcagtttttatcaggctttctctgggggacagcagtctctgagcaccagggagcagttgccctcaggcctgtgcccagcatgccctcccctttttatacgaatgttttctaccagtgtgcttgggtttgccatgatgcgaggctgagttgctgtagcgtcttgattctctccctgggtctgcgttccctcccctgggcctgactgagcctgctcattgtttttccctttattacacaggacagccaggggaggaggggggcccagccctgggaggctggtgggaggcagggggcaggcctgcggatgcatgaaataatgttggcattattttttaattttttaaaaaataaatggtatcttatttaattgtcctgttccttcccactccccgcctcctaggatgttagcccaagctcagggtaggcccagggggctgggagaaatgaagccacccatggggactggggaccaggggccttcagcatggcttctaggttccctcctccccctaccccatctcctacctccacagtacagactgtccccaacttaacagtggttcaacttaaaccatgtttcaactttacaattggtctgttggggtattaaatgaatttgtgacttaggatattttcatttatgatgggtttatcaggaagtaaccccatggtaagttgaggcatatctgtatatatttaaacctaattaattcttgagctgaaaataaataaaccaggatggcagggaccaacccctaatccctccccagcggcaagcccctcttttcagagtgggcagagggttgcctatggtgggcactaggaatgaggtcccctgcctcgatgcgggtcctaggagaaaaagtcctacttttctgggtccccaggtgcagcacctcccggagactgtttctcccatggcctcctgagtgatgggccctgcctccctgtgcctcatcctcaggctggttggagcagagggtgggcaggagccccagcacagactggggggtgctcacagcagggccaccttgatgcaggctggaatgttatccctggggtgtgcttggaccccacctgctttctttctctcctgcccctcccctactctcactgtaatttatggaccctgcccgcctgcgtgttgtgtgtatgtcctgtgccttttctcactattgtttgggtgtgggagggggtggtttttcactgaaaaggggggtacacctatagctttcttgatgttcaatcaatcagtcactgtgtcccagacatattcaataaacacagattggtaccacccag

SEQ ID NO: 186930 - DNA, 770 bp, Homo sapiens
  Payload ID: 16806
  Gene Symbol: SREBF2
  Gene Name: sterol regulatory element binding transcription factor 2
  ENST ID: ENST00000435061
  CDS Start-End: 1-770
cgtctgcaatcactgtggccatcagctggctccagggagacgatgcagctgtgcgctctcattttaccaaagtggaacgcatccccaaggccctggaagtgacagagagccccctggtgaaggccatcttccatgcctgcagagccatgcatgcctcactccctgggaaagcagatgggcagcagagttccttctgccattgcgagagggccagtggccacctatggagcagcctcaacgtcagtggggccacctctgaccctgccctcaaccacgtggtccagctgctcacctgtgacctgctactgtcgctacggacagcgctctggcaaaaacaggccagtgccagccaggctgtgggggagacctaccacgcgtcaggcgctgaactggcgggcttccaacgggacctgggcagcctgcgcaggctggcacacagcttccgcccagcataccgcaaggcagcctccagggccttggggcttcacccagggcacttgtctaccagccccacgaggtgcgtccagggctttcttgtcaccagttgggaaaagcaggccttttgcctctctctcctctcatcctgctcctgctgttcagccaggtttcctgcctggctcagggtcagagtacgggacaacagaggttgcttttcaggggtgttcctgcatgaagccaccgtgcgcctgatggcaggagccagccccacccgcacccaccagctgctggaacacagcctgcggcggcgcaccacgcagagcaccaagcac

SEQ ID NO: 186931 - DNA, 5365 bp, Homo sapiens
  Payload ID: 16806
  Gene Symbol: SREBF2
  Gene Name: sterol regulatory element binding transcription factor 2
  ENST ID: ENST00000612482
  CDS Start-End: 283-2247
ctggggcgggggaatcccgccccgccctttctgtgcggcgcccgggcgcaacgcaaacatggcggcgggtggcacccgtcggtgaggcggtgccgggcgggggttgtcgggtgtcatgggcggtggcgacggcaccgcccccgcgtctccctgagcgggacggcagggggggcttctgcgctgagccgggcgatggacgacagcggcgagctgggtggtctggagaccatggagaccctcacggagctgggcgacgagctgaccctgggagacatcgacgagatgctgcaatttgtcagtaatcaagtgggagagttccctgacttgttttcagaacagctgtgtagctcctttcctggcagtggtggtagtggtagcagcagcggcagcagtggcagcagcagcagcagcagcaatggcaggggcagcagcagcggagctgtggacccttcagtgcaacggtcattcacccaggtcacattaccttccttctctccctcggcggcctccccacaggctccaactctgcaagtcaaggtttctcccacctcagttcccaccacacccagggcaactcctattcttcagccccgcccccagccccagcctcaacctcaaactcagctgcaacaacagacggtaatgatcacgccaacattcagcaccactccgcagacgaggatcatccagcagcctttgatataccagaatgcagctactagctttcaagtccttcagcctcaagtccaaagcctggtgacatcctcccaggtacagccggtcaccattcagcagcaggtgcagacagtacaggcccagcgggtgctgacacaaacggccaatggcacgctgcagacccttgccccggctacggtgcagacagttgctgcgccacaggtgcagcaggtcccggtcctggtccagcctcagatcatcaagacagattcccttgttttgaccacactgaagacagatggcagccctgttatggctgcggtccagaacccggccctcaccgccctcaccacccctatccagacggctgcccttcaagtaccaaccctggtgggcagcagtgggaccattctgaccacaatgcctgtaatgatggggcaagagaaagtgcccattaagcaggtacctgggggagtcaagcagcttgagccccccaaagaaggagaaaggcggacaacccataatatcattgagaaacgatatcgctcctccatcaatgacaaaatcatcgaattgaaagacctggtcatggggacagacgccaagatgcacaagtctggcgttctgaggaaggccattgattacatcaaatacttgcagcaggtcaatcataaactgcgccaggagaacatggtgctgaagctggcaaatcaaaagaacaagcttctaaagggcatcgacctaggcagtctggtggacaatgaggtggacctgaagatcgaggactttaatcagaatgtccttctgatgtcccccccagcctctgactcagggtcccaggctggcttctctccctactccattgactctgagccaggaagccctctattggatgatgcaaaggtcaaagatgagccagactctcctcctgtggcgctgggcatggtagaccgctcacggattcttctgtgtgtcctcaccttcctgtgcctctcctttaaccccctgacttccctgctgcagtggggaggggcccacgactctgaccagcacccacactcaggctctggccgcagtgtcctgtcattcgagtcaggttctgggggctggtttgactggatgatgcctactcttctcttatggctggtaaatggtgtgattgtcctgagcgtctttgtgaagctgctggttcatggggagccagtgatccggccacactcgcgctcctcggtcaccttctggaggcaccggaaacaggcagatctggatctcgccagaggagtttacggaaaaaaatctggggcaactcacagcattgaggaagagttaaacatccacatttcaagaggaacaagaaccagaacactcctcagcagcaggagattttgcagctgctgccggcaacctacaaacctgcctggcagttttgggccgggcactgcccacctcccgcctggacctggcctgcagcctctcctggaacgtgatccgctacagcctgcagaagctacgcctggtgcgctggctgctcaagaaagtcttccagtgccggcgggccacgccagccactgaggcaggctttgaagacgaagctaagaccagcgcccgggatgcggctctggcctatcaccggctgcaccagctgcacatcacagggaagcttcctgcaggatccgcctgttccgatgtacacatggcgttgtgtgccgtgaacctggctgaatgtgcagaggagaagatcccaccgagcacactggttgagatccatctgactgctgccatggggctcaagacccggtgtggaggcaagctgggcttcctggccagctacttcctcagccgagcccagagcctgtgtggccccgagcacagtgctgttcctgactccctgcgctggctctgccaccccctgggccagaagtttttcatggagcggagctggtctgtgaagtcagctgccaaggagagtctatactgtgcccagaggaacccagctgaccccattgcgcaggtccaccaggccttctgcaagaacctgctggagcgagctatagagtccttggtgaaacctcaggccaagaagaaggctggagaccaggaagaagagagctgtgaattctccagtgctctggagtacttgaaattacttcattcttttgtggactctgtgggggttatgagccccccactctccaggagctccgtgctcaagtccgccctgggtccagacatcatctgtcggtggtggacgtctgcaatcactgtggccatcagctggctccagggagacgatgcagctgtgcgctctcattttaccaaagtggaacgcatccccaaggccctggaagtgacagagagccccctggtgaaggccatcttccatgcctgcagagccatgcatgcctcactccctgggaaagcagatgggcagcagagttccttctgccattgcgagagggccagtggccacctatggagcagcctcaacgtcagtggggccacctctgaccctgccctcaaccacgtggtccagctgctcacctgtgacctgctactgtcgctacggacagcgctctggcaaaaacaggccagtgccagccaggctgtgggggagacctaccacgcgtcaggcgctgaactggcgggcttccaacgggacctgggcagcctgcgcaggctggcacacagcttccgcccagcataccgcaaggtgttcctgcatgaagccaccgtgcgcctgatggcaggagccagccccacccgcacccaccagctgctggaacacagcctgcggcggcgcaccacgcagagcaccaagcacggagaggtggatgcctggcccggccagcgagagcgggccaccgccatcctgctggcctgccgccacctgcccctctccttcctctcctccccgggccagcgggcagtgctgctggccgaagctgcccgcaccctggagaaggtgggcgaccggcgctcctgcaacgactgccagcagatgattgttaagctgggtggtggcactgccattgccgcctcctgaccaccaggctcagcccacccctccacctctctctcgatttctctctctccccctcagcatcttcccgctgagagtggtggggaagagccttgtcttcttagctgtcacctgccgaggcttctgggccactcaggccagtgcacccctgggcagagccccttaaagctgctgtcactagatgcccatggtccagggcctggtgggcgtgagaggataggtggcagggcagaaactgggcagccctgacttgatagcagcagggggagctcccaagctgccaagcccctgcctccagccttcctgagtttctctctcctgaaccctactctctcctttttgcttcctcagtttttatcaggctttctctgggggacagcagtctctgagcaccagggagcagttgccctcaggcctgtgcccagcatgccctcccctttttatacgaatgttttctaccagtgtgcttgggtttgccatgatgcgaggctgagttgctgtagcgtcttgattctctccctgggtctgcgttccctcccctgggcctgactgagcctgctcattgtttttccctttattacacaggacagccaggggaggaggggggcccagccctgggaggctggtgggaggcagggggcaggcctgcggatgcatgaaataatgttggcattattttttaattttttaaaaaataaatggtatcttatttaattgtcctgttccttcccactccccgcctcctaggatgttagcccaagctcagggtaggcccagggggctgggagaaatgaagccacccatggggactggggaccaggggccttcagcatggcttctaggttccctcctccccctaccccatctcctacctccacagtacagactgtccccaacttaacagtggttcaacttaaaccatgtttcaactttacaattggtctgttggggtattaaatgaatttgtgacttaggatattttcatttatgatgggtttatcaggaagtaaccccatggtaagttgaggcatatctgtatatatttaaacctaattaattcttgagctgaaaataaataaaccaggatggcagggaccaacccctaatccctccccagcggcaagcccctcttttcagagtgggcagagggttgcctatggtgggcactaggaatgaggtcccctgcctcgatgcgggtcctaggagaaaaagtcctacttttctgggtccccaggtgcagcacctcccggagactgtttctcccatggcctcctgagtgatgggccctgcctccctgtgcctcatcctcaggctggttggagcagagggtgggcaggagccccagcacagactggggggtgctcacagcagggccaccttgatgcaggctggaatgttatccctggggtgtgcttggaccccacctgctttctttctctcctgcccctcccctactctcactgtaatttatggaccctgcccgcctgcgtgttgtgtgtatgtcctgtgccttttctcactattgtttgggtgtgggagggggtggtttttcactgaaaaggggggtacacctatagctttcttgatgttcaatcaatcagtcactgtgtcccagacatattcaataaacacagattggtaccacccagc

SEQ ID NO: 186932 - DNA, 2456 bp, Homo sapiens
  Payload ID: 16807
  Gene Symbol: SC5D
  Gene Name: sterol-C5-desaturase
  Uniprot ID: O75845
  ENST ID: ENST00000264027
  CDS Start-End: 375-1274
atgtttgtataaacaccgtaaacctgcctggtaccaccatgaatgacacaagagctagtttaaaaagaaagcaaagaaacaaacgcaaaacccgaaaccgcatcctccaccgcaaaggtactcggatggggcgcccgccctccccttagtcagaggacaaagggggcgtggccgagcgcgcggcgcccacgtgaccgcggagagctgcgcgcaggcccttcgcgcgatctgccgtcatatcagcttatggcgccggtcgctgattggctggccgctccagcctcccggcccgcttgctggctgcccagctgctaggacagtttgcagagcagtggcgtgcggagcggcggcggaccacctccaggggctaagtgatggatcttgtactccgtgttgcagattactatttttttacaccatacgtgtatccagccacatggccagaagatgacatcttccgacaagctattagtcttctgattgtaacaaatgttggtgcttacatcctttatttcttctgtgcaacactgagctattattttgtcttcgatcatgcattaatgaaacatccacaatttttaaagaatcaagtccgtcgagagattaagtttactgtccaggcattgccatggataagtattcttactgttgcactgttcttgctggagataagaggttacagcaaattacatgatgacctaggagagtttccatatggattgtttgaacttgtcgttagtataatatctttcctctttttcactgacatgttcatctactggattcacagaggccttcatcatagactggtatataagcgcctacataaacctcaccatatttggaagattcctactccatttgcaagtcatgcttttcaccctattgatggctttcttcagagtctaccttaccatatatacccttttatctttccattacacaaggtggtttatttaagtctgtacatcttggttaatatctggacaatttccattcatgacggtgattttcgtgtcccccaaatcttacagccatttattaatggctcagctcatcatacagaccaccatatgttctttgactataattatggacaatatttcactttgtgggataggattggcggctcattcaaaaatccttcatcctttgaggggaagggaccgctcagttatgtgaaggagatgacagagggaaagcgcagcagccattcaggaaatggctgtaagaatgaaaaattattcaatggagagtttacaaagactgaatagattattgcccagttattcttaagtaaggacaaagaaggaaatatcatcgtatttcttttttttaataaggaaaaaataatatccatacagtcaagatacatagtaaatggtatcatttggaaatcagcatcgtgggcactgctgaggaatgatcctagtggtaggtcagaagaagatgctgtgaacaccaggactttaatcttatgcttaaaatgccagatgttgttcgggggacaacttgtatctttctagcagcagatctgtagtttgtatagcctcaacaacaattttaaataagatggagaataaattattgaggggactaggctatatgcatttgccttcatccacccatgtttattaagaatcattgtgcttaataataccaagactaagcaccataaccaagaaatactaatgtaaagattgtttcttgtttcaggaatggttaattcttcaacgttggtatgataatgataacttgttttgacttgaataaagtactacatcagtgtggaaaaaaattctgatacattagcagctatgtaaatgacctaattgatagcaggtgtaataagactatcgtcttcctacacataggaggctcattctctggacacactatcacctattacattttactgattaacaaataaattggaatttaaaaatatcgatatcaccatgatttaatccagatctgggattatgtagctaaacattgtgatgattattatttaaaaccattatttaataagagtaaaaatatgtgaatctggatatatttaaaaaaagaaatttgatgcccagataatatattaggcactactgattttttagttaaattgatgcactacacttttgatgtttgaagttacaaacctgtaatttttttgtaaaggaaataattgccaaatacctaggcccattgctgacgattagttctaaaatcttattcctcctcttctcccctcacttttccctacttcctctgcaaaaagatttaacaaatacattcataaggaaatgtgtgttgtaacaaatatattgcaaaaacatagtttgtaaaggcattctataagctatttatgtaaaatcaataaaagttgatcataattaaactgtatcagttgagtattatagcagcacaaagtattctttgtacagattttgtgccaattt

SEQ ID NO: 186933 - DNA, 2258 bp, Homo sapiens
  Payload ID: 16807
  Gene Symbol: SC5D
  Gene Name: sterol-C5-desaturase
  Uniprot ID: O75845
  ENST ID: ENST00000392789
  CDS Start-End: 238-1137
tacacctgagcgggctgggccggggggcgatggaataaaagaagatggagagacttcagcgcctgggactcgggtgggcgaggcggaaggtgtcctcgcagcacggcttttctccgcgccgcggttggttagcgagtgccctctgggtgctaggcgttgggcggatggtaggatcgcggtagcatacggatccgagtcctgcgccgagtgagaggagaggctggcaggggctaagtgatggatcttgtactccgtgttgcagattactatttttttacaccatacgtgtatccagccacatggccagaagatgacatcttccgacaagctattagtcttctgattgtaacaaatgttggtgcttacatcctttatttcttctgtgcaacactgagctattattttgtcttcgatcatgcattaatgaaacatccacaatttttaaagaatcaagtccgtcgagagattaagtttactgtccaggcattgccatggataagtattcttactgttgcactgttcttgctggagataagaggttacagcaaattacatgatgacctaggagagtttccatatggattgtttgaacttgtcgttagtataatatctttcctctttttcactgacatgttcatctactggattcacagaggccttcatcatagactggtatataagcgcctacataaacctcaccatatttggaagattcctactccatttgcaagtcatgcttttcaccctattgatggctttcttcagagtctaccttaccatatatacccttttatctttccattacacaaggtggtttatttaagtctgtacatcttggttaatatctggacaatttccattcatgacggtgattttcgtgtcccccaaatcttacagccatttattaatggctcagctcatcatacagaccaccatatgttctttgactataattatggacaatatttcactttgtgggataggattggcggctcattcaaaaatccttcatcctttgaggggaagggaccgctcagttatgtgaaggagatgacagagggaaagcgcagcagccattcaggaaatggctgtaagaatgaaaaattattcaatggagagtttacaaagactgaatagattattgcccagttattcttaagtaaggacaaagaaggaaatatcatcgtatttcttttttttaataaggaaaaaataatatccatacagtcaagatacatagtaaatggtatcatttggaaatcagcatcgtgggcactgctgaggaatgatcctagtggtaggtcagaagaagatgctgtgaacaccaggactttaatcttatgcttaaaatgccagatgttgttcgggggacaacttgtatctttctagcagcagatctgtagtttgtatagcctcaacaacaattttaaataagatggagaataaattattgaggggactaggctatatgcatttgccttcatccacccatgtttattaagaatcattgtgcttaataataccaagactaagcaccataaccaagaaatactaatgtaaagattgtttcttgtttcaggaatggttaattcttcaacgttggtatgataatgataacttgttttgacttgaataaagtactacatcagtgtggaaaaaaattctgatacattagcagctatgtaaatgacctaattgatagcaggtgtaataagactatcgtcttcctacacataggaggctcattctctggacacactatcacctattacattttactgattaacaaataaattggaatttaaaaatatcgatatcaccatgatttaatccagatctgggattatgtagctaaacattgtgatgattattatttaaaaccattatttaataagagtaaaaatatgtgaatctggatatatttaaaaaaagaaatttgatgcccagataatatattaggcactactgattttttagttaaattgatgcactacacttttgatgtttgaagttacaaacctgtaatttttttgtaaaggaaataattgccaaatacctaggcccattgctgacgattagttctaaaatcttattcctcctcttctcccctcacttttccctacttcctctgcaaaaagatttaacaaatacattcataaggaaatgtgtgttgtaacaaatatattgcaaaaacatagtttgtaaaggcattctataagctatttatgtaaaatcaataaaagttgatcataattaaa

SEQ ID NO: 186934 - DNA, 1861 bp, Homo sapiens
  Payload ID: 16807
  Gene Symbol: SC5D
  Gene Name: sterol-C5-desaturase
  ENST ID: ENST00000534230
  CDS Start-End: 57-743
agtttgcagagcagtggcgtgcggagcggcggcggaccacctccaggggctaagtgatggatcttgtactccgtgttgcagattactatttttttacaccatacgtgtatccagccacatggccagaagatgacatcttccgacaagctattagtcttctgattgtaacaaatgttggtgcttacatcctttatttcttctgtgcaacactgagctattattttgtcttcgatcatgcattaatgaaacatccacaatttttaaagaatcaagtccgtcgagagattaagtttactgtccaggcattgccatggataagtattcttactgttgcactgttcttgctggagataagaggttacagcaaattacatgatgacctaggagagtttccatatggattgtttgaacttgtcgttagtataatatctttcctctttttcactgacatgttcatctactggattcacagaggccttcatcatagactggtatataagcgcctacataaacctcaccatatttggaagattcctactccatttgcaagtcatgcttttcaccctattgatggctttcttcagagtctaccttaccatatatacccttttatctttccattacacaaggtggtttatttaagtctgtacatcttggttaatatctggacaatttccattcatgacggaaatggctgtaagaatgaaaaattattcaatggagagtttacaaagactgaatagattattgcccagttattcttaagtaaggacaaagaaggaaatatcatcgtatttcttttttttaataaggaaaaaataatatccatacagtcaagatacatagtaaatggtatcatttggaaatcagcatcgtgggcactgctgaggaatgatcctagtggtaggtcagaagaagatgctgtgaacaccaggactttaatcttatgcttaaaatgccagatgttgttcgggggacaacttgtatctttctagcagcagatctgtagtttgtatagcctcaacaacaattttaaataagatggagaataaattattgaggggactaggctatatgcatttgccttcatccacccatgtttattaagaatcattgtgcttaataataccaagactaagcaccataaccaagaaatactaatgtaaagattgtttcttgtttcaggaatggttaattcttcaacgttggtatgataatgataacttgttttgacttgaataaagtactacatcagtgtggaaaaaaattctgatacattagcagctatgtaaatgacctaattgatagcaggtgtaataagactatcgtcttcctacacataggaggctcattctctggacacactatcacctattacattttactgattaacaaataaattggaatttaaaaatatcgatatcaccatgatttaatccagatctgggattatgtagctaaacattgtgatgattattatttaaaaccattatttaataagagtaaaaatatgtgaatctggatatatttaaaaaaagaaatttgatgcccagataatatattaggcactactgattttttagttaaattgatgcactacacttttgatgtttgaagttacaaacctgtaatttttttgtaaaggaaataattgccaaatacctaggcccattgctgacgattagttctaaaatcttattcctcctcttctcccctcacttttccctacttcctctgcaaaaagatttaacaaatacattcataaggaaatgtgtgttgtaacaaatatattgcaaaaacatagtttgtaaaggcattctataagctatttatgtaaaatcaataaaagttgatcataatt

SEQ ID NO: 186935 - DNA, 589 bp, Homo sapiens
  Payload ID: 16807
  Gene Symbol: SC5D
  Gene Name: sterol-C5-desaturase
  ENST ID: ENST00000527762
  CDS Start-End: 57-589
agtttgcagagcagtggcgtgcggagcggcggcggaccacctccaggggctaagtgatggatcttgtactccgtgttgcagattactatttttttacaccatacgtgtatccagccacatggccagaagatgacatcttccgacaagctattagtcttctgattgtaacaaatgttggtgcttacatcctttatttcttctgtgcaacactgagctattattttgtcttcgatcatgcattaatgaaacatccacaatttttaaagtattggaaatttcactttcagaatcaagtccgtcgagagattaagtttactgtccaggcattgccatggataagtattcttactgttgcactgttcttgctggagataagaggttacagcaaattacatgatgacctaggagagtttccatatggattgtttgaacttgtcgttagtataatatctttcctctttttcactgacatgttcatctactggattcacagaggccttcatcatagactggtatataagcgcctacataaacctcaccatatttggaagattcctactccatttgcaagtcatgcttttcaccctat

SEQ ID NO: 186936 - DNA, 751 bp, Homo sapiens
  Payload ID: 16808
  Gene Symbol: STRA13
  Gene Name: stimulated by retinoic acid 13
  Uniprot ID: A8MT69
  ENST ID: ENST00000306704
  CDS Start-End: 58-249
ctcattggctggaggcgcggggcggggttccggtgggcgcgcgttgaggctgcggtcatggagggagcaggagctggatccggcttccggaaggagctggtgagcaggctgctgcacctgcacttcaaggatgacaagaccaaagaagcagcagtccgcggcgtgcggcaggcccaggcagaagacgcgctccgtgtggacgtggaccagctggagaaggtgcttccgcagctgctcctggacttctagggatctcagccgtggctgaggccacccccagaggagcccctggtccacagaagcaggccttgtgtttccagcggcctctgataagaggcagggaaggacctgaaggatttggagttgattcaaacaagatctctgggagtctccagcctgtgcagaaggggcaggactgcagtgcactgcgggccttggagtgtccagtggggacactggtgtgggaaggggcagcacctggggagtccctgcctctcctccctgggacaatagtgtgcatgccacccggggtcctacaggcaggtgctgggaaaggcctggccagcaggtagcctgtgtgtttgacaaacagcagctggcagcgctgcctcctgcccacattcctgccacccgacatcaaagctggcgtgtgacctttccagccatgcgatattccccttggaagatgcttccccaggctataaatttgttctcacaaagcaacatcaataaatcaaaactgtctctccca

SEQ ID NO: 186937 - DNA, 805 bp, Homo sapiens
  Payload ID: 16808
  Gene Symbol: STRA13
  Gene Name: stimulated by retinoic acid 13
  Uniprot ID: A8MT69
  ENST ID: ENST00000392359
  CDS Start-End: 58-303
ctcattggctggaggcgcggggcggggttccggtgggcgcgcgttgaggctgcggtcatggagggagcaggagctggatccggcttccggaaggagctggtgagcaggctgctgcacctgcacttcaaggatgacaagaccaaagtgagcggggacgcgctgcagctcatggtggagttgctgaaggtcttcgttgtggaagcagcagtccgcggcgtgcggcaggcccaggcagaagacgcgctccgtgtggacgtggaccagctggagaaggtgcttccgcagctgctcctggacttctagggatctcagccgtggctgaggccacccccagaggagcccctggtccacagaagcaggccttgtgtttccagcggcctctgataagaggcagggaaggacctgaaggatttggagttgattcaaacaagatctctgggagtctccagcctgtgcagaaggggcaggactgcagtgcactgcgggccttggagtgtccagtggggacactggtgtgggaaggggcagcacctggggagtccctgcctctcctccctgggacaatagtgtgcatgccacccggggtcctacaggcaggtgctgggaaaggcctggccagcaggtagcctgtgtgtttgacaaacagcagctggcagcgctgcctcctgcccacattcctgccacccgacatcaaagctggcgtgtgacctttccagccatgcgatattccccttggaagatgcttccccaggctataaatttgttctcacaaagcaacatcaataaatcaaaactgtctctccca

SEQ ID NO: 186938 - DNA, 710 bp, Homo sapiens
  Payload ID: 16808
  Gene Symbol: STRA13
  Gene Name: stimulated by retinoic acid 13
  Uniprot ID: A8MT69
  ENST ID: ENST00000580435
  CDS Start-End: 32-208
gttccggtgggcgcgcgttgaggctgcggtcatggagggagcaggagctggatccggcttccggaaggagctggtgagcaggctgctgcacctgcacttcaaggatgacaagaccaaagaagcagcagtccgcggcgtgcggcaggcccaggcagaagacgcgctccgtgtggacgtggaccagctggagaagctcctggacttctagggatctcagccgtggctgaggccacccccagaggagcccctggtccacagaagcaggccttgtgtttccagcggcctctgataagaggcagggaaggacctgaaggatttggagttgattcaaacaagatctctgggagtctccagcctgtgcagaaggggcaggactgcagtgcactgcgggccttggagtgtccagtggggacactggtgtgggaaggggcagcacctggggagtccctgcctctcctccctgggacaatagtgtgcatgccacccggggtcctacaggcaggtgctgggaaaggcctggccagcaggtagcctgtgtgtttgacaaacagcagctggcagcgctgcctcctgcccacattcctgccacccgacatcaaagctggcgtgtgacctttccagccatgcgatattccccttggaagatgcttccccaggctataaatttgttctcacaaagcaacatcaataaatcaaaactgtctctccca

SEQ ID NO: 186939 - DNA, 730 bp, Homo sapiens
  Payload ID: 16808
  Gene Symbol: STRA13
  Gene Name: stimulated by retinoic acid 13
  ENST ID: ENST00000584600
  CDS Start-End: 1-228
gagggagcaggagctggatccggcttccggaaggagctggtgagcaggctgctgcacctgcacttcaaggatgacaagaccaaagtgagcggggacgcgctgcagctcatggtggagttgctgaaggtcttcgttgtggaagcagcagtccgcggcgtgcggcaggcccaggcagaagacgcgctccgtgtggacgtggaccagctggagaagctcctggacttctagggatctcagccgtggctgaggccacccccagaggagcccctggtccacagaagcaggccttgtgtttccagcggcctctgataagaggcagggaaggacctgaaggatttggagttgattcaaacaagatctctgggagtctccagcctgtgcagaaggggcaggactgcagtgcactgcgggccttggagtgtccagtggggacactggtgtgggaaggggcagcacctggggagtccctgcctctcctccctgggacaatagtgtgcatgccacccggggtcctacaggcaggtgctgggaaaggcctggccagcaggtagcctgtgtgtttgacaaacagcagctggcagcgctgcctcctgcccacattcctgccacccgacatcaaagctggcgtgtgacctttccagccatgcgatattccccttggaagatgcttccccaggctataaatttgttctcacaaagcaacatcaataaatcaaaactgtctctccca

SEQ ID NO: 186940 - DNA, 702 bp, Homo sapiens
  Payload ID: 16808
  Gene Symbol: STRA13
  Gene Name: stimulated by retinoic acid 13
  ENST ID: ENST00000579520
  CDS Start-End: 1-199
gcccctgccaggcaccaagccggctctgcacgcggggaaccaggagctggtgagcaggctgctgcacctgcacttcaaggatgacaagaccaaagaagcagcagtccgcggcgtgcggcaggcccaggcagaagacgcgctccgtgtggacgtggaccagctggagaaggtgcttccgcagctgctcctggacttctagggatctcagccgtggctgaggccacccccagaggagcccctggtccacagaagcaggccttgtgtttccagcggcctctgataagaggcagggaaggacctgaaggatttggagttgattcaaacaagatctctgggagtctccagcctgtgcagaaggggcaggactgcagtgcactgcgggccttggagtgtccagtggggacactggtgtgggaaggggcagcacctggggagtccctgcctctcctccctgggacaatagtgtgcatgccacccggggtcctacaggcaggtgctgggaaaggcctggccagcaggtagcctgtgtgtttgacaaacagcagctggcagcgctgcctcctgcccacattcctgccacccgacatcaaagctggcgtgtgacctttccagccatgcgatattccccttggaagatgcttccccaggctataaatttgttctcacaaagcaacatcaataaatcaaaactgtctctcccag

SEQ ID NO: 186941 - DNA, 799 bp, Homo sapiens
  Payload ID: 16808
  Gene Symbol: STRA13
  Gene Name: stimulated by retinoic acid 13
  ENST ID: ENST00000584347
  CDS Start-End: 19-414
cgcgttgaggctgcggtcatggagggagcaggagctggatccggcttccggaaggagctggtgagcaggctgctgcacctgcacttcaaggatgacaagaccaaagtgagcggggacgcgctgcagctcatggtggagttgctgaaggtcttcgttgtgggtgagcccagggcccacgctccctccgggcacagcatccggaattttgcgtttttccagcgggaaaaccaagacgtgttttcccgtttcccacaagggcctaaacttgggtctcctgagcctgtttgtcagaagcagcagtccgcggcgtgcggcaggcccaggcagaagacgcgctccgtgtggacgtggaccagctggagaaggtgcttccgcagctgctcctggacttctagggatctcagccgtggctgaggccacccccagaggagcccctggtccacagaagcaggccttgtgtttccagcggcctctgataagaggcagggaaggacctgaaggatttggagttgattcaaacaagatctctgggagtctccagcctgtgcagaaggggcaggactgcagtgcactgcgggccttggagtgtccagtggggacactggtgtgggaaggggcagcacctggggagtccctgcctctcctccctgggacaatagtgtgcatgccacccggggtcctacaggcaggtgctgggaaaggcctggccagcaggtagcctgtgtgtttgacaaacagcagctggcagcgctgcctcctgcccacattcctgccacccgacatcaaagctggcgtgtga

SEQ ID NO: 186942 - DNA, 2864 bp, Homo sapiens
  Payload ID: 16809
  Gene Symbol: STRA6
  Gene Name: stimulated by retinoic acid 6
  Uniprot ID: Q9BX79
  ENST ID: ENST00000323940
  CDS Start-End: 247-2250
agatcaaacaccttttaaagcaggtgctggggacacttctcagggccaactgccgagaccacacaaccagccacccctctaggatcccagcccagctggtgctgggctcagaggagaaggccccgtgttgggagcaccctgcttgcctggagggacaagtttccgggagagatcaataaaggaaaggaaagagacaaggaagggagaggtcaggagagcgcttgattggaggagaagggccagagaatgtcgtcccagccagcagggaaccagacctcccccggggccacagaggactactcctatggcagctggtacatcgatgagccccaggggggcgaggagctccagccagagggggaagtgccctcctgccacaccagcataccacccggcctgtaccacgcctgcctggcctcgctgtcaatccttgtgctgctgctcctggccatgctggtgaggcgccgccagctctggcctgactgtgtgcgtggcaggcccggcctgcccagccctgtggatttcttggctggggacaggccccgggcagtgcctgctgctgttttcatggtcctcctgagctccctgtgtttgctgctccccgacgaggacgcattgcccttcctgactctcgcctcagcacccagccaagatgggaaaactgaggctccaagaggggcctggaagatactgggactgttctattatgctgccctctactaccctctggctgcctgtgccacggctggccacacagctgcacacctgctcggcagcacgctgtcctgggcccaccttggggtccaggtctggcagagggcagagtgtccccaggtgcccaagatctacaagtactactccctgctggcctccctgcctctcctgctgggcctcggattcctgagcctttggtaccctgtgcagctggtgagaagcttcagccgtaggacaggagcaggctccaaggggctgcagagcagctactctgaggaatatctgaggaacctcctttgcaggaagaagctgggaagcagctaccacacctccaagcatggcttcctgtcctgggcccgcgtctgcttgagacactgcatctacactccacagccaggattccatctcccgctgaagctggtgctttcagctacactgacagggacggccatttaccaggtggccctgctgctgctggtgggcgtggtacccactatccagaaggtgagggcaggggtcaccacggatgtctcctacctgctggccggctttggaatcgtgctctccgaggacaagcaggaggtggtggagctggtgaagcaccatctgtgggctctggaagtgtgctacatctcagccttggtcttgtcctgcttactcaccttcctggtcctgatgcgctcactggtgacacacaggaccaaccttcgagctctgcaccgaggagctgccctggacttgagtcccttgcatcggagtccccatccctcccgccaagccatattctgttggatgagcttcagtgcctaccagacagcctttatctgccttgggctcctggtgcagcagatcatcttcttcctgggaaccacggccctggccttcctggtgctcatgcctgtgctccatggcaggaacctcctgctcttccgttccctggagtcctcgtggcccttctggctgactttggccctggctgtgatcctgcagaacatggcagcccattgggtcttcctggagactcatgatggacacccacagctgaccaaccggcgagtgctctatgcagccacctttcttctcttccccctcaatgtgctggtgggtgccatggtggccacctggcgagtgctcctctctgccctctacaacgccatccaccttggccagatggacctcagcctgctgccaccgagagccgccactctcgaccccggctactacacgtaccgaaacttcttgaagattgaagtcagccagtcgcatccagccatgacagccttctgctccctgctcctgcaagcgcagagcctcctacccaggaccatggcagccccccaggacagcctcagaccaggggaggaagacgaagggatgcagctgctacagacaaaggactccatggccaagggagctaggcccggggccagccgcggcagggctcgctggggtctggcctacacgctgctgcacaacccaaccctgcaggtcttccgcaagacggccctgttgggtgccaatggtgcccagccctgagggcagggaaggtcaacccacctgcccatctgtgctgaggcatgttcctgcctaccatcctcctccctccccggctctcctcccagcatcacaccagccatgcagccagcaggtcctccggatcactgtggttgggtggaggtctgtctgcactgggagcctcaggagggctctgctccacccacttggctatgggagagccagcaggggttctggagaaagaaactggtgggttagggccttggtccaggagccagttgagccagggcagccacatccaggcgtctccctaccctggctctgccatcagccttgaagggcctcgatgaagccttctctggaaccactccagcccagctccacctcagccttggccttcacgctgtggaagcagccaaggcacttcctcaccccctcagcgccacggacctctctggggagtggccggaaagctcccgggcctctggcctgcagggcagcccaagtcatgactcagaccaggtcccacactgagctgcccacactcgagagccagatatttttgtagtttttatgcctttggctattatgaaagaggttagtgtgttccctgcaataaacttgttcctgagaaa

SEQ ID NO: 186943 - DNA, 2800 bp, Homo sapiens
  Payload ID: 16809
  Gene Symbol: STRA6
  Gene Name: stimulated by retinoic acid 6
  Uniprot ID: Q9BX79
  ENST ID: ENST00000395105
  CDS Start-End: 183-2186
gtatttccatcaccgaggcccaaaggggccagaaaggggcaggctgaggctgggggaggggctcaagggagcccagctgggagggcccaggcaggcagtgcggagctggccgtgggctgcctaccctttcatctctgcaactccttcctccctgggcctcccttctggagaagggccagagaatgtcgtcccagccagcagggaaccagacctcccccggggccacagaggactactcctatggcagctggtacatcgatgagccccaggggggcgaggagctccagccagagggggaagtgccctcctgccacaccagcataccacccggcctgtaccacgcctgcctggcctcgctgtcaatccttgtgctgctgctcctggccatgctggtgaggcgccgccagctctggcctgactgtgtgcgtggcaggcccggcctgcccagccctgtggatttcttggctggggacaggccccgggcagtgcctgctgctgttttcatggtcctcctgagctccctgtgtttgctgctccccgacgaggacgcattgcccttcctgactctcgcctcagcacccagccaagatgggaaaactgaggctccaagaggggcctggaagatactgggactgttctattatgctgccctctactaccctctggctgcctgtgccacggctggccacacagctgcacacctgctcggcagcacgctgtcctgggcccaccttggggtccaggtctggcagagggcagagtgtccccaggtgcccaagatctacaagtactactccctgctggcctccctgcctctcctgctgggcctcggattcctgagcctttggtaccctgtgcagctggtgagaagcttcagccgtaggacaggagcaggctccaaggggctgcagagcagctactctgaggaatatctgaggaacctcctttgcaggaagaagctgggaagcagctaccacacctccaagcatggcttcctgtcctgggcccgcgtctgcttgagacactgcatctacactccacagccaggattccatctcccgctgaagctggtgctttcagctacactgacagggacggccatttaccaggtggccctgctgctgctggtgggcgtggtacccactatccagaaggtgagggcaggggtcaccacggatgtctcctacctgctggccggctttggaatcgtgctctccgaggacaagcaggaggtggtggagctggtgaagcaccatctgtgggctctggaagtgtgctacatctcagccttggtcttgtcctgcttactcaccttcctggtcctgatgcgctcactggtgacacacaggaccaaccttcgagctctgcaccgaggagctgccctggacttgagtcccttgcatcggagtccccatccctcccgccaagccatattctgttggatgagcttcagtgcctaccagacagcctttatctgccttgggctcctggtgcagcagatcatcttcttcctgggaaccacggccctggccttcctggtgctcatgcctgtgctccatggcaggaacctcctgctcttccgttccctggagtcctcgtggcccttctggctgactttggccctggctgtgatcctgcagaacatggcagcccattgggtcttcctggagactcatgatggacacccacagctgaccaaccggcgagtgctctatgcagccacctttcttctcttccccctcaatgtgctggtgggtgccatggtggccacctggcgagtgctcctctctgccctctacaacgccatccaccttggccagatggacctcagcctgctgccaccgagagccgccactctcgaccccggctactacacgtaccgaaacttcttgaagattgaagtcagccagtcgcatccagccatgacagccttctgctccctgctcctgcaagcgcagagcctcctacccaggaccatggcagccccccaggacagcctcagaccaggggaggaagacgaagggatgcagctgctacagacaaaggactccatggccaagggagctaggcccggggccagccgcggcagggctcgctggggtctggcctacacgctgctgcacaacccaaccctgcaggtcttccgcaagacggccctgttgggtgccaatggtgcccagccctgagggcagggaaggtcaacccacctgcccatctgtgctgaggcatgttcctgcctaccatcctcctccctccccggctctcctcccagcatcacaccagccatgcagccagcaggtcctccggatcactgtggttgggtggaggtctgtctgcactgggagcctcaggagggctctgctccacccacttggctatgggagagccagcaggggttctggagaaagaaactggtgggttagggccttggtccaggagccagttgagccagggcagccacatccaggcgtctccctaccctggctctgccatcagccttgaagggcctcgatgaagccttctctggaaccactccagcccagctccacctcagccttggccttcacgctgtggaagcagccaaggcacttcctcaccccctcagcgccacggacctctctggggagtggccggaaagctcccgggcctctggcctgcagggcagcccaagtcatgactcagaccaggtcccacactgagctgcccacactcgagagccagatatttttgtagtttttatgcctttggctattatgaaagaggttagtgtgttccctgcaataaacttgttcctgagaaa

SEQ ID NO: 186944 - DNA, 2750 bp, Homo sapiens
  Payload ID: 16809
  Gene Symbol: STRA6
  Gene Name: stimulated by retinoic acid 6
  ENST ID: ENST00000416286
  CDS Start-End: 157-2136
atgtgcccagttgcttggctgctccaccaggctctgaaggcacaaacccctgagacggtgtccaagcccagggccctgtagactctgcggatcccgagaccagcgccactcatcctgcagcactggggacagacagagcaggagaagggccagagaatgtcgtcccagccagcagggaaccagacctcccccggggccacagaggactactcctatggcagctggtacatcgatgagccccaggggggcgaggagctccagccagagggggaagtgccctcctgccacaccagcataccacccggcctgtaccacgcctgcctggcctcgctgtcaatccttgtgctgctgctcctggccatgctggtgaggcgccgccagctctggcctgactgtgtgcgtggcaggcccggcctgcccagccctgtggatttcttggctggggacaggccccgggcagtgcctgctgctgttttcatggtcctcctgagctccctgtgtttgctgctccccgacgaggacgcattgcccttcctgactctcgcctcagcacccagccaaggggcctggaagatactgggactgttctattatgctgccctctactaccctctggctgcctgtgccacggctggccacacagctgcacacctgctcggcagcacgctgtcctgggcccaccttggggtccaggtctggcagagggcagagtgtccccaggtgcccaagatctacaagtactactccctgctggcctccctgcctctcctgctgggcctcggattcctgagcctttggtaccctgtgcagctggtgagaagcttcagccgtaggacaggagcaggctccaaggggctgcagagcagctactctgaggaatatctgaggaacctcctttgcaggaagaagctgggaagcagctaccacacctccaagcatggcttcctgtcctgggcccgcgtctgcttgagacactgcatctacactccacagccaggattccatctcccgctgaagctggtgctttcagctacactgacagggacggccatttaccaggtggccctgctgctgctggtgggcgtggtacccactatccagaaggtgagggcaggggtcaccacggatgtctcctacctgctggccggctttggaatcgtgctctccgaggacaagcaggaggtggtggagctggtgaagcaccatctgtgggctctggaagtgtgctacatctcagccttggtcttgtcctgcttactcaccttcctggtcctgatgcgctcactggtgacacacaggaccaaccttcgagctctgcaccgaggagctgccctggacttgagtcccttgcatcggagtccccatccctcccgccaagccatattctgttggatgagcttcagtgcctaccagacagcctttatctgccttgggctcctggtgcagcagatcatcttcttcctgggaaccacggccctggccttcctggtgctcatgcctgtgctccatggcaggaacctcctgctcttccgttccctggagtcctcgtggcccttctggctgactttggccctggctgtgatcctgcagaacatggcagcccattgggtcttcctggagactcatgatggacacccacagctgaccaaccggcgagtgctctatgcagccacctttcttctcttccccctcaatgtgctggtgggtgccatggtggccacctggcgagtgctcctctctgccctctacaacgccatccaccttggccagatggacctcagcctgctgccaccgagagccgccactctcgaccccggctactacacgtaccgaaacttcttgaagattgaagtcagccagtcgcatccagccatgacagccttctgctccctgctcctgcaagcgcagagcctcctacccaggaccatggcagccccccaggacagcctcagaccaggggaggaagacgaagggatgcagctgctacagacaaaggactccatggccaagggagctaggcccggggccagccgcggcagggctcgctggggtctggcctacacgctgctgcacaacccaaccctgcaggtcttccgcaagacggccctgttgggtgccaatggtgcccagccctgagggcagggaaggtcaacccacctgcccatctgtgctgaggcatgttcctgcctaccatcctcctccctccccggctctcctcccagcatcacaccagccatgcagccagcaggtcctccggatcactgtggttgggtggaggtctgtctgcactgggagcctcaggagggctctgctccacccacttggctatgggagagccagcaggggttctggagaaagaaactggtgggttagggccttggtccaggagccagttgagccagggcagccacatccaggcgtctccctaccctggctctgccatcagccttgaagggcctcgatgaagccttctctggaaccactccagcccagctccacctcagccttggccttcacgctgtggaagcagccaaggcacttcctcaccccctcagcgccacggacctctctggggagtggccggaaagctcccgggcctctggcctgcagggcagcccaagtcatgactcagaccaggtcccacactgagctgcccacactcgagagccagatatttttgtagtttttatgcctttggctattatgaaagaggttagtgtgttccctgcaataaacttgttcctgagaaa

SEQ ID NO: 186945 - DNA, 1889 bp, Homo sapiens
  Payload ID: 16809
  Gene Symbol: STRA6
  Gene Name: stimulated by retinoic acid 6
  Uniprot ID: Q9BX79
  ENST ID: ENST00000432245
  CDS Start-End: 195-674
ccgagaccacacaaccagccacccctctaggatcccagcccagctggtgctgggctcagaggagaaggccccgtgttgggagcaccctgcttgcctggagggacaagtttccgggagagatcaataaaggaaaggaaagagacaaggaagggagaggtcaggagagcgcttgattggaggagaagggccagagaatgtcgtcccagccagcagggaaccagacctcccccggggccacagaggactactcctatggcagctggtacatcgatgagccccaggggggcgaggagctccagccagagggggaagtgccctcctgccacaccagcataccacccggcctgtaccacgcctgcctggcctcgctgtcaatccttgtgctgctgctcctggccatgctggtgaggcgccgccagctctggcctgactgtgtgcgtggcaggcccggcctgcccagccctgtggatttcttggctggggacaggccccgggcagtgcctgctgctgttttcatggtcctcctgagctccctgtgtttgctgctccccgacgaggacgcattgcccttcctgactctcgcctcagcacccagccaagatgggaaaactgaggctccaagaggtaacttgcccaagatcacagagttgagactagtcagagcctggatttgaacctagtgttcttgcccactgaacgtgctgaagggcttggaagctggagaccgaagagaggcctgggtgggctcactgcaggccccatgtctgcccctccagcatgggtctctctgcttgtttcaccttccaggggcctggaagatactgggactgttctattatgctgccctctactaccctctggctgcctgtgccacggctggccacacagctgcacacctgctcggcagcacgctgtcctgggcccaccttggggtccaggtctggcagagggcagagtgtccccaggtgcccaaggtaaccgctgatcacaatggcctagggcagaggggcgcacagagcaacctactcaaaccacagtgcctcctttgagctctgattctatgatgggccgccctgcagccttccattgtgcatgggattccatgccttcaaacatgtgccccttccaagcttggctgctctgcaggagaggcagggaacaaggtggctgggcccagccctcaggaactttaagtctaggaggtggcggagaaggggaagtgggcagagtagggggaagagaaagcctgaaatggcccccacccccaatgcctgtgttagtgatcccccagcttccctttggtcaggctggagagggaatgggagtgaagcttgatggaggccggcaagtgcgaagtcagggatggtctaagagggctgagaggagaattccggaacctcaggaccttgctcactggctgctggctggggctgtgaagctgtccagtctagaactcaaagagtgatggtacaggctttagagccagacaacctgagtgtgaatccagcttcaccacttcattcattcactcacccattcattcaacaacatatttgaagcacatactttgtaccagggacatttccaggcactggactacagctatgaacaagacaaacagtccctagcctcccaagagccgtcacttcagaagggcagacatgacacgcaaacaaaatgatgccaggtggtaccaagtgccttggggaaacagtgccacctttctgagaccgtttctccatccgtccatggagctgataacaccagtccctcagggtggaggtgaagactaagaggttgctttgagagggggaacttggtggctttttttcaccacctagaacctggcacatactaagctctcaataaaagtatattgaaccaacaaa

SEQ ID NO: 186946 - DNA, 2732 bp, Homo sapiens
  Payload ID: 16809
  Gene Symbol: STRA6
  Gene Name: stimulated by retinoic acid 6
  Uniprot ID: Q9BX79
  ENST ID: ENST00000449139
  CDS Start-End: 115-2118
caaacccctgagacggtgtccaagcccagggccctgtagactctgcggatcccgagaccagcgccactcatcctgcagcactggggacagacagagcaggagaagggccagagaatgtcgtcccagccagcagggaaccagacctcccccggggccacagaggactactcctatggcagctggtacatcgatgagccccaggggggcgaggagctccagccagagggggaagtgccctcctgccacaccagcataccacccggcctgtaccacgcctgcctggcctcgctgtcaatccttgtgctgctgctcctggccatgctggtgaggcgccgccagctctggcctgactgtgtgcgtggcaggcccggcctgcccagccctgtggatttcttggctggggacaggccccgggcagtgcctgctgctgttttcatggtcctcctgagctccctgtgtttgctgctccccgacgaggacgcattgcccttcctgactctcgcctcagcacccagccaagatgggaaaactgaggctccaagaggggcctggaagatactgggactgttctattatgctgccctctactaccctctggctgcctgtgccacggctggccacacagctgcacacctgctcggcagcacgctgtcctgggcccaccttggggtccaggtctggcagagggcagagtgtccccaggtgcccaagatctacaagtactactccctgctggcctccctgcctctcctgctgggcctcggattcctgagcctttggtaccctgtgcagctggtgagaagcttcagccgtaggacaggagcaggctccaaggggctgcagagcagctactctgaggaatatctgaggaacctcctttgcaggaagaagctgggaagcagctaccacacctccaagcatggcttcctgtcctgggcccgcgtctgcttgagacactgcatctacactccacagccaggattccatctcccgctgaagctggtgctttcagctacactgacagggacggccatttaccaggtggccctgctgctgctggtgggcgtggtacccactatccagaaggtgagggcaggggtcaccacggatgtctcctacctgctggccggctttggaatcgtgctctccgaggacaagcaggaggtggtggagctggtgaagcaccatctgtgggctctggaagtgtgctacatctcagccttggtcttgtcctgcttactcaccttcctggtcctgatgcgctcactggtgacacacaggaccaaccttcgagctctgcaccgaggagctgccctggacttgagtcccttgcatcggagtccccatccctcccgccaagccatattctgttggatgagcttcagtgcctaccagacagcctttatctgccttgggctcctggtgcagcagatcatcttcttcctgggaaccacggccctggccttcctggtgctcatgcctgtgctccatggcaggaacctcctgctcttccgttccctggagtcctcgtggcccttctggctgactttggccctggctgtgatcctgcagaacatggcagcccattgggtcttcctggagactcatgatggacacccacagctgaccaaccggcgagtgctctatgcagccacctttcttctcttccccctcaatgtgctggtgggtgccatggtggccacctggcgagtgctcctctctgccctctacaacgccatccaccttggccagatggacctcagcctgctgccaccgagagccgccactctcgaccccggctactacacgtaccgaaacttcttgaagattgaagtcagccagtcgcatccagccatgacagccttctgctccctgctcctgcaagcgcagagcctcctacccaggaccatggcagccccccaggacagcctcagaccaggggaggaagacgaagggatgcagctgctacagacaaaggactccatggccaagggagctaggcccggggccagccgcggcagggctcgctggggtctggcctacacgctgctgcacaacccaaccctgcaggtcttccgcaagacggccctgttgggtgccaatggtgcccagccctgagggcagggaaggtcaacccacctgcccatctgtgctgaggcatgttcctgcctaccatcctcctccctccccggctctcctcccagcatcacaccagccatgcagccagcaggtcctccggatcactgtggttgggtggaggtctgtctgcactgggagcctcaggagggctctgctccacccacttggctatgggagagccagcaggggttctggagaaagaaactggtgggttagggccttggtccaggagccagttgagccagggcagccacatccaggcgtctccctaccctggctctgccatcagccttgaagggcctcgatgaagccttctctggaaccactccagcccagctccacctcagccttggccttcacgctgtggaagcagccaaggcacttcctcaccccctcagcgccacggacctctctggggagtggccggaaagctcccgggcctctggcctgcagggcagcccaagtcatgactcagaccaggtcccacactgagctgcccacactcgagagccagatatttttgtagtttttatgcctttggctattatgaaagaggttagtgtgttccctgcaataaacttgttcctgagaaa

SEQ ID NO: 186947 - DNA, 2776 bp, Homo sapiens
  Payload ID: 16809
  Gene Symbol: STRA6
  Gene Name: stimulated by retinoic acid 6
  Uniprot ID: Q9BX79
  ENST ID: ENST00000423167
  CDS Start-End: 186-2162
cacaaccagccacccctctaggatcccagcccagctggtgctgggctcagaggagaaggccccgtgttgggagcaccctgcttgcctggagggacaagtttccgggagagatcaataaaggaaaggaaagagacaaggaagggagaggtcaggagagcgcttgattggaggagaagggccagagaatgtcgtcccagccagcagggaaccagacctcccccggggccacagaggactactcctatggcagctggtacatcgatgagccccaggggggcgaggagctccagccagagggggaagtgccctcctgccacaccagcataccacccggcctgtaccacgcctgcctggcctcgctgtcaatccttgtgctgctgctcctggccatgctggtgaggcgccgccagctctggcctgactgtgtgcgtggcaggcccggcctgcccaggccccgggcagtgcctgctgctgttttcatggtcctcctgagctccctgtgtttgctgctccccgacgaggacgcattgcccttcctgactctcgcctcagcacccagccaagatgggaaaactgaggctccaagaggggcctggaagatactgggactgttctattatgctgccctctactaccctctggctgcctgtgccacggctggccacacagctgcacacctgctcggcagcacgctgtcctgggcccaccttggggtccaggtctggcagagggcagagtgtccccaggtgcccaagatctacaagtactactccctgctggcctccctgcctctcctgctgggcctcggattcctgagcctttggtaccctgtgcagctggtgagaagcttcagccgtaggacaggagcaggctccaaggggctgcagagcagctactctgaggaatatctgaggaacctcctttgcaggaagaagctgggaagcagctaccacacctccaagcatggcttcctgtcctgggcccgcgtctgcttgagacactgcatctacactccacagccaggattccatctcccgctgaagctggtgctttcagctacactgacagggacggccatttaccaggtggccctgctgctgctggtgggcgtggtacccactatccagaaggtgagggcaggggtcaccacggatgtctcctacctgctggccggctttggaatcgtgctctccgaggacaagcaggaggtggtggagctggtgaagcaccatctgtgggctctggaagtgtgctacatctcagccttggtcttgtcctgcttactcaccttcctggtcctgatgcgctcactggtgacacacaggaccaaccttcgagctctgcaccgaggagctgccctggacttgagtcccttgcatcggagtccccatccctcccgccaagccatattctgttggatgagcttcagtgcctaccagacagcctttatctgccttgggctcctggtgcagcagatcatcttcttcctgggaaccacggccctggccttcctggtgctcatgcctgtgctccatggcaggaacctcctgctcttccgttccctggagtcctcgtggcccttctggctgactttggccctggctgtgatcctgcagaacatggcagcccattgggtcttcctggagactcatgatggacacccacagctgaccaaccggcgagtgctctatgcagccacctttcttctcttccccctcaatgtgctggtgggtgccatggtggccacctggcgagtgctcctctctgccctctacaacgccatccaccttggccagatggacctcagcctgctgccaccgagagccgccactctcgaccccggctactacacgtaccgaaacttcttgaagattgaagtcagccagtcgcatccagccatgacagccttctgctccctgctcctgcaagcgcagagcctcctacccaggaccatggcagccccccaggacagcctcagaccaggggaggaagacgaagggatgcagctgctacagacaaaggactccatggccaagggagctaggcccggggccagccgcggcagggctcgctggggtctggcctacacgctgctgcacaacccaaccctgcaggtcttccgcaagacggccctgttgggtgccaatggtgcccagccctgagggcagggaaggtcaacccacctgcccatctgtgctgaggcatgttcctgcctaccatcctcctccctccccggctctcctcccagcatcacaccagccatgcagccagcaggtcctccggatcactgtggttgggtggaggtctgtctgcactgggagcctcaggagggctctgctccacccacttggctatgggagagccagcaggggttctggagaaagaaactggtgggttagggccttggtccaggagccagttgagccagggcagccacatccaggcgtctccctaccctggctctgccatcagccttgaagggcctcgatgaagccttctctggaaccactccagcccagctccacctcagccttggccttcacgctgtggaagcagccaaggcacttcctcaccccctcagcgccacggacctctctggggagtggccggaaagctcccgggcctctggcctgcagggcagcccaagtcatgactcagaccaggtcccacactgagctgcccacactcgagagccagatatttttgtagtttttatgcctttggctattatgaaagaggttagtgtgttccctgcaataaacttgttcctgagaaa

SEQ ID NO: 186948 - DNA, 2631 bp, Homo sapiens
  Payload ID: 16809
  Gene Symbol: STRA6
  Gene Name: stimulated by retinoic acid 6
  Uniprot ID: Q9BX79
  ENST ID: ENST00000535552
  CDS Start-End: 252-2366
gtgctcaggtgaggggggatgcagccgactgtccagcagcgttggaggttgcaggcatgtacttggggtgaagagcaggactccagaaccccagcctgtctgtgagaagtgagaaatagaagagaaagctccgagggggcctttttcacttcccctgggaatagatcatacctggaattccagccctgaagccctgtgatgactccccttagctgtggtcagggccctcagcccagctgggcagcagcaggatgcagatccggttattaagagccgagctggtggttcccctctggcaattcatcaggcagtggccccctgggagtgatggatggggacaaatggaggagaagggccagagaatgtcgtcccagccagcagggaaccagacctcccccggggccacagaggactactcctatggcagctggtacatcgatgagccccaggggggcgaggagctccagccagagggggaagtgccctcctgccacaccagcataccacccggcctgtaccacgcctgcctggcctcgctgtcaatccttgtgctgctgctcctggccatgctggtgaggcgccgccagctctggcctgactgtgtgcgtggcaggcccggcctgcccagccctgtggatttcttggctggggacaggccccgggcagtgcctgctgctgttttcatggtcctcctgagctccctgtgtttgctgctccccgacgaggacgcattgcccttcctgactctcgcctcagcacccagccaagatgggaaaactgaggctccaagaggggcctggaagatactgggactgttctattatgctgccctctactaccctctggctgcctgtgccacggctggccacacagctgcacacctgctcggcagcacgctgtcctgggcccaccttggggtccaggtctggcagagggcagagtgtccccaggtgcccaagatctacaagtactactccctgctggcctccctgcctctcctgctgggcctcggattcctgagcctttggtaccctgtgcagctggtgagaagcttcagccgtaggacaggagcaggctccaaggggctgcagagcagctactctgaggaatatctgaggaacctcctttgcaggaagaagctgggaagcagctaccacacctccaagcatggcttcctgtcctgggcccgcgtctgcttgagacactgcatctacactccacagccaggattccatctcccgctgaagctggtgctttcagctacactgacagggacggccatttaccaggtggccctgctgctgctggtgggcgtggtacccactatccagaaggtgagggcaggggtcaccacggatgtctcctacctgctggccggctttggaatcgtgctctccgaggacaagcaggaggtggtggagctggtgaagcaccatctgtgggctctggaagtgtgctacatctcagccttggtcttgtcctgcttactcaccttcctggtcctgatgcgctcactggtgacacacaggaccaaccttcgagctctgcaccgaggagctgccctggacttgagtcccttgcatcggagtccccatccctcccgccaagccatattctgttggatgagcttcagtgcctaccagacagcctttatctgccttgggctcctggtgcagcagatcatcttcttcctgggaaccacggccctggccttcctggtgctcatgcctgtgctccatggcaggaacctcctgctcttccgttccctggagtcctcgtggcccttctggctgactttggccctggctgtgatcctgcagaacatggcagcccattgggtcttcctggagactcatgatggacacccacagctgaccaaccggcgagtgctctatgcagccacctttcttctcttccccctcaatgtgctggtgggtgccatggtggccacctggcgagtgctcctctctgccctctacaacgccatccaccttggccagatggacctcagcctgctgccaccgagagccgccactctcgaccccggctactacacgtaccgaaacttcttgaagattgaagtcagccagtcgcatccagccatgacagccttctgctccctgctcctgcaagcgcagagcctcctacccaggaccatggcagccccccaggacagcctcagaccaggggaggaagacgaagggatgcagctgctacagacaaaggactccatggccaagggagctaggcccggggccagccgcggcagggctcgctggggtctggcctacacgctgctgcacaacccaaccctgcaggtcttccgcaagacggccctgttgggtgccaatggtgcccagccctgagggcagggaaggtcaacccacctgcccatctgtgctgaggcatgttcctgcctaccatcctcctccctccccggctctcctcccagcatcacaccagccatgcagccagcaggtcctccggatcactgtggttgggtggaggtctgtctgcactgggagcctcaggagggctctgctccacccacttggctatgggagagccagcaggggttctggagaaagaaactggtgggttagggccttggtccaggagccagttgagcca

SEQ ID NO: 186949 - DNA, 2565 bp, Homo sapiens
  Payload ID: 16809
  Gene Symbol: STRA6
  Gene Name: stimulated by retinoic acid 6
  Uniprot ID: Q9BX79
  ENST ID: ENST00000563965
  CDS Start-End: 340-2460
aaaggggccagaaaggggcaggctgaggctgggggaggggctcaagggagcccagctgggagggcccaggcaggcagtgcggagctggccgtgggctgcctaccctttcatctctgcaactccttcctccctgggcctcccttctggtgtgtctgtgggtctgtctaggtgggcttgggaaaggggaaggaaggggcgtctctttaggcagctcagactggacaagccttctttgaaaatggtcctttgaacacacgcctgctggtggttggtcagacagatgcgccagcgggagccccggggccccaaggggacagctatctctgcaggaccagtgcgatgggcgggaagggaggaggggacacgagaggccctgtcctcttcccgtgccagcttgctcaggccctcagtcccagacgggcttttcccagagagctaaaagagaagggccagagaatgtcgtcccagccagcagggaaccagacctcccccggggccacagaggactactcctatggcagctggtacatcgatgagccccaggggggcgaggagctccagccagagggggaagtgccctcctgccacaccagcataccacccggcctgtaccacgcctgcctggcctcgctgtcaatccttgtgctgctgctcctggccatgctggtgaggcgccgccagctctggcctgactgtgtgcgtggcaggcccggcctgcccagccctgtggatttcttggctggggacaggccccgggcagtgcctgctgctgttttcatggtcctcctgagctccctgtgtttgctgctccccgacgaggacgcattgcccttcctgactctcgcctcagcacccagccaagatgggaaaactgaggctccaagaggggcctggaagatactgggactgttctattatgctgccctctactaccctctggctgcctgtgccacggctggccacacagctgcacacctgctcggcagcacgctgtcctgggcccaccttggggtccaggtctggcagagggcagagtgtccccaggtgcccaagatctacaagtactactccctgctggcctccctgcctctcctgctgggcctcggattcctgagcctttggtaccctgtgcagctggtgagaagcttcagccgtaggacaggagcaggctccaaggggctgcagagcagctactctgaggaatatctgaggaacctcctttgcaggaagaagctgggaagcagctaccacacctccaagcatggcttcctgtcctgggcccgcgtctgcttgagacactgcatctacactccacagccaggattccatctcccgctgaagctggtgctttcagctacactgacagggacggccatttaccaggtggccctgctgctgctggtgggcgtggtacccactatccagaaggtgagggcaggggtcaccacggatgtctcctacctgctggccggctttggaatcgtgctctccgaggacaagcaggaggtggtggagctggtgaagcaccatctgtgggctctggaagtgtgctacatctcagccttggtcttgtcctgcttactcaccttcctggtcctgatgcgctcactggtgacacacaggaccaaccttcgagctctgcaccgaggagctgccctggacttgagtcccttgcatcggagtccccatccctcccgccaagccatattctgttggatgagcttcagtgcctaccagacagcctttatctgccttgggctcctggtgcagcagatcatcttcttcctgggaaccacggccctggccttcctggtgctcatgcctgtgctccatggcaggaacctcctgctcttccgttccctggagtcctcgtggcccttctggctgactttggccctggctgtgatcctgcagaacatggcagcccattgggtcttcctggagactcatgatggacacccacagctgaccaaccggcgagtgctctatgcagccacctttcttctcttccccctcaatgtgctggtgggtgccatggtggccacctggcgagtgctcctctctgccctctacaacgccatccaccttggccagatggacctcagcctgctgccaccgagagccgccactctcgaccccggctactacacgtaccgaaacttcttgaagattgaagtcagccagtcgcatccagccatgacagccttctgctccctgctcctgcaagcgcagagcctcctacccaggaccatggcagccccccaggacagcctcagaccaggggaggaagacgaagggatgcagctgctacagacaaaggactccatggccaagggagctaggcccggggccagccgcggcagggctcgctggggtctggcctacacgctgctgcacaacccaaccctgcaggtcttccgcaagacggccctgttgggtgccaatggtgcccagccctgagggcagggaaggtcaacccacctgcccatctgtgctgaggcatgttcctgcctaccatcctcctccctccccggctctcctcccagcatcacaccagccatgcag

SEQ ID NO: 186950 - DNA, 449 bp, Homo sapiens
  Payload ID: 16809
  Gene Symbol: STRA6
  Gene Name: stimulated by retinoic acid 6
  ENST ID: ENST00000571341
  CDS Start-End: 184-449
agtcccagacgggcttttcccagagagctaaaagtaagaaagtaaccttcaggattaaagagaaatgtttctttgtttgggttttccgtctttctttctttttttttctcttttaagcctcttttcacatctgtagtggctttttttttctctcgcctggggtcaaaggagaagggccagagaatgtcgtcccagccagcagggaaccagacctcccccggggccacagaggactactcctatggcagctggtacatcgatgagccccaggggggcgaggagctccagccagagggggaagtgccctcctgccacaccagcataccacccggcctgtaccacgcctgcctggcctcgctgtcaatccttgtgctgctgctcctggccatgctggtgaggcgccgccagctctggcctgactgtgtgcgtggcaggcccggcctgcccag

SEQ ID NO: 186951 - DNA, 566 bp, Homo sapiens
  Payload ID: 16809
  Gene Symbol: STRA6
  Gene Name: stimulated by retinoic acid 6
  ENST ID: ENST00000573391
  CDS Start-End: 70-333
ctgcagatgtggcgggcaggggcttgggagctctggggcaggcgctgaaggcaggagaagggccagagaatgtcgtcccagccagcagggaaccagacctcccccggggccacagaggactactcctatggcagctggtacatcgatgagccccaggggggcgaggagctccagccagagggggaagtgccctcctgccacaccagcataccacccggcctgtaccacgcctgcctggcctcgctgtcagtgagtccaacccaagttgaacctggcttgcaagctgctgccagcctgggcagtgggacctgtgttccccactggggctggtgaaggggggccctggaagatcctgggtggggggagctatctgggagttctcccagcttggaggcccaaaccaggatgcaagtccaaccttccagatgtctgtcaccccttgaccagtccccaagatgtcacatgagtgtgcactgggcagatccttgtgctgctgctcctggccatgctggtgaggcgccgccagctctggcctgactgtgtgcgtggcaggcccggcctgccca

SEQ ID NO: 186952 - DNA, 2455 bp, Homo sapiens
  Payload ID: 16809
  Gene Symbol: STRA6
  Gene Name: stimulated by retinoic acid 6
  Uniprot ID: Q9BX79
  ENST ID: ENST00000574278
  CDS Start-End: 329-2377
atgttatgatgatgctgttggtgaggggggcatgagaattgcaggaagggcacatcagatggtgcttctgaccctcccacatggcaggggaggtaggaggtagagagacaggaggtggagagtcacccatactcttcctgccgtgagcacggcagccgacgacactgccttccagcccactgtgtggagtcagacttggtctggtgccagaattaagcacgtatgtgtgcgaagggcagttggatgtgtgtgtgagtgtgctgtgccactgagggcacaccccaagctcacgggcccgcatgaggttgactctctcggctgcttattcatggactctcaaggggactgggctgcacaggagaagggccagagaatgtcgtcccagccagcagggaaccagacctcccccggggccacagaggactactcctatggcagctggtacatcgatgagccccaggggggcgaggagctccagccagagggggaagtgccctcctgccacaccagcataccacccggcctgtaccacgcctgcctggcctcgctgtcaatccttgtgctgctgctcctggccatgctggtgaggcgccgccagctctggcctgactgtgtgcgtggcaggcccggcctgcccagccctgtggatttcttggctggggacaggccccgggcagtgcctgctgctgttttcatggtcctcctgagctccctgtgtttgctgctccccgacgaggacgcattgcccttcctgactctcgcctcagcacccagccaagatgggaaaactgaggctccaagaggggcctggaagatactgggactgttctattatgctgccctctactaccctctggctgcctgtgccacggctggccacacagctgcacacctgctcggcagcacgctgtcctgggcccaccttggggtccaggtctggcagagggcagagtgtccccaggtgcccaagatctacaagtactactccctgctggcctccctgcctctcctgctgggcctcggattcctgagcctttggtaccctgtgcagctggtgagaagcttcagccgtaggacaggagcaggctccaaggggctgcagagcagctactctgaggaatatctgaggaacctcctttgcaggaagaagctgggaagcagctaccacacctccaagcatggcttcctgtcctgggcccgcgtctgcttgagacactgcatctacactccacagccaggattccatctcccgctgaagctggtgctttcagctacactgacagggacggccatttaccaggtggccctgctgctgctggtgggcgtggtacccactatccagaaggtgagggcaggggtcaccacggatgtctcctacctgctggccggctttggaatcgtgctctccgaggacaagcaggaggtggtggagctggtgaagcaccatctgtgggctctggaagtgtgctacatctcagccttggtcttgtcctgcttactcaccttcctggtcctgatgcgctcactggtgacacacaggaccaaccttcgagctctgcaccgaggagctgccctggacttgagtcccttgcatcggagtccccatccctcccgccaagccatattctgttggatgagcttcagtgcctaccagacagcctttatctgccttgggctcctggtgcagcagatcatcttcttcctgggaaccacggccctggccttcctggtgctcatgcctgtgctccatggcaggaacctcctgctcttccgttccctggagtcctcgtggcccttctggctgactttggccctggctgtgatcctgcagaacatggcagcccattgggtcttcctggagactcatgatggacacccacagctgaccaaccggcgagtgctctatgcagccacctttcttctcttccccctcaatgtgctggtgggtgccatggtggccacctggcgagtgctcctctctgccctctacaacgccatccaccttggccagatggacctcagcctgctgccaccgagagccgccactctcgaccccggctactacacgtaccgaaacttcttgaagattgaagtcagccagtcgcatccagccatgacagccttctgctccctgctcctgcaagcgcagagcctcctacccaggaccatggcagccccccaggacagcctcagaccaggggaggaagacgaagggatgcagctgctacagacaaaggactccatggccaagggagctaggcccggggccagccgcggcagggctcgctggggtctggcctacacgctgctgcacaacccaaccctgcaggtcttccgcaagacggccctgttgggtgccaatggtgcccagccctgagggcagggaaggtcaacccacctgcccatctgtgctgaggcatgttcctgcctaccatcctcctccctccccggctct

SEQ ID NO: 186953 - DNA, 797 bp, Homo sapiens
  Payload ID: 16809
  Gene Symbol: STRA6
  Gene Name: stimulated by retinoic acid 6
  ENST ID: ENST00000572785
  CDS Start-End: 1-797
ggtgagggcaggggtcaccacggatgtctcctacctgctggccggctttggaatcgtgctctccgaggacaagcaggaggtggtggagctggtgaagcaccatctgtgggctctggaagtgtgctacatctcagccttggtcttgtcctgcttactcaccttcctggtcctgatgcgctcactggtgacacacagggctcctggtgcagcagatcatcttcttcctgggaaccacggccctggccttcctggtgctcatgcctgtgctccatggcaggaacctcctgctcttccgttccctggagtcctcgtgaacatggcagcccattgggtcttcctggagactcatgatggacacccacagctgaccaaccggcgagtgctctatgcagccacctttcttctcttccccctcaatgtgctggtgggtgccatggtggccacctggcgagtgctcctctctgccctctacaacgccatccaccttggccagatggacctcagcctgctgccaccgagagccgccactctcgaccccggctactacacgtaccgaaacttcttgaagattgaagtcagccagtcgcatccagccatgacagccttctgctccctgctcctgcaagcgcagagcctcctacccaggaccatggcagccccccaggacagcctcagaccaggggaggaagacgaagggatgcagctgctacagacaaaggactccatggccaagggagctaggcccggggccagccgcggcagggctcgctggggtctggcctacacgctgctgcaca

SEQ ID NO: 186954 - DNA, 2151 bp, Homo sapiens
  Payload ID: 16809
  Gene Symbol: STRA6
  Gene Name: stimulated by retinoic acid 6
  ENST ID: ENST00000569936
  CDS Start-End: 106-1539
gttgctgtaatgctggtctcctgtctgtgtgcggcactgcagatgtggcgggcaggggcttgggagctctggggcaggcgctgaaggcaggagaagggccagagaatgtcgtcccagccagcagggaaccagacctcccccggggccacagaggactactcctatggcagctggtacatcgatgagccccaggggggcgaggagctccagccagagggggaagtgccctcctgccacaccagcataccacccggcctgtaccacgcctgcctggcctcgctgtcaatccttgtgctgctgctcctggccatgctggtgaggcgccgccagctctggcctgactgtgtgcgtggcaggcccggcctgcccagccctgtggatttcttggctggggacaggccccgggcagtgcctgctgctgttttcatggtcctcctgagctccctgtgtttgctgctccccgacgaggacgcattgcccttcctgactctcgcctcagcacccagccaagatgggaaaactgaggctccaagaggggcctggaagatactgggactgttctattatgctgccctctactaccctctggctgcctgtgccacggctggccacacagctgcacacctgctcggcagcacgctgtcctgggcccaccttggggtccaggtctggcagagggcagagtgtccccaggtgcccaagatctacaagtactactccctgctggcctccctgcctctcctgctgggcctcggattcctgagcctttggtaccctgtgcagctggtgagaagcttcagccgtaggacaggagcaggctccaaggggctgcagagcagctactctgaggaatatctgaggaacctcctttgcaggaagaagctgggaagcagaatggctgcagtggaggactggctcctgctccccagaatccttgtcatcaagagggacaactaccagcttgggacagcgggaagaccctggcctggccttggtcatttagggtcctgctggcccttttcctgggccccttgggagggaggagggctcccgggcctgagtggtgctgttcaccatactccttcctttgaggactacaggattccatctcccgctgaagctggtgctttcagctacactgacagggacggccatttaccaggtggccctgctgctgctggtgggcgtggtacccactatccagaaggtgagggcaggggtcaccacggatgtctcctacctgctggccggctttggaatcgtgctctccgaggacaagcaggaggtggtggagctggtgaagcaccatctgtgggctctggaagtgtgctacatctcagccttggtcttgtcctgcttactcaccttcctggtcctgatgcgctcactggtgacacacaggaccaaccttcgagctctgcaccgaggagctgccctggacttgagtcccttgcatcggagtccccatccctcccgccaagccatattctgttggatgagcttcagtgcctaccagacagcctttatctgccttggtgagcctcccttgcccgccacacccagccttggcctgggcctcccctcagacactggcctcagttggggagaagagtgctcagcaagtactgccctcagagtttgtctgggaatgctctggggcagcagcaagaaggagggacccccctgccttccctgcccttaagaagcttattcaggatgggggtacaggagccctcgggaaattgagtgtgtaccctccacatggagatgaaccctgggtgccaccaagtattcacatgggggtggacccaggtctggaggtgtcaaattcaaaatggtacattcctggctgggctcagtggctcacacctgtaatcccagcactttgggaggctgaggcaggtggatcacgaagtcaggagatgaagaccagcctggccaacatggtgagaccccgtctctactaaaaatacaaaaattagccgggtatggtggtgtgcacctgcagttccagctattcgggaggatgaggcaggagaatcgcttgaacccaggaggtggaggttgcagtgagccgagattgcaccactgcgctccagcttaagaaagggctgtgtcacatttggctacctacaaagggctcctggtgca

SEQ ID NO: 186955 - DNA, 2843 bp, Homo sapiens
  Payload ID: 16809
  Gene Symbol: STRA6
  Gene Name: stimulated by retinoic acid 6
  Uniprot ID: Q9BX79
  ENST ID: ENST00000616000
  CDS Start-End: 229-2232
aaaaagggtttaccaatgagacacatgttgcctccttcatggaaaccctaggagaagaaacggacagattccccttccctgcctccgccccagcccagccccagcggtccgtctcactcggttgttgctgtaatgctggtctcctgtctgtgtgcggcactgcagatgtggcgggcaggggcttgggagctctggggcaggcgctgaaggcaggagaagggccagagaatgtcgtcccagccagcagggaaccagacctcccccggggccacagaggactactcctatggcagctggtacatcgatgagccccaggggggcgaggagctccagccagagggggaagtgccctcctgccacaccagcataccacccggcctgtaccacgcctgcctggcctcgctgtcaatccttgtgctgctgctcctggccatgctggtgaggcgccgccagctctggcctgactgtgtgcgtggcaggcccggcctgcccagccctgtggatttcttggctggggacaggccccgggcagtgcctgctgctgttttcatggtcctcctgagctccctgtgtttgctgctccccgacgaggacgcattgcccttcctgactctcgcctcagcacccagccaagatgggaaaactgaggctccaagaggggcctggaagatactgggactgttctattatgctgccctctactaccctctggctgcctgtgccacggctggccacacagctgcacacctgctcggcagcacgctgtcctgggcccaccttggggtccaggtctggcagagggcagagtgtccccaggtgcccaagatctacaagtactactccctgctggcctccctgcctctcctgctgggcctcggattcctgagcctttggtaccctgtgcagctggtgagaagcttcagccgtaggacaggagcaggctccaaggggctgcagagcagctactctgaggaatatctgaggaacctcctttgcaggaagaagctgggaagcagctaccacacctccaagcatggcttcctgtcctgggcccgcgtctgcttgagacactgcatctacactccacagccaggattccatctcccgctgaagctggtgctttcagctacactgacagggacggccatttaccaggtggccctgctgctgctggtgggcgtggtacccactatccagaaggtgagggcaggggtcaccacggatgtctcctacctgctggccggctttggaatcgtgctctccgaggacaagcaggaggtggtggagctggtgaagcaccatctgtgggctctggaagtgtgctacatctcagccttggtcttgtcctgcttactcaccttcctggtcctgatgcgctcactggtgacacacaggaccaaccttcgagctctgcaccgaggagctgccctggacttgagtcccttgcatcggagtccccatccctcccgccaagccatattctgttggatgagcttcagtgcctaccagacagcctttatctgccttgggctcctggtgcagcagatcatcttcttcctgggaaccacggccctggccttcctggtgctcatgcctgtgctccatggcaggaacctcctgctcttccgttccctggagtcctcgtggcccttctggctgactttggccctggctgtgatcctgcagaacatggcagcccattgggtcttcctggagactcatgatggacacccacagctgaccaaccggcgagtgctctatgcagccacctttcttctcttccccctcaatgtgctggtgggtgccatggtggccacctggcgagtgctcctctctgccctctacaacgccatccaccttggccagatggacctcagcctgctgccaccgagagccgccactctcgaccccggctactacacgtaccgaaacttcttgaagattgaagtcagccagtcgcatccagccatgacagccttctgctccctgctcctgcaagcgcagagcctcctacccaggaccatggcagccccccaggacagcctcagaccaggggaggaagacgaagggatgcagctgctacagacaaaggactccatggccaagggagctaggcccggggccagccgcggcagggctcgctggggtctggcctacacgctgctgcacaacccaaccctgcaggtcttccgcaagacggccctgttgggtgccaatggtgcccagccctgagggcagggaaggtcaacccacctgcccatctgtgctgaggcatgttcctgcctaccatcctcctccctccccggctctcctcccagcatcacaccagccatgcagccagcaggtcctccggatcactgtggttgggtggaggtctgtctgcactgggagcctcaggagggctctgctccacccacttggctatgggagagccagcaggggttctggagaaagaaactggtgggttagggccttggtccaggagccagttgagccagggcagccacatccaggcgtctccctaccctggctctgccatcagccttgaagggcctcgatgaagccttctctggaaccactccagcccagctccacctcagccttggccttcacgctgtggaagcagccaaggcacttcctcaccccctcagcgccacggacctctctggggagtggccggaaagctcccgggcctctggcctgcagggcagcccaagtcatgactcagaccaggtcccacactgagctgcccacactcgagagccagatatttttgtagtttttatgcctttggctattatgaaagaggttagtgtgttccctgcaataaacttgttcctgag

SEQ ID NO: 186956 - DNA, 993 bp, Homo sapiens
  Payload ID: 16810
  Gene Symbol: STRA8
  Gene Name: stimulated by retinoic acid 8
  Uniprot ID: Q7Z7C7
  ENST ID: ENST00000275764
  CDS Start-End: 1-993
atggggaagattgatgtggacaagatcctctttttcaatcaagaaatcaggctgtggcagcttataatggcaacccctgaagaaaacagcaatccccatgacagagcaacaccccagctgccagcacagctgcaggagcttgagcatcgggtggcccggagacggctgtcccaggcccgccaccgagccaccctggcagcgctcttcaacaacctcaggaagacagtgtactctcagtctgatctcatagcctcaaagtggcaggttctgaataaggcaaagagtcatattccagaactggagcaaaccctggataatttgctgaagctgaaagcatccttcaacctggaagatgggcatgcaagcagcttagaggaggtcaagaaagaatatgccagcatgtattctggaaatgacagttttcctcagaatggttcctccccttggtatctcaacttttacaaacagacgatggaccttctgactggcagcgggatcattaccccgcaggaggcggcgctgcccatcgtctccgcggccatctcccacctgtggcagaacctctcggaggagaggaaggccagcctccggcaggcctgggcgcagaagcaccgcggccctgcgaccctggcggaggcctgccgagagccggcctgtgccgagggcagcgtgaaggacagcggcgtggacagccagggggccagctgctcgctggtctccacgcccgaggagatcctttttgaggatgcctttgatgtggcaagcttcctggacaaaagtgaggttccgagtacatctagctccagttcagtgcttgccagctgcaacccagaaaacccagaggagaagtttcagctctatatgcagatcatcaacttttttaaaggccttagctgtgcaaacactcaagtaaagcaggaagcatcctttcccgttgatgaagagatgatcatgttgcagtgcacagagacctttgacgatgaagatttgtaa

SEQ ID NO: 186957 - DNA, 4420 bp, Homo sapiens
  Payload ID: 16811
  Gene Symbol: SCRG1
  Gene Name: stimulator of chondrogenesis 1
  Uniprot ID: O75711
  ENST ID: ENST00000296506
  CDS Start-End: 484-780
ctttcctcttctctctctctctctctctcacacacagacacacaaacacacacacacacacacacacacacttttcttaagggaaaaatcactctgtgttcttttaaaatccctcaggttttatgttttattgctaccagagtctgcctccctgaggttcttgtatagactagttatttccctctgtaaagaagctgttctattcgttctcgcctggtttggaacaaactgaacacttccaaaggaggcagtccttgcagccttgtctccttccactcccctcctccccacagtcctggctggagcagcgagtctgtcgatcccaggccagagacaaggcagacaaaggttcatttgtaaagaagctccttccagcacctcctctcttctccttttgcccaaactcacccagtgagtgtgagcatttaagaagcatcctctgccaagaccaaaaggaaagaagaaaaagggccaaaagccaaaatgaaactgatggtacttgttttcaccattgggctaactttgctgctaggagttcaagccatgcctgcaaatcgcctctcttgctacagaaagatactaaaagatcacaactgtcacaaccttccggaaggagtagctgacctgacacagattgatgtcaatgtccaggatcatttctgggatgggaagggatgtgagatgatctgttactgcaacttcagcgaattgctctgctgcccaaaagacgttttctttggaccaaagatctctttcgtgattccttgcaacaatcaatgagaatcttcatgtattctggagaacaccattcctgatttcccacaaactgcactacatcagtataactgcatttctagtttctatatagtgcaatagagcatagattctataaattcttacttgtctaagacaagtaaatctgtgttaaacaagtagtaataaaagttaattcaatctaatttttctctgtggacattgttggcattggttaaaaattttgcctagaaaatgtaatctatgaggtgttcattatactcagttaaagagttctgtcccccagatgaagagccataggcatggctcaaggattgaaaatactttcagtccttagttgacagttattaaccacatattgaaagaaccaggtataagctgagattcttggaagggagctagaaattttctagtaagaaggaaaaagggaccagcctgggcaacatagtgagaccccctctttacaaaaaaattaaaaaattagcaggttgtgggtgcccacatctgtagttctagttactcaagagggtcatttgaatctagaatttcgagtctgcagtgagctatgattgcactactgcactctagcctgggtgacagagcaagaccctgtctcgaaaaaaaaaaaaaaaaaaaaaaaaggaaaagggaacaatatttgagggtatattatgtatgctaataactttaagtacatttcaggctgggactggtgactaatgcctgtaatcctagcattttgggaggccaaggcgggaagatcacttgagtccaggagtttgagaccagcctgggcaacatagtgagatcctgtctttacaaaaaaaatttaaaaattagctgcatggcggcatgcacctgtagtcccagctatttgggaggctgaggtaggaggatcactcgagcccagaaattcaaggctgcagtgagctaagatgatgccactgaactccaccatggaaccacagagtgagactctgtctcaaacaaacaaacaaaaaccaagaactttaagcacatttcattttactctcttaaaaaacaacaacaaaagccttcaaggtaaatattctcagccccatttttcagctgctaactcaagtttaagatatttgctaaaaatcaaggcagattttcaagagttccaattccaaagcccatatgccacacacagatgtatccttaaaaccatgatacatttcctaaagtatccatttttaagaataacaaaacacacattaaaagaaacataatggatgagaatttaaaagtatcatacattttaaaagtaaataaaacagggaacttcaaaggtattttctgattgttagaggagacagctttggattatgccccataacttaagaggtatgtgactcatattgccatcagaggtaatgtcagaaagtctttcatgttataaaaatgtattcaaagcctgctaagtgccagccattattaagatctgggcatacagtaatgaataaaatggacttatcttcttggaacttgtgctctaacaaaggtgtgattgctataaacaagtaattatttataaatgtgaagcctgctacagagaagtatagggtgccatacaaagtattgtggggaaatgtttgagagacaccataccacacaggcaatctgggagatatcattttatgaataaaagtgacattatttcattaaaatatatccttggaggtccctgatctgtttctggagaccacacccagaacagtatctggtatctaatctgtgtttagtaagtgttactgggctgaaagaccacacccaaaacagtgtctggtatctaatctgtgtaaataagtgttactgggctggaccaaacaattttgaggtagtcacaattcagtgtcttaaagtgtatataaacacggctgggtgcggtggctcacgcctgtaatcccagcactttgggaggcggaggcgggcttatcacgaggtcaggagatcaagaccatcctggctaatacggtgaaacctcgtctctactaaaaatacaaaaaaaaaaaaaaaaaaaattagctgggcgtggtggcaggcgcctctagtcccagctatttgggaggctgaggcaggagaatggcgtgaacccaggaggtggagcttgcagtgagctgagatcgtgccactgcactccagcctgggcgacagagtgagactccgtccccccaaaaaaaaagtgtatataaacacaagtcagaacatgttttcgaacagtgtaagctcctataaaatacatgaagtgaaattgtaaaataatatagataggtaggtagatggataatattagttgttttatcaagatagcatgtgatttgattggcctttctttcttcactgaattgactggtaatgaaatcagcctaactcaataatgaaagtttcatatccattctggaacaatgcatagaataggtaaatttaaaaaaactatcagcaaaccagttttattttctacttggtaggaactctccttgagggggaaaaagcattaaagatccagtgtctccatttacaaatgacacatcagcataaggacatatgtgagacaacaacggctttttagtaaacgttcccttactactgcaatcaaagcctggtaagaaaaattgtatctaacaaagctaaatatttaataaataaaattttataaattattcatcataatgtctttctgaaaatatgaaattcagttatttcttttagaaatgaatgcattatacaagtacacagccttctttatattacaaaataaatgtaaaaacatacattcacacaacttaccttatataactatttctctaacttggtcaatgcatttttaaaaacaatagatttttttttttttttgaaactgagtctcactctgtcacccaggccagagtacagtggcacaatcttgactcactgcaacctctgcctcccaggttcaagtgatacttgtgcttcaacctcctgagtagctgggactacaggcacttgtcaccatgctcagctaatttttgtattttttagtagaaatgaggttttgccatgttggacaggctggtctccaactcctggcctcaaatgatctgcctgccttggcctcccaaagtgttaggattacaggcatgagtttttccaatagattttagttataagacaactaagcttttattaaaattttattattcttctaaacaccatcttgcagcaactgaatgagataggtactgatattatccttgttctatggacaaaaaagctaaggtttaaagatattaagtagtttgtctaagtttacattatcagtgagcaattgagccagattttgaatatggccagtcttacactagcatctagagtcttaaccactatgttgtttaacagcattacctaatgcattatttcctttacagaaaggcaaacttttacatggataggacacacaattgtacatttcagatagctcatatatgctaaaagcttactgaacaagtatttctgtattgttatctttgactttctatatcattgttcttactgtgaatcccacgttactgagcacaaagttgacagtaatacatattaatagctcacctctttttaattaaaattcatcttttcttcatcgtaa

SEQ ID NO: 186958 - DNA, 1642 bp, Homo sapiens
  Payload ID: 16811
  Gene Symbol: SCRG1
  Gene Name: stimulator of chondrogenesis 1
  ENST ID: ENST00000512188
  CDS Start-End: 869-1147
gtagtgagggggaagttgcagacctatgtaactttggaaatgagtagagtctgtcaaactaaaggtaaaagacaccgtatataaacactgtactccagctgataaaattgtttaccatgagaaaacaccattcagctgctttaagtttctgactgtccagttaagaactgtttcaagccaaatatgaacagaagatggacggaggaaacacagtaaaagagagacgactctgtggctcacagagagcaggctaagagcacagttttgtcttggtttccagtttgtgctccactacttatcagctgtgtgatcttggccaagtgcttaatttttttgaaccccagttcccccatctggaaactacctcatgggaggtggcatcagttcaccctcttacacaacagctacttggtgattctgctgtctcttcaagggccttactgacgattcctcagtagaacctgttttcctgagtctcacttcagcaacataaagctaagtttggtcctggctggagcagcgagtctgtcgatcccaggccagagacaaggcagacaaaggttcatttgtaaagaagctccttccagcacctcctctcttctccttttgcccaaactcacccagtgagtgtgagcatttaagaagcatcctctgccaagaccaaaaggaaagaagaaaaaggctatgaaaagctctcccaaatgctggtccttttctccagtgatgatgatttactgtgtccaggaaaagaaggagaatgatgcaagactgaatattaatatcatcttctggcatgctctaaaagcctgatcacttttagggaggatgtggattttgtttttctatggatgaagggccaaaagccaaaatgaaactgatggtacttgttttcaccattgggctaactttgctgctaggagttcaagccatgcctgcaaatcgcctctcttgctacagaaagatactaaaagatcacaactgtcacaaccttccggaaggagtagctgacctgacacagattgatgtcaatgtccaggatcatttctgggatgggaagggatgtgagatgatctgttactgcaacttcagcgaattgctctgctgcccaaaatgtcatcatattttcatccttctaagaaatctgtgaaatagaaaaggtagatataaccatcttaccaaggaaaggtgcagagttgaagtgaccagtactatcccacataactagctaatatcaacactgggattagaacccacgtgttctgattaagaacagatttttcttctaccaagccagctggttctcaaagtgtggttcccagaacagcagcttcagcatcacctgagtttttaaaattgcatatccatccttggactcctccccagacctactgaatcagaaactctggagagacgttttctttggaccaaagatctctttcgtgattccttgcaacaatcaatgagaatcttcatgtattctggagaacaccattcctgatttcccacaaactgcactacatcagtataactgcatttctagtttctatatagtgcaatagagcatagattctataaattcttacttgtctaagacaagtaaatctgtgttaaacaagtagtaataaaagttaattcaatctaa

SEQ ID NO: 186959 - DNA, 1472 bp, Homo sapiens
  Payload ID: 16812
  Gene Symbol: STUB1
  Gene Name: STIP1 homology and U-box containing protein 1, E3 ubiquitin protein ligase
  Uniprot ID: Q9UNE7
  ENST ID: ENST00000219548
  CDS Start-End: 251-1162
tggagcgttcctcccagcccccgacgtcgcgggcccagtgtccccgtccaggctggttgggcgcacgcgcggccccactcgcccccacgcgtgcgtccccgctggtcccgcccccggccggaagttccggcggcggagctgggccgggcccgagcggatcgcgggctcgggctgcggggctccggctgcgggcgctgggccgcgaggcgcggagcttgggagcggagcccaggccgtgccgcgcggcgccatgaagggcaaggaggagaaggagggcggcgcacggctgggcgctggcggcggaagccccgagaagagcccgagcgcgcaggagctcaaggagcagggcaatcgtctgttcgtgggccgaaagtacccggaggcggcggcctgctacggccgcgcgatcacccggaacccgctggtggccgtgtattacaccaaccgggccttgtgctacctgaagatgcagcagcacgagcaggccctggccgactgccggcgcgccctggagctggacgggcagtctgtgaaggcgcacttcttcctggggcagtgccagctggagatggagagctatgatgaggccatcgccaatctgcagcgagcttacagcctggccaaggagcagcggctgaacttcggggacgacatccccagcgctcttcgaatcgcgaagaagaagcgctggaacagcattgaggagcggcgcatccaccaggagagcgagctgcactcctacctctccaggctcattgccgcggagcgtgagagggagctggaagagtgccagcgaaaccacgagggtgatgaggacgacagccacgtccgggcccagcaggcctgcattgaggccaagcacgacaagtacatggcggacatggacgagcttttttctcaggtggatgagaagaggaagaagcgagacatccccgactacctgtgtggcaagatcagctttgagctgatgcgggagccgtgcatcacgcccagtggcatcacctacgaccgcaaggacatcgaggagcacctgcagcgtgtgggtcattttgaccccgtgacccggagccccctgacccaggaacagctcatccccaacttggctatgaaggaggttattgacgcattcatctctgagaatggctgggtggaggactactgaggttccctgccctacctggcgtcctggtccaggggagccctgggcagaagcccccggcccctatacatagtttatgttcctggccaccccgaccgcttcccccaagttctgctgttggactctggactgtttcccctctcagcatcgcttttgctgggccgtgatcgtccccctttgtgggctggaaaagcaggtgagggtgggctgggctgaggccattgccgccactatctgtgtaataaaatccgtgagcacgaggtgggacgtgctggtgtgtgaccggcagtcctgccagctgttttggctagcc

SEQ ID NO: 186960 - DNA, 743 bp, Homo sapiens
  Payload ID: 16812
  Gene Symbol: STUB1
  Gene Name: STIP1 homology and U-box containing protein 1, E3 ubiquitin protein ligase
  ENST ID: ENST00000567173
  CDS Start-End: 103-743
cccgagcggatcgcgggctcgggctgcggggctccggctgcgggcgctgggccgcgaggcgcggagcttgggagcggagcccaggccgtgccgcgcggcgccatgaagggcaaggaggagaaggagggcggcgcacggctgggcgctggcggcggaagccccgagaagagcccgagcgcgcaggagctcaaggagcagggcaatcgtctgttcgtgggccgaaagtacccggaggcggcggcctgctacggccgcgcgatcatgcagcagcacgagcaggccctggccgactgccggcgcgccctggagctggacgggcagtctgtgaaggcgcacttcttcctggggcagtgccagctggagatggagagctatgatgaggccatcgccaatctgcagcgagcttacagcctggccaaggagcagcggctgaacttcggggacgacatccccagcgctcttcgaatcgcgaagaagaagcgctggaacagcattgaggagcggcgcatccaccaggagagcgagctgcactcctacctctccaggctcattgccgcggagcgtgagagggagctggaagagtgccagcgaaaccacgagggtgatgaggacgacagccacgtccgggcccagcaggcctgcattgaggccaagcacgacaagtacatggcggacatggacgagcttttttctcaggtggatgagaagaggaagaagcgagacatccccgactacctgtgtgg

SEQ ID NO: 186961 - DNA, 875 bp, Homo sapiens
  Payload ID: 16812
  Gene Symbol: STUB1
  Gene Name: STIP1 homology and U-box containing protein 1, E3 ubiquitin protein ligase
  Uniprot ID: Q9UNE7
  ENST ID: ENST00000564370
  CDS Start-End: 173-868
tgagaaacctagtttcttgattctagccagagcgcagaagctgggacgggccgtgggtcagagtgggcacgctgagcctacgccctcatgcggctggcccggccttggtccctagacccggaacccgctggtggccgtgtattacaccaaccgggccttgtgctacctgaagatgcagcagcacgagcaggccctggccgactgccggcgcgccctggagctggacgggcagtctgtgaaggcgcacttcttcctggggcagtgccagctggagatggagagctatgatgaggccatcgccaatctgcagcgagcttacagcctggccaaggagcagcggctgaacttcggggacgacatccccagcgctcttcgaatcgcgaagaagaagcgctggaacagcattgaggagcggcgcatccaccaggagagcgagctgcactcctacctctccaggctcattgccgcggagcgtgagagggagctggaagagtgccagcgaaaccacgagggtgatgaggacgacagccacgtccgggcccagcaggcctgcattgaggccaagcacgacaagtacatggcggacatggacgagcttttttctcaggtggatgagaagaggaagaagcgagacatccccgactacctgtgtggcaagatcagctttgagctgatgcgggagccgtgcatcacgcccagtggcatcacctacgaccgcaaggacatcgaggagcacctgcagcgtgtgggtcattttgaccccgtgacccggagccccctgacccaggaacagctcatccccaacttggctatgaaggaggttattgacgcattcatctctgagaatggctgggtggaggactactgaggttccc

SEQ ID NO: 186962 - DNA, 729 bp, Homo sapiens
  Payload ID: 16812
  Gene Symbol: STUB1
  Gene Name: STIP1 homology and U-box containing protein 1, E3 ubiquitin protein ligase
  ENST ID: ENST00000564316
  CDS Start-End: 1-472
catccccagcgctcttcgaatcgcgaagaagaagcgctggaacagcattgaggagcggcgcatccaccaggagagcgagctgcactcctacctctccaggctcattgccgcggagcgtgagagggagctggaagagtgccagcgaaaccacgagggtgatgaggacgacagccacgtccgggcccagcaggcctgcattgaggccaagcacgtggatgagaagaggaagaagcgagacatccccgactacctgtgtggcaagatcagctttgagctgatgcgggagccgtgcatcacgcccagtggcatcacctacgaccgcaaggacatcgaggagcacctgcagcgtgtgggtcattttgaccccgtgacccggagccccctgacccaggaacagctcatccccaacttggctatgaaggaggttattgacgcattcatctctgagaatggctgggtggaggactactgaggttccctgccctacctggcgtcctggtccaggggagccctgggcagaagcccccggcccctatacatagtttatgttcctggccaccccgaccgcttcccccaagttctgctgttggactctggactgtttcccctctcagcatcgcttttgctgggccgtgatcgtccccctttgtgggctggaaaagcaggtgagggtgggctgggctgaggccattgccgccactatctgtgtaataaaatccgtgagcacga

SEQ ID NO: 186963 - DNA, 1560 bp, Homo sapiens
  Payload ID: 16812
  Gene Symbol: STUB1
  Gene Name: STIP1 homology and U-box containing protein 1, E3 ubiquitin protein ligase
  Uniprot ID: Q9UNE7
  ENST ID: ENST00000565677
  CDS Start-End: 608-1303
caggccagggcctacgcgaacgcccacccttaagagcgcggggacagggaactggagcgttcctcccagcccccgacgtcgcgggcccagtgtccccgtccaggctggttgggcgcacgcgcggccccactcgcccccacgcgtgcgtccccgctggtcccgcccccggccggaagttccggcggcggagctgggccgggcccgagcggatcgcgggctcgggctgcggggctccggctgcgggcgctgggccgcgaggcgcggagcttgggagcggagcccaggccgtgccgcgcggcgccatgaagggcaaggaggagaaggagggcggcgcacggctgggcgctggcggcggaagccccgagaagagcccgagcgcgcaggagctcaaggagcagggcaatcgtctgttcgtgggccgaaagtacccggaggcggcggcctgctacggccgcgcgatcccagagcgcagaagctgggacgggccgtgggtcagagtgggcacgctgagcctacgccctcatgcggctggcccggccttggtccctagacccggaacccgctggtggccgtgtattacaccaaccgggccttgtgctacctgaagatgcagcagcacgagcaggccctggccgactgccggcgcgccctggagctggacgggcagtctgtgaaggcgcacttcttcctggggcagtgccagctggagatggagagctatgatgaggccatcgccaatctgcagcgagcttacagcctggccaaggagcagcggctgaacttcggggacgacatccccagcgctcttcgaatcgcgaagaagaagcgctggaacagcattgaggagcggcgcatccaccaggagagcgagctgcactcctacctctccaggctcattgccgcggagcgtgagagggagctggaagagtgccagcgaaaccacgagggtgatgaggacgacagccacgtccgggcccagcaggcctgcattgaggccaagcacgacaagtacatggcggacatggacgagcttttttctcaggtggatgagaagaggaagaagcgagacatccccgactacctgtgtggcaagatcagctttgagctgatgcgggagccgtgcatcacgcccagtggcatcacctacgaccgcaaggacatcgaggagcacctgcagcgtgtgggtcattttgaccccgtgacccggagccccctgacccaggaacagctcatccccaacttggctatgaaggaggttattgacgcattcatctctgagaatggctgggtggaggactactgaggttccctgccctacctggcgtcctggtccaggggagccctgggcagaagcccccggcccctatacatagtttatgttcctggccaccccgaccgcttcccccaagttctgctgttggactctggactgtttcccctctcagcatcgcttttgctgggccgtgatcgtccccctttgtgggctggaaaagcaggtgagggtgggctgggctgaggccattgccgccactatctgtgtaataaaatccgtgagcacga

SEQ ID NO: 186964 - DNA, 684 bp, Homo sapiens
  Payload ID: 16812
  Gene Symbol: STUB1
  Gene Name: STIP1 homology and U-box containing protein 1, E3 ubiquitin protein ligase
  ENST ID: ENST00000566408
  CDS Start-End: 1-557
aggcgcacttcttcctggggcagtgccagctggagatggagagctatgatgaggccatcgccaatctgcagcgagcttacagcctggccaaggagcagcggctgaacttcggggacgacatccccagcgctcttcgaatcgcgaagaagaagcgctggaacagcattgaggagcggcgcatccaccaggagagcgagctgcactcctacctctccaggctcattgccgcggagcgtgagagggagctggaagagtgccagcgaaaccacgagggtgatgaggacgacagccacgtccgggcccagcaggcctgcattgaggccaagcacgacaagtacatggcggacatggacgagcttttttctcaggtggatgagaagaggaagaagcgagacatccccgactacctgtgtggcaagatcagctttgagctgatgcgggagccgtgcatcacgcccagtggcatcacctacgaccgcaaggacatcgaggagcacctgcaggtgaggcctgcggctgggggagcagggccagtggcatggtcctgggccccatgactgccctctgcccttcttgtcactgcagcgtgtgggtcattttgaccccgtgacccggagccccctgacccaggaacagctcatccccaacttggctatgaaggaggttattgacgcattcatctct

SEQ ID NO: 186965 - DNA, 337 bp, Homo sapiens
  Payload ID: 16812
  Gene Symbol: STUB1
  Gene Name: STIP1 homology and U-box containing protein 1, E3 ubiquitin protein ligase
  ENST ID: ENST00000565813
  CDS Start-End: 1-74
tcatccccaacttggctatgaaggaggttattgacgcattcatctctgagaatggctgggtggaggactactgaggttccctgccctacctggcgtcctggtccaggggagccctgggcagaagcccccggcccctatacatagtttatgttcctggccaccccgaccgcttcccccaagttctgctgttggactctggactgtttcccctctcagcatcgcttttgctgggccgtgatcgtccccctttgtgggctggaaaagcaggtgagggtggagatgaagacgctggtgtcaaggttgagcgtagcatgccaccagcggtcggggaagtaca

SEQ ID NO: 186966 - DNA, 3010 bp, Homo sapiens
  Payload ID: 16813
  Gene Symbol: STOM
  Gene Name: stomatin
  Uniprot ID: P27105
  ENST ID: ENST00000286713
  CDS Start-End: 19-885
gactgcgtctcgggcagcatggccgagaagcggcacacacgggactccgaagcccagcggctccccgactccttcaaggacagccccagtaagggccttggaccttgcggatggattttggtggcgttctcattcttattcaccgttataactttcccaatctcaatatggatgtgcataaagattataaaagagtatgaaagagccatcatctttagattgggtcgcattttacaaggaggagccaaaggacctggtttgttttttattctgccatgcactgacagcttcatcaaagtggacatgagaactatttcatttgatattcctcctcaggagatcctcacaaaggattcagtgacaattagcgtggatggtgtggtctattaccgcgttcagaatgcaaccctggctgtggcaaatatcaccaacgctgactcagcaacccgtcttttggcacaaactactctgaggaatgttctgggcaccaagaatctttctcagatcctctctgacagagaagaaattgcacacaacatgcagtctactctggatgatgccactgatgcctggggaataaaggtggagcgtgtggaaattaaggatgtgaaactacctgtgcagctccagagagctatggctgcagaagcagaagcgtcccgcgaggcccgcgccaaggttattgcagccgaaggagaaatgaatgcatccagggctctgaaagaagcctccatggtcatcactgaatctcctgcagcccttcagctccgatacctgcagacactgaccaccattgctgctgagaaaaactcaacaattgtcttccctctgcccatagatatgctgcaaggaatcataggggcaaaacacagccatctaggctagtgtagagatgagcgctagccttccaagcatgaagtcggggaccaaattagcctttaactcataaagagagggtagggcttttctttttccatatgtcaattgtggtgttcccagaatgtatagcagttataaaaataggtgaaagaattgttagcttgtaaatactgagagattggtgatttatataaggtaatctgttagtcttaaaatagttaaaagtttgtatttttagattattatgtagtaggttagatccctcttgttttgacttccactgactcattctgaaccccctaagcacccaggccagaggcaagaacctgggctgtaactgccacctgacaccgctgactggctaaatgctttgcagaaagtgatgaccttacaccacaaccagcttctccaggtcatatgtgccttacctccagagagtctttttttttttttttctgagatggagtttcactcttgttgcccaggctggagtgcaatagcatgatctcggctcactgcaacctccgcctcctgggttcaagagattctcctgcctcagcctccccagtagctgggattacaggctcatgccaccatgcccagctaatttttgtattattattattgttttttagtagagacggggtttcaccatgttggccaggctagtcacgaactcctaacctcaggtgatccacccacctctgcctcccaaagtgctgggattacaggcatgagctaccacacctggtttggagagtcttaattaaggaaatttccctaatgttcatttattttctaaatccagaccgtgtttcagaataatccttacttgagagtagccattttcttgcctgtacttgtcagaactagaggaaatagccaagactaatgaaaaagattactctaacccttaaaagacttttaaattcactactagagtggtcattttaaaaatacatccatgttttaacttatttgagccttctttatgagtaaatgattcctccttgttctgtctttcaaaccagctaaatatttgtcacaaaagtgcttttttctcactgttgcctattttcatatatcaggttttaaatagttttaattttttaataaaattttctctacgttctatatgcaattgttatatatctatttgaatagctgaaggactaaaatacttttttaagagataacttcaggaaaccattatattttactatctgcatgctgttaactgtggtacactgtgaaatatgttgattacaaacccattcattacatagtataaggaattcacagtatattgactatatagtgtctaatgatcttgggcagatactgtcaaacttacaatatctatatagatgtaggtctttttaaatttacctagtcattcttctatcatgtatattgatgctgaaagaggaactggtcagctcctctggacaacaaattcttagtctataatattaggagacatcttctgttttgcaaatgtctgtgaatctgagcaacctggcattctgcttactggccagaaagctggcgggtgacatttgtaacatttcctctttgagactctgagttcacctagagaagtctaagcataacagctttctttcccagcacgagcctttatagctctctttagctcaaccactctgtccatccagccaatggatgtcccttcccctgtaccccaatttcaagcttattttaggaagccttgaactaccatgtatcctggctcctagctgagtttattagaggtatggagcagtgcaacttaaactcaagttgcacttacattttgaattttaaaatgatggttttatctgttgtgtgaagtggttcacccttgaggaccaggagcctccatatcctgactgaaaaccttttctgagacttagagtaacagtgcttttggttccttgagttctcctgtctccagataccaaatgaccttgacttttctgccttgtgaattcgtagtccaatcagctgaaattaaatcacttgggagggacgcatagaaggagctctaggaacacagtgccagtgcagaagtttctccaggtggcctccctttccaacaatgtacataataaagtgtatgcactttcactaa

SEQ ID NO: 186967 - DNA, 870 bp, Homo sapiens
  Payload ID: 16813
  Gene Symbol: STOM
  Gene Name: stomatin
  Uniprot ID: P27105
  ENST ID: ENST00000347359
  CDS Start-End: 67-438
agggcattcccggcggctccgggtttggcaacgaggacgggggagtgcgactgcgtctcgggcagcatggccgagaagcggcacacacgggactccgaagcccagcggctccccgactccttcaaggacagccccagtaagggccttggaccttgcggatggattttggtggcgttctcattcttattcaccgttataactttcccaatctcaatatggatgtgcataaaggttattgcagccgaaggagaaatgaatgcatccagggctctgaaagaagcctccatggtcatcactgaatctcctgcagcccttcagctccgatacctgcagacactgaccaccattgctgctgagaaaaactcaacaattgtcttccctctgcccatagatatgctgcaaggaatcataggggcaaaacacagccatctaggctagtgtagagatgagcgctagccttccaagcatgaagtcggggaccaaattagcctttaactcataaagagagggtagggcttttctttttccatatgtcaattgtggtgttcccagaatgtatagcagttataaaaataggtgaaagaattgttagcttgtaaatactgagagattggtgatttatataaggtaatctgttagtcttaaaatagttaaaagtttgtatttttagattattatgtagtaggttagatccctcttgttttgacttccactgactcattctgaaccccctaagcacccaggccagaggcaagaacctgggctgtaactgccacctgacaccgctgactggctaaatgctttgcagaaagtgatgaccttacaccacaaccagcttctccaggtcatatgtgccttacctccagagag

SEQ ID NO: 186968 - DNA, 1257 bp, Homo sapiens
  Payload ID: 16813
  Gene Symbol: STOM
  Gene Name: stomatin
  ENST ID: ENST00000538954
  CDS Start-End: 118-624
acctcgattgggggcggggcggcaatctgggtcttgtgcctctggctcctcagggcattcccggcggctccgggtttggcaacgaggacgggggagtgcgactgcgtctcgggcagcatggccgagaagcggcacacacgggactccgaagcccagcggctccccgactccttcaaggacagccccagtaagggccttggaccttgcggatggattttggtggcgttctcattcttattcaccgttataactttcccaatctcaatatggatgtgcataaagattataaaagagtatgaaagagccatcatctttagattgggtcgcattttacaaggaggagccaaaggacctggtttgttttttattctgccatgcactgacagcttcatcaaagtggacatgagaactatttcatttgatattcctcctcaggagatcctcacaaaggattcagtgacaattagcgtggatggtgtggtctattaccgcgttcagaatgcaaccctggctgtggcaaatatcaccaacgctgactcagcaacccgtcttttggcacaaactactctgaggaatgttctgggcaccaagaatctttctcagatttcctctttgagactctgagttcacctagagaagtctaagcataacagctttctttcccagcacgagcctttatagctctctttagctcaaccactctgtccatccagccaatggatgtcccttcccctgtaccccaatttcaagcttattttaggaagccttgaactaccatgtatcctggctcctagctgagtttattagaggtatggagcagtgcaacttaaactcaagttgcacttacattttgaattttaaaatgatggttttatctgttgtgtgaagtggttcacccttgaggaccaggagcctccatatcctgactgaaaaccttttctgagacttagagtaacagtgcttttggttccttgagttctcctgtctccagataccaaatgaccttgacttttctgccttgtgaattcgtagtccaatcagctgaaattaaatcacttgggagggacgcatagaaggagctctaggaacacagtgccagtgcagaagtttctccaggtggcctccctttccaacaatgtacataataaagtgtatgcactttcactaatatttttggggtgagagtctgtttcggcctgtattgaatgtctgtggatttccgttttcagaagtagtacattagatcctccggttctg

SEQ ID NO: 186969 - DNA, 2169 bp, Homo sapiens
  Payload ID: 16814
  Gene Symbol: STOML1
  Gene Name: stomatin (EPB72)-like 1
  Uniprot ID: Q9UBI4
  ENST ID: ENST00000316900
  CDS Start-End: 383-1450
gcgccgccgcgggtggccgcgcgggtgaagccggaagcagcagccaggagggcggggccgcgtagggcccactggccagggagggcgccgcgcggaggcgcggggcgtgtctcctgtcaaaagccatgctcggcaggtctgggtaccgggcgctgcccctgggtgattttgaccgcttccagcagtcgagcttcggctttctgggctcgcagaagggctgcttgtccccggagcggggcggcgtggggacaggggccggctaaggcatcatcttcataaggactcctggaaagcacacttctggggctgatggtataggaggaatgtgttttgccagcagtattcagtgcatgtttacagatgcccaggtgctcctggctccatgccagatgtaccccagagctggccctcctgcctctgtcatggcctcatcagtttcctggggttcttgctgctgttggtcaccttccccatttctggctggtttgccctgaagattgtgcccacctacgagcggatgattgtgttccgcctgggccggatccgcaccccccagggacctggcatggttctgctcttgcccttcattgactcctttcagagggtggatctgaggacacgagccttcaacgtccctccctgcaagctggcctctaaggacggggctgtgctgtccgtgggagccgatgtccagtttcgcatctgggacccggtgctgtcggtgatgactgtgaaagacctgaacacagccacacgcatgacagcccagaacgccatgaccaaggccctgctcaagaggccgctgcgggagatccagatggagaagctcaagatcagcgaccagcttctgctggagatcaacgatgtgaccagggcctgggggctggaggtagaccgcgtggagctggcagtggaggccgtgctccagccgccccaggacagcccagctgggcccaacctggacagcaccctccagcagctggccctgcacttcctgggaggaagcatgaactcaatggcaggaggtgccccgtccccggggccagacaccgtggagatggtgagtgaagttgagccacctgcccctcaagttggtgccaggtccagtccgaagcagcctctggcggaggggctactgactgctctacagcccttcctgtctgaggccctggtcagccaagtcggggcctgctaccagttcaatgtcgtcctgcccagcggcacccaaagcgcctacttcctggacctcactacaggacgaggaagagtgggacacggggtgcctgatggcatccctgatgtggtggtggagatggccgaggcagacctgcgggccctgctatgcagagagctgcggcccctgggggcctacatgagtggacggctgaaggtgaagggcgacctggctatggccatgaagctggaggctgtcctcagggccttgaagtagcagccttggctgactttccagagcccagtcccaagcctggcaccaagcctgaggggcctcttggaggaggaggtgttcatctgcaccacagagagttgaggccctaacaaatttcaggcccagccaagagcccatgaatggaggctgcaggaggctgagtccggctgccatgcacgtctcccctacagtggttctctggacaaggctttgtccatcccggtccccagctgagtgcccagcgctgagctgggtgcacggtgtgattccaggaggagagccaggcctgccctgccctgctggcttcctgactggagagacaggacccacagaaacagcctgacagcagctggtttggtccttgtgtgagggaccaagcatgtggcccaggctctaagctctgcggggattggagagggatggggagggaagggaaggcagctccaagaagaggtccctgtggcgaagttacctggggatcctggctggcccaccttcctggctgcagtccaggcccgtgctggcgggattgggcatgggaaggagcagggcctgctgcttccctggcgctgctcccaaagatttctgactcatctgccagctctgtcctgcatgcctggcgagctggggcccagggcagcatgaaggagagccctgcgttctgtgcttcttaccagaggtttgcaagcctcagacaaataaatgtggtgtttacaatgtat

SEQ ID NO: 186970 - DNA, 1891 bp, Homo sapiens
  Payload ID: 16814
  Gene Symbol: STOML1
  Gene Name: stomatin (EPB72)-like 1
  Uniprot ID: Q9UBI4
  ENST ID: ENST00000316911
  CDS Start-End: 126-1172
gcgccgccgcgggtggccgcgcgggtgaagccggaagcagcagccaggagggcggggccgcgtagggcccactggccagggagggcgccgcgcggaggcgcggggcgtgtctcctgtcaaaagccatgctcggcaggtctgggtaccgggcgctgcccctgggtgattttgaccgcttccagcagtcgagcttcggctttctgggctcgcagaagggctgcttgtccccggagcggggcggcgtggggacaggggccgatgtaccccagagctggccctcctgcctctgtcatggcctcatcagtttcctggggttcttgctgctgttggtcaccttccccatttctggctggtttgccctgaagctggcctctaaggacggggctgtgctgtccgtgggagccgatgtccagtttcgcatctgggacccggtgctgtcggtgatgactgtgaaagacctgaacacagccacacgcatgacagcccagaacgccatgaccaaggccctgctcaagaggccgctgcgggagatccagatggagaagctcaagatcagcgaccagcttctgctggagatcaacgatgtgaccagggcctgggggctggaggtagaccgcgtggagctggcagtggaggccgtgctccagccgccccaggacagcccagctgggcccaacctggacagcaccctccagcagctggccctgcacttcctgggaggaagcatgaactcaatggcaggaggtgccccgtccccggggccagcagacaccgtggagatggtgagtgaagttgagccacctgcccctcaagttggtgccaggtccagtccgaagcagcctctggcggaggggctactgactgctctacagcccttcctgtctgaggccctggtcagccaagtcggggcctgctaccagttcaatgtcgtcctgcccagcggcacccaaagcgcctacttcctggacctcactacaggacgaggaagagtgggacacggggtgcctgatggcatccctgatgtggtggtggagatggccgaggcagacctgcgggccctgctatgcagagagctgcggcccctgggggcctacatgagtggacggctgaaggtgaagggcgacctggctatggccatgaagctggaggctgtcctcagggccttgaagtagcagccttggctgactttccagagcccagtcccaagcctggcaccaagcctgaggggcctcttggaggaggaggtgttcatctgcaccacagagagttgaggccctaacaaatttcaggcccagccaagagcccatgaatggaggctgcaggaggctgagtccggctgccatgcacgtctcccctacagtggttctctggacaaggctttgtccatcccggtccccagctgagtgcccagcgctgagctgggtgcacggtgtgattccaggaggagagccaggcctgccctgccctgctggcttcctgactggagagacaggacccacagaaacagcctgacagcagctggtttggtccttgtgtgagggaccaagcatgtggcccaggctctaagctctgcggggattggagagggatggggagggaagggaaggcagctccaagaagaggtccctgtggcgaagttacctggggatcctggctggcccaccttcctggctgcagtccaggcccgtgctggcgggattgggcatgggaaggagcagggcctgctgcttccctggcgctgctcccaaagatttctgactcatctgccagctctgtcctgcatgcctggcgagctggggcccagggcagcatgaaggagagccctgcgttctgtgcttcttaccagaggtttgcaagcctcagacaaataaatgtggtgtttacaatgtat

SEQ ID NO: 186971 - DNA, 984 bp, Homo sapiens
  Payload ID: 16814
  Gene Symbol: STOML1
  Gene Name: stomatin (EPB72)-like 1
  Uniprot ID: Q9UBI4
  ENST ID: ENST00000359750
  CDS Start-End: 1-984
atgctcggcaggtctgggtaccgggcgctgcccctgggtgattttgaccgcttccagcagtcgagcttcggctttctgggctcgcagaagggctgcttgtccccggagcggggcggcgtggggacaggggccgatgtaccccagagctggccctcctgcctctgtcatggcctcatcagtttcctggggttcttgctgctgttggtcaccttccccatttctggctggtttgccctgaagattgtgcccacctacgagcggatgattgtgttccgcctgggccggatccgcaccccccagggacctggcatggttctgctcttgcccttcattgactcctttcagagggtggatctgaggacacgagccttcaacgtccctccctgcaagctggcctctaaggacggggctgtgctgtccgtgggagccgatgtccagtttcgcatctgggacccggtgctgtcggtgatgactgtgaaagacctgaacacagccacacgcatgacagcccagaacgccatgaccaaggccctgctcaagaggccgctgcgggagatccagatggagaagctcaagatcagcgaccagcttctgctggagatcaacgatgtgaccagggcctgggggctggaggtagaccgcgtggagctggcagtggaggccgtgctccagccgccccaggacagcccagctgggcccaacctggacagcaccctccagcagctggccctgcacttcctgggaggaagcatgaactcaatggcaggaggtgccccgtccccggggccaggacgaggaagagtgggacacggggtgcctgatggcatccctgatgtggtggtggagatggccgaggcagacctgcgggccctgctatgcagagagctgcggcccctgggggcctacatgagtggacggctgaaggtgaagggcgacctggctatggccatgaagctggaggctgtcctcagggccttgaagtag

SEQ ID NO: 186972 - DNA, 6336 bp, Homo sapiens
  Payload ID: 16814
  Gene Symbol: STOML1
  Gene Name: stomatin (EPB72)-like 1
  Uniprot ID: Q9UBI4
  ENST ID: ENST00000541638
  CDS Start-End: 126-1322
gcgccgccgcgggtggccgcgcgggtgaagccggaagcagcagccaggagggcggggccgcgtagggcccactggccagggagggcgccgcgcggaggcgcggggcgtgtctcctgtcaaaagccatgctcggcaggtctgggtaccgggcgctgcccctgggtgattttgaccgcttccagcagtcgagcttcggctttctgggctcgcagaagggctgcttgtccccggagcggggcggcgtggggacaggggccgatgtaccccagagctggccctcctgcctctgtcatggcctcatcagtttcctggggttcttgctgctgttggtcaccttccccatttctggctggtttgccctgaagattgtgcccacctacgagcggatgattgtgttccgcctgggccggatccgcaccccccagggacctggcatggttctgctcttgcccttcattgactcctttcagagggtggatctgaggacacgagccttcaacgtccctccctgcaagctggcctctaaggacggggctgtgctgtccgtgggagccgatgtccagtttcgcatctgggacccggtgctgtcggtgatgactgtgaaagacctgaacacagccacacgcatgacagcccagaacgccatgaccaaggccctgctcaagaggccgctgcgggagatccagatggagaagctcaagatcagcgaccagcttctgctggagatcaacgatgtgaccagggcctgggggctggaggtagaccgcgtggagctggcagtggaggccgtgctccagccgccccaggacagcccagctgggcccaacctggacagcaccctccagcagctggccctgcacttcctgggaggaagcatgaactcaatggcaggaggtgccccgtccccggggccagcagacaccgtggagatggtgagtgaagttgagccacctgcccctcaagttggtgccaggtccagtccgaagcagcctctggcggaggggctactgactgctctacagcccttcctgtctgaggccctggtcagccaagtcggggcctgctaccagttcaatgtcgtcctgcccagcggcacccaaagcgcctacttcctggacctcactacaggacgaggaagagtgggacacggggtgcctgatggcatccctgatgtggtggtggagatggccgaggcagacctgcgggccctgctatgcagagagctgcggcccctgggggcctacatgagtggacggctgaaggtgaagggcgacctggctatggccatgaagctggaggctgtcctcagggccttgaagtagcagccttggctgactttccagagcccagtcccaagcctggcaccaagcctgaggggcctcttggaggaggaggtgttcatctgcaccacagagagttgaggccctaacaaatttcaggcccagccaagagcccatgaatggaggctgcaggaggctgagtccggctgccatgcacgtctcccctacagtggttctctggacaaggctttgtccatcccggtccccagctgagtgcccagcgctgagctgggtgcacggtgtgattccaggaggagagccaggcctgccctgccctgctggcttcctgactggagagacaggacccacagaaacagcctgacagcagctggtttggtccttgtgtgagggaccaagcatgtggcccaggctctaagctctgcggggattggagagggatggggagggaagggaaggcagctccaagaagaggtccctgtggcgaagttacctggggatcctggctggcccaccttcctggctgcagtccaggcccgtgctggcgggattgggcatgggaaggagcagggcctgctgcttccctggcgctgctcccaaagatttctgactcatctgccagctctgtcctgcatgcctggcgagctggggcccagggcagcatgaaggagagccctgcgttctgtgcttcttaccagaggtttgcaagcctcagacaaataaatgtggtgtttacaatgtataaaagagaagaagccaagcggggctcctgggggcatggggtgggctaggagggtccacaaggtccatgctgccagcccaggcagggattgacatcctggtggctgacacagacagaccctcacaatatttgaagctccttctcctgagtgtctcaaagcccctggaagcaagggtggggctgggtggggagttctgttcctctttgtagtgggatacaggttcaccaggaaaggaaggcatgagtgtgccagagtgtcctgcaaacactgaggggcaggtggggtggtcatatcccattcaagagaggagttggggccaccgtcagcttcccctcctggtacactctgtcactgcttctccgctcgctgacgggaaggaaacagtcattgaggtctggccccaggcccagcccagccctgctttctgctccagtactctcgcccaaaccccaggggccccagagaagggggcctctgacttcttgagtcctaagaaaggaatcttactccttggagagacttctgggaaaaacaaaaccacaaaaatcaaagcctccccttaagaacagcccccagcctgtcctgtggcaccgcaacttccctctcccccaaggggtctctgcccttcctgggtgcctggctctgtcttgtttgctgtctgtccctgcctttgccagacactgccttgtcccgcctcctggaggtcctccacattgcctgaggcacctccctaaagcccagcacagacccctctgtcactgccatggccattgaggttcaggtttccagggccccttcctagagtcccaggctgctgcacctgctgttgcccctttgcctacttggaggcctctcatgggccctcccagggctttctagctgaggctgtctgttccaaagcctgccctccaatccccgcagccacactgtggccaccctttgaggcccagtgagacttgtcctctgtgcccttgcctggctctctgcacccattccacattgtgtgtttctgctccttgcatatatggctgccctccctgctggactgggagcttcctgcatcagcattcacctgtggattccttccattgctattacacagtatatgaagggctgcccaggaaaccccaggcatcttcaccatgaaagctggcacggccccttggctggggtagggctggagggtagggaagacaggaaaaatgagatcacaacttaggggaaacccaaactcttctttgtgagcatgggaagatcaacataacgtttaggggaaaccgaaacttttctggatgtctgtgtaggtggagagtaaggcctgcccctgccatgaatccccaccctgtggaggggagctcgatccttggccagcactccaggactacagaggactgagcagaccctgcagtccacaggggaggaaggacaagggccacctaaagggtcggtgtgaagagggaggaggagggtgtgtgtcaatcagagaaggctttcctgaggaggtgatgtcctccacatcccagctaccaagtaggtggacaataagaagagatggggaaaatcattcagcagaggagaagtccctgcaagggcacagctggaagaggcagtcaggcaactgggcttcggggaactagaacctgaagtaccagacaggttgtgtgcgggcatttgaggggcagggtatagaaatagtaaccattactgtgtgccaaatatgtccttataccggactagacacttcttattatatttttcttcaagataacctggtgaataatgataatagtttaagtatcctagttaatatattaatatataatgtgttattttgatgttattgaaaagtattttatttttttttgaaacaagagtcttactctgttgcccatgttagagtacagtacaatctcagctcactgcaacctctacctcccggattcaagtgattctcctgcctcagacacctgagtagccaggattataggcgcataccaccacacctggttaatttttgtatttttagtagagatgggatttcaccatgttgaccaggctggtctcgaactcctgacctcaagtgatctgcctgcctaggcctcccaaagtgctgggattataggtgtgagccaccgcacctggccttatttttaagcatttaaaaaaaattttttagaccgtcttgctctatcacccaggctggagtgcagtggcatgatcatagctcactgtagccttgaactctggggctcaaacgatcctcttgcctcagcttcctgagtagctgggaccacaggttgtgccaccacaaccggctaatttttaaaatctcttttgtagagataaggatgtctccccatgttgctcaggctggtcttgaactcctgggctcgcaggatcctcccaccacagcctcccaaagtgctgggattacaggtgtgagccactgtacccagccaatatttaaattttggttggctaaacatttaaaaagataggaaagcatattatgaaaattctccctccacacatatttcccatgccttcccccatcccctgcgattagtttcttggtaattcttcctgaaggttttgttttttaaaaaaaaatatatgcaagaaaatccaaatatgtatcttctgggtttttgttgttcctgtttttatacaaatggcaacatagaaacacaatgttgcctttttcacttaacattacccactgaggatctttccatgttaccacagacagcctttccctgtgctttcttgtacttacataggattccacagtatggatgtatcataaattattcaacctgtcgtggaccgatagacattttgattatttcttgtgttttgctattttaaatacttttgcaatgaataacctttaacatgtgctatttgtggtagagtttatctataagataaaatcctagaagtggaattgctaaatcaaagcatttataatttagtaaatattgccagaataccttctctggggattataccaatttacactcccattgtcagtggtgtttttttctcatagtcatgtcaatacactgtgttattaaacttttgggtcttttgacattctggaaagtgaaaatttgtatctcagtgtaatttttttgtttattgttcaagttatttttttgttttttgtttgtttgttttgagacagggtctcactctgtctcccaggctggagtgcagtgcagtgattgtggctcactgcagcctcaacctcccaggcttaaaggatcaccatgcctggctttttttttttttttttttttgtagagacagggccttctcaagctggtctctaactcctggcctcaagtgatcctcccacctggccctggcccgctaactgctaggattacaggcatgagccatctagcccagcctgtttattgtccaattgtttattgctttgtaagtcttggatttctagctccagcaaagaacagggtttggtttggtttggtttctcttcccctagcatttacatattttttaaaggtgtaatttacatacaacaaacacccttttaaaatgtattatttggctggcttgcgcctctaatcccagcactttgggaggccgaggcaggtggatcacctgaggtcaggagtttgagaccagcctgaccgatatggtgaaaccccatctctactaaaaatacaaaatttagccaggcatggtggtacacggctgtagtcccagctactcgggaggctgagacaggagaattgcttgaacccaggaggtggaagttgcagtgagttgagatcatgccactgcactttagcctgggcaacagagtgagactccatctcaaaattaaataaataaagataaaataaaaagtgtcatctgaggtgctttgacaaatgtgaacacctgagtaaccaccaccccctacaatcaaatacaaaacattcccatccactcacaaagttctccacgtcacttcccgtcagtgcttgccacctccagctttgagcagccactgacctttccataaccgctgatcacatttcacttttctagcatttcatatgaatgaaatgagtgcacagtactcttctgtgtctagctttttccccctcactgtaatggttttgagagtaatacatgttattctgtgtatctgtagtttgttgtattgccaacacattccattgtctagatagaggcacaatgtattcattcatccattgatgaacatttgagtagttttcaggtttggttattaaataaagctcctccagacatctgtgtac

SEQ ID NO: 186973 - DNA, 539 bp, Homo sapiens
  Payload ID: 16814
  Gene Symbol: STOML1
  Gene Name: stomatin (EPB72)-like 1
  ENST ID: ENST00000562453
  CDS Start-End: 265-539
aaaagccatgctcggcaggtctgggtaccgggcgctgcccctgggtgattttgaccgcttccagcagtcgagcttcggctttctgggctcgcagaagggctgcttgtccccggagcggggcggcgtggggacaggggccggctaaggcatcatcttcataaggactcctggaaagcacacttctggggctgatggtataggaggaatgtgttttgccagcagtattcagtgcatgtttacagatgcccaggtgctcctggctccatgccagatgtaccccagagctggccctcctgcctctgtcatggcctcatcagtttcctggggttcttgctgctgttggtcaccttccccatttctggctggtttgccctgaagattgtgcccacctacgagcggatgattgtgttccgcctgggccggatccgcaccccccagggacctggcatggttctgctcttgcccttcattgactcctttcagagggtggatctgaggacacgagccttcaacgtccctccctgcaagctggcctctaa

SEQ ID NO: 186974 - DNA, 614 bp, Homo sapiens
  Payload ID: 16814
  Gene Symbol: STOML1
  Gene Name: stomatin (EPB72)-like 1
  ENST ID: ENST00000565240
  CDS Start-End: 202-614
atttgtcctcggctcttatcagccctttaggcctgggaagacgtttcaggtttctatttcgcatagaagaaaccgaggtctaggcagaggaggccaccagcaccctaaaggcacctgctgcagggaaatggaagaattttcgccctagggggcacctctagaagcccgggaactaggcatctcctggatgtgcaggccaaaatgacagatgtaccccagagctggccctcctgcctctgtcatggcctcatcagtttcctggggttcttgctgctgttggtcaccttccccatttctggctggtttgccctgaagattgtgcccacctacgagcggatgattgtgttccgcctgggccggatccgcaccccccagggacctggcatggttctgctcttgcccttcattgactcctttcagagggtggatctgaggacacgagccttcaacgtccctccctgcaagctggcctctaaggacggggctgtgctgtccgtgggagccgatgtccagtttcgcatctgggacccggtgctgtcggtgatgactgtgaaagacctgaacacagccacacgcatgacagcccagaacgccatgaccaaggccctgctcaa

SEQ ID NO: 186975 - DNA, 1849 bp, Homo sapiens
  Payload ID: 16814
  Gene Symbol: STOML1
  Gene Name: stomatin (EPB72)-like 1
  Uniprot ID: Q9UBI4
  ENST ID: ENST00000564777
  CDS Start-End: 75-1118
gcggggccgcgtagggcccactggccagggagggcgccgcgcggaggcgcggggcgtgtctcctgtcaaaagccatgctcggcaggtctgggtaccgggcgctgcccctgggtgattttgaccgcttccagcagtcgagcttcggctttctgggctcgcagaagggctgcttgtccccggagcggggcggcgtggggacaggggccgatgtaccccagagctggccctcctgcctctgtcatggcctcatcagtttcctggggttcttgctgctgttggtcaccttccccatttctggctggtttgccctgaagctggcctctaaggacggggctgtgctgtccgtgggagccgatgtccagtttcgcatctgggacccggtgctgtcggtgatgactgtgaaagacctgaacacagccacacgcatgacagcccagaacgccatgaccaaggccctgctcaagaggccgctgcgggagatccagatggagaagctcaagatcagcgaccagcttctgctggagatcaacgatgtgaccagggcctgggggctggaggtagaccgcgtggagctggcagtggaggccgtgctccagccgccccaggacagcccagctgggcccaacctggacagcaccctccagcagctggccctgcacttcctgggaggaagcatgaactcaatggcaggaggtgccccgtccccggggccagacaccgtggagatggtgagtgaagttgagccacctgcccctcaagttggtgccaggtccagtccgaagcagcctctggcggaggggctactgactgctctacagcccttcctgtctgaggccctggtcagccaagtcggggcctgctaccagttcaatgtcgtcctgcccagcggcacccaaagcgcctacttcctggacctcactacaggacgaggaagagtgggacacggggtgcctgatggcatccctgatgtggtggtggagatggccgaggcagacctgcgggccctgctatgcagagagctgcggcccctgggggcctacatgagtggacggctgaaggtgaagggcgacctggctatggccatgaagctggaggctgtcctcagggccttgaagtagcagccttggctgactttccagagcccagtcccaagcctggcaccaagcctgaggggcctcttggaggaggaggtgttcatctgcaccacagagagttgaggccctaacaaatttcaggcccagccaagagcccatgaatggaggctgcaggaggctgagtccggctgccatgcacgtctcccctacagtggttctctggacaaggctttgtccatcccggtccccagctgagtgcccagcgctgagctgggtgcacggtgtgattccaggaggagagccaggcctgccctgccctgctggcttcctgactggagagacaggacccacagaaacagcctgacagcagctggtttggtccttgtgtgagggaccaagcatgtggcccaggctctaagctctgcggggattggagagggatggggagggaagggaaggcagctccaagaagaggtccctgtggcgaagttacctggggatcctggctggcccaccttcctggctgcagtccaggcccgtgctggcgggattgggcatgggaaggagcagggcctgctgcttccctggcgctgctcccaaagatttctgactcatctgccagctctgtcctgcatgcctggcgagctggggcccagggcagcatgaaggagagccctgcgttctgtgcttcttaccagaggtttgcaagcctcagacaaataaatgtggtgtttacaatgtataaaagagaagaa

SEQ ID NO: 186976 - DNA, 1833 bp, Homo sapiens
  Payload ID: 16814
  Gene Symbol: STOML1
  Gene Name: stomatin (EPB72)-like 1
  ENST ID: ENST00000561656
  CDS Start-End: 201-1133
tgggttttaaagacacgcccagagcggggaggaggtagaggcggagagctgcagacctaccgctgacttacgatgtaccccagagctggccctcctgcctctgtcatggcctcatcagtttcctggggttcttgctgctgttggtcaccttccccatttctggctggtttgccctgaagattgtgcccacctacgagcggatgattgtgttccgcctgggccggatccgcaccccccagggacctggcatggttctgctcttgcccttcattgactcctttcagagggtggatctgaggacacgagccttcaacgtccctccctgcaagctggcctctaaggacggggctgtgctgtccgtgggagccgatgtccagtttcgcatctgggacccggtgctgtcggtgatgactgtgaaagacctgaacacagccacacgcatgacagcccagaacgccatgaccaaggccctgctcaagaggccgctgcgggagatccagatggagaagctcaagatcagcgaccagcttctgctggagatcaacgatgtgaccagggcctgggggctggaggtagaccgcgtggagctggcagtggaggccgtgctccagccgccccaggacagcccagctgggcccaacctggacagcaccctccagcagctggccctgcacttcctgggaggaagcatgaactcaatggcaggaggtgccccgtccccggggccagacaccgtggagatggtgagtgaagttgagccacctgcccctcaagttggtgccaggtccagtccgaagcagcctctggcggaggggctactgactgctctacagcccttcctgtctgaggccctggtcagccaagtcggggcctgctaccagttcaatgtcgtcctgcccagcggcacccaaagcgcctacttcctggacctcactacaggacgaggaagagtgggacacggggtgcctgatggcatccctgatgtggtggtggagatggccgaggcagacctgcgggccctgctatgcagagagctgcggcccctgggggcctacatgagtggacggctgaaggtgaagggcgacctggctatggccatgaagctggaggctgtcctcagggccttgaagtagcagccttggctgactttccagagcccagtcccaagcctggcaccaagcctgaggggcctcttggaggaggaggtgttcatctgcaccacagagagttgaggccctaacaaatttcaggcccagccaagagcccatgaatggaggctgcaggaggctgagtccggctgccatgcacgtctcccctacagtggttctctggacaaggctttgtccatcccggtccccagctgagtgcccagcgctgagctgggtgcacggtgtgattccaggaggagagccaggcctgccctgccctgctggcttcctgactggagagacaggacccacagaaacagcctgacagcagctggtttggtccttgtgtgagggaccaagcatgtggcccaggctctaagctctgcggggattggagagggatggggagggaagggaaggcagctccaagaagaggtccctgtggcgaagttacctggggatcctggctggcccaccttcctggctgcagtccaggcccgtgctggcgggattgggcatgggaaggagcagggcctgctgcttccctggcgctgctcccaaagatttctgactcatctgccagctctgtcctgcatgcctggcgagctggggcccagggcagcatgaaggagagccctgcgttctgtgcttcttaccagaggtttgcaagcctcagacaaataaa

SEQ ID NO: 186977 - DNA, 512 bp, Homo sapiens
  Payload ID: 16814
  Gene Symbol: STOML1
  Gene Name: stomatin (EPB72)-like 1
  ENST ID: ENST00000566081
  CDS Start-End: 235-512
ccggaagcagcagccaggagggcggggccgcgtagggcccactggccagggagggcgccgcgcggaggcgcggggcgtgtctcctgtcaaaagccatgctcggcagatgtaccccagagctggccctcctgcctctgtcatggcctcatcagtttcctggggttcttgctgctgttggtcaccttccccatttctggctggtttgccctgaagattgtgcccacctacgagcggatgattgtgttccgcctgggccggatccgcaccccccagggacctggcatggttctgctcttgcccttcattgactcctttcagagggtggatctgaggacacgagccttcaacgtccctccctgcaagctggcctctaaggacggggctgtgctgtccgtgggagccgatgtccagtttcgcatctgggacccggtgctgtcggtgatgactgtgaaagacctgaacacagccacacgcatgacagcccagaacgccatgaccaaggccctgctcaa

SEQ ID NO: 186978 - DNA, 1278 bp, Homo sapiens
  Payload ID: 16815
  Gene Symbol: STOML2
  Gene Name: stomatin (EPB72)-like 2
  Uniprot ID: Q9UJZ1
  ENST ID: ENST00000356493
  CDS Start-End: 64-1134
ggcttctgggagcgaccgctccgctcgtctcgttggttccggaggtcgctgcggcggtgggaaatgctggcgcgcgcggcgcggggcactggggcccttttgctgaggggctctctactggcttctggccgcgctccgcgccgcgcctcctctggattgccccgaaacaccgtggtactgttcgtgccgcagcaggaggcctgggtggtggagcgaatgggccgattccaccggatcctggagcctggtttgaacatcctcatccctgtgttagaccggatccgatatgtgcagagtctcaaggaaattgtcatcaacgtgcctgagcagtcggctgtgactctcgacaatgtaactctgcaaatcgatggagtcctttacctgcgcatcatggacccttacaaggcaagctacggtgtggaggaccctgagtatgccgtcacccagctagctcaaacaaccatgagatcagagctcggcaaactctctctggacaaagtcttccgggaacgggagtccctgaatgccagcattgtggatgccatcaaccaagctgctgactgctggggtatccgctgcctccgttatgagatcaaggatatccatgtgccaccccgggtgaaagagtctatgcagatgcaggtggaggcagagcggcggaaacgggccacagttctagagtctgaggggacccgagagtcggccatcaatgtggcagaagggaagaaacaggcccagatcctggcctccgaagcagaaaaggctgaacagataaatcaggcagcaggagaggccagtgcagttctggcgaaggccaaggctaaagctgaagctattcgaatcctggctgcagctctgacacaacataatggagatgcagcagcttcactgactgtggccgagcagtatgtcagcgcgttctccaaactggccaaggactccaacactatcctactgccctccaaccctggcgatgtcaccagcatggtggctcaggccatgggtgtatatggagccctcaccaaagccccagtgccagggactccagactcactctccagtgggagcagcagagatgtccagggtacagatgcaagtcttgatgaggaacttgatcgagtcaagatgagttagtggagctgggcttggccagggagtctgggaacaaggaagcagattttcctgattctggctctagcttccctgccaagattttggtttttatttttttatttgaactttagtcgtgtaataaactcaccagtggcaaaccagaaa

SEQ ID NO: 186979 - DNA, 1296 bp, Homo sapiens
  Payload ID: 16815
  Gene Symbol: STOML2
  Gene Name: stomatin (EPB72)-like 2
  Uniprot ID: Q9UJZ1
  ENST ID: ENST00000452248
  CDS Start-End: 102-1037
tccgggggagcggaactgcaagaggaaaggctcgggtaggcttctgggagcgaccgctccgctcgtctcgttggttccggaggtcgctgcggcggtgggaaatgctggcgcgcgcggcgcggggcactggggcccttttgctgaggggctctctactggcttctggccgcgctccgcgccgcgcctcctctggattgccccgaaacaccgtggtactgttcgtgccgcagcaggaggcctgggtggtggagcgaatgggccgattccaccggatcctggagcctggtttgaacatcctcatccctgtgttagaccggatccgatatgtgcagagtctcaaggaaattgtcatcaacgtgcctgagcagtcggctgtgactctcgacaatgtaactctgcaaatcgatggagtcctttacctgcgcatcatggacccttacaaggcaagctacggtgtggaggaccctgagtatgccgtcacccagctagctcaaacaaccatgagatcagagctcggcaaactctctctggacaaagtcttccgggtggaggcagagcggcggaaacgggccacagttctagagtctgaggggacccgagagtcggccatcaatgtggcagaagggaagaaacaggcccagatcctggcctccgaagcagaaaaggctgaacagataaatcaggcagcaggagaggccagtgcagttctggcgaaggccaaggctaaagctgaagctattcgaatcctggctgcagctctgacacaacataatggagatgcagcagcttcactgactgtggccgagcagtatgtcagcgcgttctccaaactggccaaggactccaacactatcctactgccctccaaccctggcgatgtcaccagcatggtggctcaggccatgggtgtatatggagccctcaccaaagccccagtgccagggactccagactcactctccagtgggagcagcagagatgtccagggtacagatgcaagtcttgatgaggaacttgatcgagtcaagatgagttagtggagctgggcttggccagggagtctgggaacaaggaagcagattttcctgattctggctctagcttccctgccaagattttggtttttatttttttatttgaactttagtcgtgtaataaactcaccagtggcaaaccagaaactgtcctctttgattggggaatgaagttgggaaagtcactagcattttccttggatccagtcctgtcagcatgatgcctccatgaataagagtgaacttcttgtaaagtgaaact

SEQ ID NO: 186980 - DNA, 904 bp, Homo sapiens
  Payload ID: 16815
  Gene Symbol: STOML2
  Gene Name: stomatin (EPB72)-like 2
  ENST ID: ENST00000488050
  CDS Start-End: 57-362
gctgcctccgttatgagatcaaggatatccatgtgccaccccgggtgaaagagtctatgcagatgcaggtggaggcagagcggcggaaacgggccacagttctagagtctgaggggacccgagagtcggccatcaatgtggcagaagggaagaaacaggcccagatcctggcctccgaagcagaaaaggctgaacagataaatcaggcagcaggagaggccagtgcagttctggcgaaggccaaggctaaagctgaagctattcgaatcctggctgcagctctgacacaacatgtgagaggcccctgggtgggaatggggacaggaattgacagtggaaggggttctcttatctacgcttgaggagagttccgcctctgtgggctctgttgagccagattacatggtcctttttattgtgaactgctttcttcattccccatcccccccttcttctccgtatcggtgatctctgatttttatccccctgtgatcacagaatggagatgcagcagcttcactgactgtggccgagcagtatgtcagcgcgttctccaaactggccaaggactccaacactatcctactgccctccaaccctggcgatgtcaccagcatggtggctcaggccatgggtgtatatggagccctcaccaaagccccagtgccagggactccagactcactctccagtgggagcagcagagatgtccagggtacagatgcaagtcttgatgaggaacttgatcgagtcaagatgagttagtggagctgggcttggccagggagtctgggaacaaggaagcagattttcctgattctggctctagcttccctgccaagattttggtttttatttttttatttgaactttagtcgtgtaataaactcaccagtggcaaacc

SEQ ID NO: 186981 - DNA, 1293 bp, Homo sapiens
  Payload ID: 16815
  Gene Symbol: STOML2
  Gene Name: stomatin (EPB72)-like 2
  ENST ID: ENST00000619795
  CDS Start-End: 102-1034
tccgggggagcggaactgcaagaggaaaggctcgggtaggcttctgggagcgaccgctccgctcgtctcgttggttccggaggtcgctgcggcggtgggaaatgctggcgcgcgcggcgcggggcactggggcccttttgctgaggggtttgaacatcctcatccctgtgttagaccggatccgatatgtgcagagtctcaaggaaattgtcatcaacgtgcctgagcagtcggctgtgactctcgacaatgtaactctgcaaatcgatggagtcctttacctgcgcatcatggacccttacaaggcaagctacggtgtggaggaccctgagtatgccgtcacccagctagctcaaacaaccatgagatcagagctcggcaaactctctctggacaaagtcttccgggaacgggagtccctgaatgccagcattgtggatgccatcaaccaagctgctgactgctggggtatccgctgcctccgttatgagatcaaggatatccatgtgccaccccgggtgaaagagtctatgcagatgcaggtggaggcagagcggcggaaacgggccacagttctagagtctgaggggacccgagagtcggccatcaatgtggcagaagggaagaaacaggcccagatcctggcctccgaagcagaaaaggctgaacagataaatcaggcagcaggagaggccagtgcagttctggcgaaggccaaggctaaagctgaagctattcgaatcctggctgcagctctgacacaacataatggagatgcagcagcttcactgactgtggccgagcagtatgtcagcgcgttctccaaactggccaaggactccaacactatcctactgccctccaaccctggcgatgtcaccagcatggtggctcaggccatgggtgtatatggagccctcaccaaagccccagtgccagggactccagactcactctccagtgggagcagcagagatgtccagggtacagatgcaagtcttgatgaggaacttgatcgagtcaagatgagttagtggagctgggcttggccagggagtctgggaacaaggaagcagattttcctgattctggctctagcttccctgccaagattttggtttttatttttttatttgaactttagtcgtgtaataaactcaccagtggcaaaccagaaactgtcctctttgattggggaatgaagttgggaaagtcactagcattttccttggatccagtcctgtcagcatgatgcctccatgaataagagtgaacttcttgtaaagtgaaact

SEQ ID NO: 186982 - DNA, 2121 bp, Homo sapiens
  Payload ID: 16816
  Gene Symbol: STOML3
  Gene Name: stomatin (EPB72)-like 3
  Uniprot ID: Q8TAV4
  ENST ID: ENST00000379631
  CDS Start-End: 346-1221
tatacaaggtgcatagaagtgttttatgaaatataaatgctatagaaaattacacagcaatattttacaggaagcaataccaccagatggtcatattctttcaagttttttctgtgaacaaaggcagtctgaactcataaaagaaatctttttgtttatgttatcaggcttccctcaccagggtaactaccccttagggagttcactaaagagaaggaatgtctttcactctctcatactttctcctctcccctctcccaagcacatctgagttgctgcctgttcttcacacttagctccaaacccatgaaaaattgccaagtataaaagcttctcaagaatgagatggattctagggtgtcttcacctgagaagcaagataaagagaatttcgtgggtgtcaacaataaacggcttggtgtatgtggctggatcctgttttccctctctttcctgttggtgatcattaccttccccatctccatatggatgtgcttgaagatcattaaggagtatgaacgtgctgttgtattccgtctgggacgcatccaagctgacaaagccaaggggccaggtttgatcctggtcctgccatgcatagatgtgtttgtcaaagttgacctccgaacagttacttgcaacattcctccacaagagatcctcaccagagactccgtaactactcaggtagatggagttgtctattacagaatctatagtgctgtctcagcagtggctaatgtcaacgatgtccatcaagcaacatttctgctggctcaaaccactctgagaaatgtcttagggacacagaccttgtcccagatcttagctggacgagaagagatcgcccatagcatccagactttacttgatgatgccaccgaactgtgggggatccgggtggcccgagtggaaatcaaagatgttcggattcccgtgcagttgcagagatccatggcagccgaggctgaggccacccgggaagcgagagccaaggtccttgcagctgaaggagaaatgaatgcttccaaatccctgaagtcagcctccatggtgctggctgagtctcccatagctctccagctgcgctacctgcagaccttgagcacggtagccaccgagaagaattctacgattgtgtttcctctgcccatgaatatactagagggcattggtggcgtcagctatgataaccacaagaagcttccaaataaagcctgaggtcctcttgcggtagtcagctattgcatagagagtggtgtctattcctatggagaagccagtagttagaaacggtgagaattccaacactgttcatgtaacagtaactccatagatggaagagcattggcaggaaaaagctctagaggctatacagagaagaaaaaaagagcaaaaatgagacctgtatattacttttatttttaggaccataatcaactttgtaatattcttatataattaattagtggtggtctccgactttatagcaggaactttctggtagtatgagaagaaatcattgggtgactatgactaatgtttcagaattactttttaattgttttaaaaagcactccagataatttatagagtaacataggcctcatatttacactatatgttcgctttataattccgaagttgttatttgctaaatctccaatggttgcaatcaaaccccacaatgctgaaaacagagattgattttgatgttaagaacaaaagaagtatggaaacttccaggctcaaacatgtcccccgtgccacaaggcaaactgcgatgagctcacagtccaggtctcttgctgtgtgtcctgcagggagtggccaactctccaccttccagcaccattatcagagggtgggaaaaggcacatgaaagtggccagctcctgtcaatttatttgcttacaagggagaatgcttggaaaggttgcattggttgaaaccactgaggagcatcaccctggggatttcatgttttcactctgttcttagtcccaggagccacaggtaatcgagaatgtttgtgaactctatccacatcccctcccccacctgccaaataacctgttcaaaacaaagaaggcatagaatataaatgaatttcaaaagtta

SEQ ID NO: 186983 - DNA, 1997 bp, Homo sapiens
  Payload ID: 16816
  Gene Symbol: STOML3
  Gene Name: stomatin (EPB72)-like 3
  Uniprot ID: Q8TAV4
  ENST ID: ENST00000423210
  CDS Start-End: 250-1098
aaagagaaggaatgtctttcactctctcatactttctcctctcccctctcccaagcacatctgagttgctgcctgttcttcacacttagctccaaacccatgaaaaattgccaagtataaaagcttctcaagaatgagatggattctagggtgtcttcacctgagaagcaagataaagagaatttcgtggcacgtctattacctaatggagctgagcctcatgtgcacgtgtaatgatgcaagggcttgatgaactccagaggcgagcttgtaggtgtcaacaataaacggcttggtgtatgtggctggatcctgttttccctctctttcctgttggtgatcattaccttccccatctccatatggatgtgcttgaagatcattaaggagtatgaacgtgctgttgtattccgtctgggacgcatccaagctgacaaagccaaggggccaggtttgatcctggtcctgccatgcatagatgtgtttgtcaaagttgacctccgaacagttacttgcaacattcctccacaagagatcctcaccagagactccgtaactactcaggtagatggagttgtctattacagaatctatagtgctgtctcagcagtggctaatgtcaacgatgtccatcaagcaacatttctgctggctcaaaccactctgagaaatgtcttagggacacagaccttgtcccagatcttagctggacgagaagagatcgcccatagcatccagactttacttgatgatgccaccgaactgtgggggatccgggtggcccgagtggaaatcaaagatgttcggattcccgtgcagttgcagagatccatggcagccgaggctgaggccacccgggaagcgagagccaaggtccttgcagctgaaggagaaatgaatgcttccaaatccctgaagtcagcctccatggtgctggctgagtctcccatagctctccagctgcgctacctgcagaccttgagcacggtagccaccgagaagaattctacgattgtgtttcctctgcccatgaatatactagagggcattggtggcgtcagctatgataaccacaagaagcttccaaataaagcctgaggtcctcttgcggtagtcagctattgcatagagagtggtgtctattcctatggagaagccagtagttagaaacggtgagaattccaacactgttcatgtaacagtaactccatagatggaagagcattggcaggaaaaagctctagaggctatacagagaagaaaaaaagagcaaaaatgagacctgtatattacttttatttttaggaccataatcaactttgtaatattcttatataattaattagtggtggtctccgactttatagcaggaactttctggtagtatgagaagaaatcattgggtgactatgactaatgtttcagaattactttttaattgttttaaaaagcactccagataatttatagagtaacataggcctcatatttacactatatgttcgctttataattccgaagttgttatttgctaaatctccaatggttgcaatcaaaccccacaatgctgaaaacagagattgattttgatgttaagaacaaaagaagtatggaaacttccaggctcaaacatgtcccccgtgccacaaggcaaactgcgatgagctcacagtccaggtctcttgctgtgtgtcctgcagggagtggccaactctccaccttccagcaccattatcagagggtgggaaaaggcacatgaaagtggccagctcctgtcaatttatttgcttacaagggagaatgcttggaaaggttgcattggttgaaaccactgaggagcatcaccctggggatttcatgttttcactctgttcttagtcccaggagccacaggtaatcgagaatgtttgtgaactctatccacatcccctcccccacctgccaaataacctgttcaaaacaaagaaggcatagaatataaatgaatttcaaaagtt

SEQ ID NO: 186984 - DNA, 3534 bp, Homo sapiens
  Payload ID: 16817
  Gene Symbol: STON1-GTF2A1L
  Gene Name: STON1-GTF2A1L readthrough
  ENST ID: ENST00000394751
  CDS Start-End: 28-3435
tgacaagaccacaatctgatcccaaagatgtgctccacaaatccaggcaaatgggtcacctttgatgatgatcctgctgttcaatcttctcaaaagtcaaagaattttcctctggagaatcaaggtgtctgtagaccaaatggactgaagctgaaccttcctggcctcagggaatttcccagtggatcttcctccaccagcagcactcctctctcctcccccattgtagatttttatttcagtccaggacctccaagtaactctcctctttctacacctaccaaagacttcccaggttttcctggcatccccaaagcagggactcatgtgctttatcctattccagaatcatcttcagacagcccactcgcaatatcaggaggagaatcttccttactgcctaccagaccaacatgtttatcccatgccttgttacccagtgaccactcatgtacacatccaactcccaaagtaggtcttccagatgaagttaatcctcaacaggctgaaagcctaggattccaaagtgatgatctcccccagtttcagtattttcgagaggactgtgctttttcaagtccattttggaaagatgaaggcagtgattcccatttcacccttgacccaccaggaagcaaaaagatgttctcatcaagaaacaaggagatgcctattgaccaaaaaagcctaaataagtgttcactcaactatatctgtgagaagcttgaacatctccagtcagctgagaaccaagactcacttagaagtttgtctatgcactgtctatgtgctgaagaaaatgcctcttcctttgtcccccacacactcttcaggagtcagccaaaatccggatggtctttcatgctgagaattcctgagaagaagaatatgatgtcttcccggcaatggggaccaatttttctgaaagttttgcctggaggaattttgcagatgtattatgaacagggattagaaaaaccatttaaagagatacagcttgatccatattgtaggctttctgaacccaaggttgagaacttcagtgtagcaggaaaaatccacactgtgaagattgaacatgtgtcttacacagaaaaaaggaaataccattctaagacagaagtagttcatgaacctgacatagagcagatgctgaagttggggtccacatcgtaccatgacttccttgactttctgactactgtggaggaggagctgatgaagttgccagctgtttcaaaaccaaaaaagaactacgaggagcaagaaatttccttggaaattgtggacaacttttggggtaaagtcacaaaagaaggaaaatttgttgaaagtgctgtgataactcaaatttattgcctctgctttgtgaatgggaacctggaatgctttttaaccttgaatgaccttgagttgccgaagcgagatgaatcctattatgagaaggactcagaaaaaaaggggattgatattcttgactaccattttcataagtgtgtgaatgtacaagaatttgagcaatcaagaatcattaagtttgtacctctggatgcctgccggtttgagctgatgcgtttcaagactttgtataatggggataatcttcccttttccttgaagtctgtagtggttgtccagggagcatacgtggaacttcaggcttttgtcaacatggcctcattggcgcagaggtcatcctatgctggttccttaaggtcctgtgacaatataaggatacactttcctgtcccatcgcagtggatcaaggccctttggaccatgaacctccagaggcagaagtctctgaaagctaaaatgaaccgccgagcatgtctggggagtttacaggaacttgaatctgaacctgtcattcaagtcactgtggggtcagcaaaatatgagagtgcctaccaggcagtggtatggaagatagatcggcttccagacaaaaattcaagtctagatcatccccattgtctgtcatacaaattagagcttggatcagaccaagaaattccctctgattggtatccatttgctactgttcagttttccgtgcctgacacctgtgcctcaaggacagaggtcaggtctctgggagtggagagtgatgtccagccacagaaacatgttcagcagcgagcttgctacaacatccagcctaaactctacagatctgtaattgaagatgtaattgaaggagttcggaatctatttgctgaagaaggtatagaggaacaagttttaaaagacttgaagcagctctgggaaaccaaggttttgcagtctaaagcaacagaagacttcttcagaaatagcatccaatcacctctgtttactcttcagttgccgcacagcttgcaccaaacattgcaatcgtcaacaggtcacctttataaagtcaatgtaccaattatggtgacagagacttctggaagagcaggtattcttcagcatccaattcagcaagtatttcaacagcttggccagccttcagtaatacaaactagtgttccacaattgaatccatggtctcttcaagcaactactgaaaaatcacagagaattgaaaccgtgctacagcaacccgcaattctaccttctgggccagtagataggaaacacttagaaaatgccaccagtgatatacttgtatctcctggaaatgagcataaaatcgtgcctgaagctttgttgtgtcatcaggaaagttctcactatatcagtcttccaggtgttgtattttctccacaggtctctcaaacaaattctaatgtggagtcagtgctcagtggttcagctagcatggctcaaaatctgcatgatgagtccctctccacaagccctcatggggctctccaccagcacgtgactgatattcagcttcatattcttaaaaataggatgtatggatgtgattctgtaaagcaaccaagaaatatagaggaacccagcaacatacctgtatcagagaaggattctaattctcaggtggatttaagcattcgggttactgatgatgatattggtgaaataattcaagtagatggaagcggtgatacatcttccaatgaagaaataggaagtacaagagatgcagatgagaatgaatttctagggaatattgacgggggagatctgaaggtacctgaagaagaagctgacagtatttcaaatgaggattcagccacaaacagtagtgataatgaagaccctcaagtaaacattgtagaagaggaccctttaaattctggagatgatgttagtgaacaggatgtgccagacctgtttgacacggataatgttattgtctgtcagtatgataagattcatcgaagcaagaacaaatggaaattctatttgaaagatggtgttatgtgttttggagggagagactatgtatttgcaaaagccattggtgatgcagagtggtaaaccttgtgagctcagtacatctattttgtgaacatcagttggattatattgcatattgtgaattcatttttattttgaatatagtccagcacagagctg

SEQ ID NO: 186985 - DNA, 3824 bp, Homo sapiens
  Payload ID: 16817
  Gene Symbol: STON1-GTF2A1L
  Gene Name: STON1-GTF2A1L readthrough
  ENST ID: ENST00000394754
  CDS Start-End: 115-3663
ggactttgggactggacagacctggtcacagtctaggttctacatcttactggtcgagcaactttagagtcaacctatttgatttcttgacaagaccacaatctgatcccaaagatgtgctccacaaatccaggcaaatgggtcacctttgatgatgatcctgctgttcaatcttctcaaaagtcaaagaattttcctctggagaatcaaggtgtctgtagaccaaatggactgaagctgaaccttcctggcctcagggaatttcccagtggatcttcctccaccagcagcactcctctctcctcccccattgtagatttttatttcagtccaggacctccaagtaactctcctctttctacacctaccaaagacttcccaggttttcctggcatccccaaagcagggactcatgtgctttatcctattccagaatcatcttcagacagcccactcgcaatatcaggaggagaatcttccttactgcctaccagaccaacatgtttatcccatgccttgttacccagtgaccactcatgtacacatccaactcccaaagtaggtcttccagatgaagttaatcctcaacaggctgaaagcctaggattccaaagtgatgatctcccccagtttcagtattttcgagaggactgtgctttttcaagtccattttggaaagatgaaggcagtgattcccatttcacccttgacccaccaggaagcaaaaagatgttctcatcaagaaacaaggagatgcctattgaccaaaaaagcctaaataagtgttcactcaactatatctgtgagaagcttgaacatctccagtcagctgagaaccaagactcacttagaagtttgtctatgcactgtctatgtgctgaagaaaatgcctcttcctttgtcccccacacactcttcaggagtcagccaaaatccggatggtctttcatgctgagaattcctgagaagaagaatatgatgtcttcccggcaatggggaccaatttttctgaaagttttgcctggaggaattttgcagatgtattatgaacagggattagaaaaaccatttaaagagatacagcttgatccatattgtaggctttctgaacccaaggttgagaacttcagtgtagcaggaaaaatccacactgtgaagattgaacatgtgtcttacacagaaaaaaggaaataccattctaagacagaagtagttcatgaacctgacatagagcagatgctgaagttggggtccacatcgtaccatgacttccttgactttctgactactgtggaggaggagctgatgaagttgccagctgtttcaaaaccaaaaaagaactacgaggagcaagaaatttccttggaaattgtggacaacttttggggtaaagtcacaaaagaaggaaaatttgttgaaagtgctgtgataactcaaatttattgcctctgctttgtgaatgggaacctggaatgctttttaaccttgaatgaccttgagttgccgaagcgagatgaatcctattatgagaaggactcagaaaaaaaggggattgatattcttgactaccattttcataagtgtgtgaatgtacaagaatttgagcaatcaagaatcattaagtttgtacctctggatgcctgccggtttgagctgatgcgtttcaagactttgtataatggggataatcttcccttttccttgaagtctgtagtggttgtccagggagcatacgtggaacttcaggcttttgtcaacatggcctcattggcgcagaggtcatcctatgctggttccttaaggtcctgtgacaatataaggatacactttcctgtcccatcgcagtggatcaaggccctttggaccatgaacctccagaggcagaagtctctgaaagctaaaatgaaccgccgagcatgtctggggagtttacaggaacttgaatctgaacctgtcattcaagtcactgtggggtcagcaaaatatgagagtgcctaccaggcagtggtatggaagatagatcggcttccagacaaaaattcaagtctagatcatccccattgtctgtcatacaaattagagcttggatcagaccaagaaattccctctgattggtatccatttgctactgttcagttttccgtgcctgacacctgtgcctcaaggacagaggtcaggtctctgggagtggagagtgatgtccagccacagaaacatgttcagcagcgagcttgctacaacatccagcctaaactctacagatctgtaattgaagatgtaattgaaggagttcggaatctatttgctgaagaaggtatagaggaacaagttttaaaagacttgaagcagctctgggaaaccaaggttttgcagtctaaagcaacagaagacttcttcagaaatagcatccaatcacctctgtttactcttcagttgccgcacagcttgcaccaaacattgcaatcgtcaacagcatcattagttattcctgctggtagaactcttccaagttttaccacagcagaactgggcacttcaaactccagtgcaaactttacttttcctggttatcccattcatgtaccagcaggtgtgacactacagactgtatctggtcacctttataaagtcaatgtaccaattatggtgacagagacttctggaagagcaggtattcttcagcatccaattcagcaagtatttcaacagcttggccagccttcagtaatacaaactagtgttccacaattgaatccatggtctcttcaagcaactactgaaaaatcacagagaattgaaaccgtgctacagcaacccgcaattctaccttctgggccagtagataggaaacacttagaaaatgccaccagtgatatacttgtatctcctggaaatgagcataaaatcgtgcctgaagctttgttgtgtcatcaggaaagttctcactatatcagtcttccaggtgttgtattttctccacaggtctctcaaacaaattctaatgtggagtcagtgctcagtggttcagctagcatggctcaaaatctgcatgatgagtccctctccacaagccctcatggggctctccaccagcacgtgactgatattcagcttcatattcttaaaaataggatgtatggatgtgattctgtaaagcaaccaagaaatatagaggaacccagcaacatacctgtatcagagaaggattctaattctcaggtggatttaagcattcgggttactgatgatgatattggtgaaataattcaagtagatggaagcggtgatacatcttccaatgaagaaataggaagtacaagagatgcagatgagaatgaatttctagggaatattgacgggggagatctgaaggtacctgaagaagaagctgacagtatttcaaatgaggattcagccacaaacagtagtgataatgaagaccctcaagtaaacattgtagaagaggaccctttaaattctggagatgatgttagtgaacaggatgtgccagacctgtttgacacggataatgttattgtctgtcagtatgataagattcatcgaagcaagaacaaatggaaattctatttgaaagatggtgttatgtgttttggagggagagactatgtatttgcaaaagccattggtgatgcagagtggtaaaccttgtgagctcagtacatctattttgtgaacatcagttggattatattgcatattgtgaattcatttttattttgaatatagtccagcacagagctgttcaaatttttagttcactgtatggaatttaataaaattataattcagatgcagatacaatt

SEQ ID NO: 186986 - DNA, 3821 bp, Homo sapiens
  Payload ID: 16817
  Gene Symbol: STON1-GTF2A1L
  Gene Name: STON1-GTF2A1L readthrough
  ENST ID: ENST00000405008
  CDS Start-End: 112-3660
agaagatgcgctggagggaagagaacggagcgtcggacaccagaaaaactttgggggattcgggagtcaacctatttgatttcttgacaagaccacaatctgatcccaaagatgtgctccacaaatccaggcaaatgggtcacctttgatgatgatcctgctgttcaatcttctcaaaagtcaaagaattttcctctggagaatcaaggtgtctgtagaccaaatggactgaagctgaaccttcctggcctcagggaatttcccagtggatcttcctccaccagcagcactcctctctcctcccccattgtagatttttatttcagtccaggacctccaagtaactctcctctttctacacctaccaaagacttcccaggttttcctggcatccccaaagcagggactcatgtgctttatcctattccagaatcatcttcagacagcccactcgcaatatcaggaggagaatcttccttactgcctaccagaccaacatgtttatcccatgccttgttacccagtgaccactcatgtacacatccaactcccaaagtaggtcttccagatgaagttaatcctcaacaggctgaaagcctaggattccaaagtgatgatctcccccagtttcagtattttcgagaggactgtgctttttcaagtccattttggaaagatgaaggcagtgattcccatttcacccttgacccaccaggaagcaaaaagatgttctcatcaagaaacaaggagatgcctattgaccaaaaaagcctaaataagtgttcactcaactatatctgtgagaagcttgaacatctccagtcagctgagaaccaagactcacttagaagtttgtctatgcactgtctatgtgctgaagaaaatgcctcttcctttgtcccccacacactcttcaggagtcagccaaaatccggatggtctttcatgctgagaattcctgagaagaagaatatgatgtcttcccggcaatggggaccaatttttctgaaagttttgcctggaggaattttgcagatgtattatgaacagggattagaaaaaccatttaaagagatacagcttgatccatattgtaggctttctgaacccaaggttgagaacttcagtgtagcaggaaaaatccacactgtgaagattgaacatgtgtcttacacagaaaaaaggaaataccattctaagacagaagtagttcatgaacctgacatagagcagatgctgaagttggggtccacatcgtaccatgacttccttgactttctgactactgtggaggaggagctgatgaagttgccagctgtttcaaaaccaaaaaagaactacgaggagcaagaaatttccttggaaattgtggacaacttttggggtaaagtcacaaaagaaggaaaatttgttgaaagtgctgtgataactcaaatttattgcctctgctttgtgaatgggaacctggaatgctttttaaccttgaatgaccttgagttgccgaagcgagatgaatcctattatgagaaggactcagaaaaaaaggggattgatattcttgactaccattttcataagtgtgtgaatgtacaagaatttgagcaatcaagaatcattaagtttgtacctctggatgcctgccggtttgagctgatgcgtttcaagactttgtataatggggataatcttcccttttccttgaagtctgtagtggttgtccagggagcatacgtggaacttcaggcttttgtcaacatggcctcattggcgcagaggtcatcctatgctggttccttaaggtcctgtgacaatataaggatacactttcctgtcccatcgcagtggatcaaggccctttggaccatgaacctccagaggcagaagtctctgaaagctaaaatgaaccgccgagcatgtctggggagtttacaggaacttgaatctgaacctgtcattcaagtcactgtggggtcagcaaaatatgagagtgcctaccaggcagtggtatggaagatagatcggcttccagacaaaaattcaagtctagatcatccccattgtctgtcatacaaattagagcttggatcagaccaagaaattccctctgattggtatccatttgctactgttcagttttccgtgcctgacacctgtgcctcaaggacagaggtcaggtctctgggagtggagagtgatgtccagccacagaaacatgttcagcagcgagcttgctacaacatccagcctaaactctacagatctgtaattgaagatgtaattgaaggagttcggaatctatttgctgaagaaggtatagaggaacaagttttaaaagacttgaagcagctctgggaaaccaaggttttgcagtctaaagcaacagaagacttcttcagaaatagcatccaatcacctctgtttactcttcagttgccgcacagcttgcaccaaacattgcaatcgtcaacagcatcattagttattcctgctggtagaactcttccaagttttaccacagcagaactgggcacttcaaactccagtgcaaactttacttttcctggttatcccattcatgtaccagcaggtgtgacactacagactgtatctggtcacctttataaagtcaatgtaccaattatggtgacagagacttctggaagagcaggtattcttcagcatccaattcagcaagtatttcaacagcttggccagccttcagtaatacaaactagtgttccacaattgaatccatggtctcttcaagcaactactgaaaaatcacagagaattgaaaccgtgctacagcaacccgcaattctaccttctgggccagtagataggaaacacttagaaaatgccaccagtgatatacttgtatctcctggaaatgagcataaaatcgtgcctgaagctttgttgtgtcatcaggaaagttctcactatatcagtcttccaggtgttgtattttctccacaggtctctcaaacaaattctaatgtggagtcagtgctcagtggttcagctagcatggctcaaaatctgcatgatgagtccctctccacaagccctcatggggctctccaccagcacgtgactgatattcagcttcatattcttaaaaataggatgtatggatgtgattctgtaaagcaaccaagaaatatagaggaacccagcaacatacctgtatcagagaaggattctaattctcaggtggatttaagcattcgggttactgatgatgatattggtgaaataattcaagtagatggaagcggtgatacatcttccaatgaagaaataggaagtacaagagatgcagatgagaatgaatttctagggaatattgacgggggagatctgaaggtacctgaagaagaagctgacagtatttcaaatgaggattcagccacaaacagtagtgataatgaagaccctcaagtaaacattgtagaagaggaccctttaaattctggagatgatgttagtgaacaggatgtgccagacctgtttgacacggataatgttattgtctgtcagtatgataagattcatcgaagcaagaacaaatggaaattctatttgaaagatggtgttatgtgttttggagggagagactatgtatttgcaaaagccattggtgatgcagagtggtaaaccttgtgagctcagtacatctattttgtgaacatcagttggattatattgcatattgtgaattcatttttattttgaatatagtccagcacagagctgttcaaatttttagttcactgtatggaatttaataaaattataattcagatgcagatacaatt

SEQ ID NO: 186987 - DNA, 3790 bp, Homo sapiens
  Payload ID: 16817
  Gene Symbol: STON1-GTF2A1L
  Gene Name: STON1-GTF2A1L readthrough
  ENST ID: ENST00000402114
  CDS Start-End: 112-3588
agaagatgcgctggagggaagagaacggagcgtcggacaccagaaaaactttgggggattcgggagtcaacctatttgatttcttgacaagaccacaatctgatcccaaagatgtgctccacaaatccaggcaaatgggtcacctttgatgatgatcctgctgttcaatcttctcaaaagtcaaagaattttcctctggagaatcaaggtgtctgtagaccaaatggactgaagctgaaccttcctggcctcagggaatttcccagtggatcttcctccaccagcagcactcctctctcctcccccattgtagatttttatttcagtccaggacctccaagtaactctcctctttctacacctaccaaagacttcccaggttttcctggcatccccaaagcagggactcatgtgctttatcctattccagaatcatcttcagacagcccactcgcaatatcaggaggagaatcttccttactgcctaccagaccaacatgtttatcccatgccttgttacccagtgaccactcatgtacacatccaactcccaaagtaggtcttccagatgaagttaatcctcaacaggctgaaagcctaggattccaaagtgatgatctcccccagtttcagtattttcgagaggactgtgctttttcaagtccattttggaaagatgaaggcagtgattcccatttcacccttgacccaccaggaagcaaaaagatgttctcatcaagaaacaaggagatgcctattgaccaaaaaagcctaaataagtgttcactcaactatatctgtgagaagcttgaacatctccagtcagctgagaaccaagactcacttagaagtttgtctatgcactgtctatgtgctgaagaaaatgcctcttcctttgtcccccacacactcttcaggagtcagccaaaatccggatggtctttcatgctgagaattcctgagaagaagaatatgatgtcttcccggcaatggggaccaatttttctgaaagttttgcctggaggaattttgcagatgtattatgaacagggattagaaaaaccatttaaagagatacagcttgatccatattgtaggctttctgaacccaaggttgagaacttcagtgtagcaggaaaaatccacactgtgaagattgaacatgtgtcttacacagaaaaaaggaaataccattctaagacagaagtagttcatgaacctgacatagagcagatgctgaagttggggtccacatcgtaccatgacttccttgactttctgactactgtggaggaggagctgatgaagttgccagctgtttcaaaaccaaaaaagaactacgaggagcaagaaatttccttggaaattgtggacaacttttggggtaaagtcacaaaagaaggaaaatttgttgaaagtgctgtgataactcaaatttattgcctctgctttgtgaatgggaacctggaatgctttttaaccttgaatgaccttgagttgccgaagcgagatgaatcctattatgagaaggactcagaaaaaaaggggattgatattcttgactaccattttcataagtgtgtgaatgtacaagaatttgagcaatcaagaatcattaagtttgtacctctggatgcctgccggtttgagctgatgcgtttcaagactttgtataatggggataatcttcccttttccttgaagtctgtagtggttgtccagggagcatacgtggaacttcaggcttttgtcaacatggcctcattggcgcagaggtcatcctatgctggttccttaaggtcctgtgacaatataaggatacactttcctgtcccatcgcagtggatcaaggccctttggaccatgaacctccagaggcagaagtctctgaaagctaaaatgaaccgccgagcatgtctggggagtttacaggaacttgaatctgaacctgtcattcaagtcactgtggggtcagcaaaatatgagagtgcctaccaggcagtggtatggaagatagatcggcttccagacaaaaattcaagtctagatcatccccattgtctgtcatacaaattagagcttggatcagaccaagaaattccctctgattggtatccatttgctactgttcagttttccgtgcctgacacctgtgcctcaaggacagaggtcaggtctctgggagtggagagtgatgtccagccacagaaacatgttcagcagcgagcttgctacaacatccagcctaaactctacagatctgtaattgaagatgtaattgaaggagttcggaatctatttgctgaagaaggtatagaggaacaagttttaaaagacttgaagcagctctgggaaaccaaggttttgcagtctaaagcaacagaagacttcttcagaaatagcatccaatcacctctgtttactcttcagttgccgcacagcttgcaccaaacattgcaatcgtcaacagcatcattagttattcctgctggtagaactcttccaagttttaccacagcagaactgggcacttcaaactccagtgcaaactttacttttcctggttatcccattcatgtaccagcaggtgtgacactacagactgtatctggtcacctttataaagtcaatgtaccaattatggtgacagagacttctggaagagcaggtattcttcagcatccaattcagcaagtatttcaacagcttggccagccttcagtaatacaaactagtgttccacaattgaatccatggtctcttcaagcaactactgaaaaatcacagagaattgaaaccgtgctacagcaacccgcaattctaccttctgggccagtagataggaaacacttagaaaatgccaccagtgatatacttgtatctcctggaaatgagcataaaatcgtgcctgaagctttgttgtgtcatcaggaaagttctcactatatcagtcttccaggtgttgtattttctccacaggtctctcaaacaaattctaatgtggagtcagtgctcagtggttcagctagcatggctcaaaatctgcatgatgagtccctctccacaagccctcatggggctctccaccagcacgtgactgatattcagcttcatattcttaaaaataggatgtatggatgtgattctgtaaagcaaccaagaaatatagaggaacccagcaacatacctgtatcagagaaggattctaattctcaggtggatttaagcattcgggttactgatgatgatattggtgaaataattcaagtagatggaagcggtgatacatcttccaatgaagaaataggaagtacaagagatgcagatgagaatgaatttctagggaatattgacgggggagatctgaaggtacctgaagaagaagctgacagtatttcaaatgaggattcagccacaaacagtagtgataatgaagaccctcaagtaaacattgtagaagaggaccctttaaattctggagatgatgttagtgaacaggatgtgccagacctgtttgacacggataatgttattgtctgtcagtatgataagcagggagataccagggttcgtcatgggcagcaatgactacgatggacaagaagatagaggccctaatcctaattttctgagcaccatggaagccccctggattctagggagaccttgaggagaaagaagactcctgtaaatgcctgacattgaaattcctgcaagtctaggagcatgtgaactcaaaatggaaattaatttgatttaataaaaataaagaagaagaattgttttggca

SEQ ID NO: 186988 - DNA, 5614 bp, Homo sapiens
  Payload ID: 16818
  Gene Symbol: STON1
  Gene Name: stonin 1
  Uniprot ID: Q9Y6Q2
  ENST ID: ENST00000406226
  CDS Start-End: 196-2403
ggccagaatcggagccccaaccgcgctgccgctcggaccttagcctgtgcctgcagcccggagtcccctcctgccctggaaggcaaggagccaggccacggggccacagccgcgggggccaccacactggcccaaatatttcctgcagagtcaacctatttgatttcttgacaagaccacaatctgatcccaaagatgtgctccacaaatccaggcaaatgggtcacctttgatgatgatcctgctgttcaatcttctcaaaagtcaaagaattttcctctggagaatcaaggtgtctgtagaccaaatggactgaagctgaaccttcctggcctcagggaatttcccagtggatcttcctccaccagcagcactcctctctcctcccccattgtagatttttatttcagtccaggacctccaagtaactctcctctttctacacctaccaaagacttcccaggttttcctggcatccccaaagcagggactcatgtgctttatcctattccagaatcatcttcagacagcccactcgcaatatcaggaggagaatcttccttactgcctaccagaccaacatgtttatcccatgccttgttacccagtgaccactcatgtacacatccaactcccaaagtaggtcttccagatgaagttaatcctcaacaggctgaaagcctaggattccaaagtgatgatctcccccagtttcagtattttcgagaggactgtgctttttcaagtccattttggaaagatgaaggcagtgattcccatttcacccttgacccaccaggaagcaaaaagatgttctcatcaagaaacaaggagatgcctattgaccaaaaaagcctaaataagtgttcactcaactatatctgtgagaagcttgaacatctccagtcagctgagaaccaagactcacttagaagtttgtctatgcactgtctatgtgctgaagaaaatgcctcttcctttgtcccccacacactcttcaggagtcagccaaaatccggatggtctttcatgctgagaattcctgagaagaagaatatgatgtcttcccggcaatggggaccaatttttctgaaagttttgcctggaggaattttgcagatgtattatgaacagggattagaaaaaccatttaaagagatacagcttgatccatattgtaggctttctgaacccaaggttgagaacttcagtgtagcaggaaaaatccacactgtgaagattgaacatgtgtcttacacagaaaaaaggaaataccattctaagacagaagtagttcatgaacctgacatagagcagatgctgaagttggggtccacatcgtaccatgacttccttgactttctgactactgtggaggaggagctgatgaagttgccagctgtttcaaaaccaaaaaagaactacgaggagcaagaaatttccttggaaattgtggacaacttttggggtaaagtcacaaaagaaggaaaatttgttgaaagtgctgtgataactcaaatttattgcctctgctttgtgaatgggaacctggaatgctttttaaccttgaatgaccttgagttgccgaagcgagatgaatcctattatgagaaggactcagaaaaaaaggggattgatattcttgactaccattttcataagtgtgtgaatgtacaagaatttgagcaatcaagaatcattaagtttgtacctctggatgcctgccggtttgagctgatgcgtttcaagactttgtataatggggataatcttcccttttccttgaagtctgtagtggttgtccagggagcatacgtggaacttcaggcttttgtcaacatggcctcattggcgcagaggtcatcctatgctggttccttaaggtcctgtgacaatataaggatacactttcctgtcccatcgcagtggatcaaggccctttggaccatgaacctccagaggcagaagtctctgaaagctaaaatgaaccgccgagcatgtctggggagtttacaggaacttgaatctgaacctgtcattcaagtcactgtggggtcagcaaaatatgagagtgcctaccaggcagtggtatggaagatagatcggcttccagacaaaaattcaagtctagatcatccccattgtctgtcatacaaattagagcttggatcagaccaagaaattccctctgattggtatccatttgctactgttcagttttccgtgcctgacacctgtgcctcaaggacagaggtcaggtctctgggagtggagagtgatgtccagccacagaaacatgttcagcagcgagcttgctacaacatccaggttgaaatagaaaagaagtggattaaaatcgatggagaagacccagataaaattggtgactgcataactcagtaggagtagcaagagtttatgatgacagcccacttgtcaaatatgtaattcaccgaaaccacaccaagtcctgctactgtagagtggaaatgacttctgaatagcggttttaggacaggtctgatggctgtgtttagagaagtttagacctaaaaccgaacaatctgtattttttgcttttcatgtgtttttgtcctaggggttcgatctaaaatgtttctataattcgtgtgatgttttgcttcctattgaaactcaaaggcactgttactcgttgtgtgaccccgcagccagtatgatttttgattactcagtggctgactgttttgctctctggattactgaggtgccgtcttcatttcttcccatctcttcttgctgcttagtgtctgtactagagggtaagggaatcaaaggagacataaaccaaaatagttaattttccctctttcttgcctctgaaatgtggctaggtgtagaatgatgttgaaaccacaggctaaaatgtagatctggaagtatctgtgcttttgaattacttatttacctgtcctcttaccgttggtaaataataattggctatatttggtacctgtctctctcctactgtattgtcattttcaaaatgtgtttgttttctggcgcgtgctgcaaagaagctatttctgttgtcctacatattttagtataaatcactaagacatatttcctttcacttggcaggattcctttcaaaatggaatctgagtattagacactagttaacatatttgtgtatattaaatatgaatttttaaaatttataaatactattttccaaaagtacagactctaaggacatattttgataaagtattatttgtaatgaacacaagcctctcttgagtagaagtctaaatcacattatgattattttatactagttctgctatcatgctgttttatgctaattctgcttattttagagtatttttcattaaaaggtgagcaaagtgaaagatacttggtattttacccagatttctaagtggcaacatttttattcttcagagtcaggtaaatgactataatagtttggtttctaatgaaaagtcaatagcattagcagttataattctgtttataatttcctttcagcatttacagtgaaaagtgagaattttaaaatttatgaaatctatattccaggtattgtttttagtctgaaaaacaaactcccccatgtggtattaatataccttcaatttatgttgagtcttaaacataattaggagatatttttctctatttgctagatttgttttgagtcaaaactgatttagtgttcttccaaacaacatttatgtgttggcctacagagtttatttcatgtgttttttttaatatttaatattatattacattcattgaaatctgttcaaaaacagattaagacaaacatttatgatggtctgtatcaatcagcagattttattgcttttcattattttactgtaaaggcaaagaatgcaataggtgatggttggttgaaaggaattgttattgctgtttttattttttactttttttgagacagagtctcactctgttgcccagcctggagtgcagtgtgtcatcttggctcactgcaacctccgcctcctgggttcaagggattctcctgcctcagcctccaactagctgggattacaggcacaagccaccatgcctggctaaaattcttttgtatttttactacagacggagtttccccatgttggccgggctagtctcgaactcctgacctcaggtgatccaccagcctcggcctcccaaagttctgggattaaatgcgtgagccaccatgcccggccgctattgctctttttaacttcatttgatgccttgcttataatatcatatgcttgaggctcactgttgatgtagagtagggcaaatctgtgtgtgtatgtcattaaaaaaattctaccatctttctttatcatctggtgtgggcgcactctacagtgacttcagtctgctcagaacgaatgtggaggccggccgaaactgatgctgcccacagtcccagtgaagttaggtgggttaattactgccattcctttctaagtgtgttttatggcatcctgcccacaaagaactcacagtctgattaggatgaacttaatgactatttacacctcaaaatatattcagcaaagggttcacttagttgcccctcatgcttcacaggttgactagtatctgtgggtacctccctgcccaggttattcactcacaagccaccgggccttcaggacatctcaagattcagtcttgacaatataatagcaaaagctggactaaagcccaaatggattgtctgtggcaatgcagaagctgatagcattaacagcagggtgttacagcataattgttaattcgcacatctattaggatccttaaatattcattacttaatgttaaattaacattctgtgtagggaggggaggcttattcaattcttctgacctcagaactggcagaaggtcagatgtgactacagaactctaggtgaaaaatcaggtagggttcaaattaagtagaactgcccttgccggaatagtgatcttcaaaaaacccttgcttttaggggagggaagcggggaaggaaaggaatgagggaggaaatattcctttctagcattcattttgcttagatcactccattgtgagtttgaccattttggagtcaaatgagcagacttccaaggagttgaccagtttgtgactagtctggtcacctttccagttacaggatcatattaactgtgtaaatgaattcatgggtagatgatttgtgcagatctgaatttaagaacatttcctttttctgtgggaatcacaagagtttatccactaaaaaaagatatgtaaaaaagatactttccagcacataaataaaggctggaattttacaacctgatgtatatattagacagttctaggatgttagttcccttcattccagagctatgcttgtgatacagccccttttcttataaagtcagttagaaggacttccttaacaatgactattataatgtcttacttaaaatacagttttgtattctgtcaatgcaaatataagacaggttgagccttaatcatgtaacaaaatattttgtagattacatattgatttttcaaaaattaaaaatgtatttcaaacta

SEQ ID NO: 186989 - DNA, 5511 bp, Homo sapiens
  Payload ID: 16818
  Gene Symbol: STON1
  Gene Name: stonin 1
  Uniprot ID: Q9Y6Q2
  ENST ID: ENST00000404752
  CDS Start-End: 94-2301
ggtgtggctggctgcggccagaatcggagccccaaccgcgctgccgagtcaacctatttgatttcttgacaagaccacaatctgatcccaaagatgtgctccacaaatccaggcaaatgggtcacctttgatgatgatcctgctgttcaatcttctcaaaagtcaaagaattttcctctggagaatcaaggtgtctgtagaccaaatggactgaagctgaaccttcctggcctcagggaatttcccagtggatcttcctccaccagcagcactcctctctcctcccccattgtagatttttatttcagtccaggacctccaagtaactctcctctttctacacctaccaaagacttcccaggttttcctggcatccccaaagcagggactcatgtgctttatcctattccagaatcatcttcagacagcccactcgcaatatcaggaggagaatcttccttactgcctaccagaccaacatgtttatcccatgccttgttacccagtgaccactcatgtacacatccaactcccaaagtaggtcttccagatgaagttaatcctcaacaggctgaaagcctaggattccaaagtgatgatctcccccagtttcagtattttcgagaggactgtgctttttcaagtccattttggaaagatgaaggcagtgattcccatttcacccttgacccaccaggaagcaaaaagatgttctcatcaagaaacaaggagatgcctattgaccaaaaaagcctaaataagtgttcactcaactatatctgtgagaagcttgaacatctccagtcagctgagaaccaagactcacttagaagtttgtctatgcactgtctatgtgctgaagaaaatgcctcttcctttgtcccccacacactcttcaggagtcagccaaaatccggatggtctttcatgctgagaattcctgagaagaagaatatgatgtcttcccggcaatggggaccaatttttctgaaagttttgcctggaggaattttgcagatgtattatgaacagggattagaaaaaccatttaaagagatacagcttgatccatattgtaggctttctgaacccaaggttgagaacttcagtgtagcaggaaaaatccacactgtgaagattgaacatgtgtcttacacagaaaaaaggaaataccattctaagacagaagtagttcatgaacctgacatagagcagatgctgaagttggggtccacatcgtaccatgacttccttgactttctgactactgtggaggaggagctgatgaagttgccagctgtttcaaaaccaaaaaagaactacgaggagcaagaaatttccttggaaattgtggacaacttttggggtaaagtcacaaaagaaggaaaatttgttgaaagtgctgtgataactcaaatttattgcctctgctttgtgaatgggaacctggaatgctttttaaccttgaatgaccttgagttgccgaagcgagatgaatcctattatgagaaggactcagaaaaaaaggggattgatattcttgactaccattttcataagtgtgtgaatgtacaagaatttgagcaatcaagaatcattaagtttgtacctctggatgcctgccggtttgagctgatgcgtttcaagactttgtataatggggataatcttcccttttccttgaagtctgtagtggttgtccagggagcatacgtggaacttcaggcttttgtcaacatggcctcattggcgcagaggtcatcctatgctggttccttaaggtcctgtgacaatataaggatacactttcctgtcccatcgcagtggatcaaggccctttggaccatgaacctccagaggcagaagtctctgaaagctaaaatgaaccgccgagcatgtctggggagtttacaggaacttgaatctgaacctgtcattcaagtcactgtggggtcagcaaaatatgagagtgcctaccaggcagtggtatggaagatagatcggcttccagacaaaaattcaagtctagatcatccccattgtctgtcatacaaattagagcttggatcagaccaagaaattccctctgattggtatccatttgctactgttcagttttccgtgcctgacacctgtgcctcaaggacagaggtcaggtctctgggagtggagagtgatgtccagccacagaaacatgttcagcagcgagcttgctacaacatccaggttgaaatagaaaagaagtggattaaaatcgatggagaagacccagataaaattggtgactgcataactcagtaggagtagcaagagtttatgatgacagcccacttgtcaaatatgtaattcaccgaaaccacaccaagtcctgctactgtagagtggaaatgacttctgaatagcggttttaggacaggtctgatggctgtgtttagagaagtttagacctaaaaccgaacaatctgtattttttgcttttcatgtgtttttgtcctaggggttcgatctaaaatgtttctataattcgtgtgatgttttgcttcctattgaaactcaaaggcactgttactcgttgtgtgaccccgcagccagtatgatttttgattactcagtggctgactgttttgctctctggattactgaggtgccgtcttcatttcttcccatctcttcttgctgcttagtgtctgtactagagggtaagggaatcaaaggagacataaaccaaaatagttaattttccctctttcttgcctctgaaatgtggctaggtgtagaatgatgttgaaaccacaggctaaaatgtagatctggaagtatctgtgcttttgaattacttatttacctgtcctcttaccgttggtaaataataattggctatatttggtacctgtctctctcctactgtattgtcattttcaaaatgtgtttgttttctggcgcgtgctgcaaagaagctatttctgttgtcctacatattttagtataaatcactaagacatatttcctttcacttggcaggattcctttcaaaatggaatctgagtattagacactagttaacatatttgtgtatattaaatatgaatttttaaaatttataaatactattttccaaaagtacagactctaaggacatattttgataaagtattatttgtaatgaacacaagcctctcttgagtagaagtctaaatcacattatgattattttatactagttctgctatcatgctgttttatgctaattctgcttattttagagtatttttcattaaaaggtgagcaaagtgaaagatacttggtattttacccagatttctaagtggcaacatttttattcttcagagtcaggtaaatgactataatagtttggtttctaatgaaaagtcaatagcattagcagttataattctgtttataatttcctttcagcatttacagtgaaaagtgagaattttaaaatttatgaaatctatattccaggtattgtttttagtctgaaaaacaaactcccccatgtggtattaatataccttcaatttatgttgagtcttaaacataattaggagatatttttctctatttgctagatttgttttgagtcaaaactgatttagtgttcttccaaacaacatttatgtgttggcctacagagtttatttcatgtgttttttttaatatttaatattatattacattcattgaaatctgttcaaaaacagattaagacaaacatttatgatggtctgtatcaatcagcagattttattgcttttcattattttactgtaaaggcaaagaatgcaataggtgatggttggttgaaaggaattgttattgctgtttttattttttactttttttgagacagagtctcactctgttgcccagcctggagtgcagtgtgtcatcttggctcactgcaacctccgcctcctgggttcaagggattctcctgcctcagcctccaactagctgggattacaggcacaagccaccatgcctggctaaaattcttttgtatttttactacagacggagtttccccatgttggccgggctagtctcgaactcctgacctcaggtgatccaccagcctcggcctcccaaagttctgggattaaatgcgtgagccaccatgcccggccgctattgctctttttaacttcatttgatgccttgcttataatatcatatgcttgaggctcactgttgatgtagagtagggcaaatctgtgtgtgtatgtcattaaaaaaattctaccatctttctttatcatctggtgtgggcgcactctacagtgacttcagtctgctcagaacgaatgtggaggccggccgaaactgatgctgcccacagtcccagtgaagttaggtgggttaattactgccattcctttctaagtgtgttttatggcatcctgcccacaaagaactcacagtctgattaggatgaacttaatgactatttacacctcaaaatatattcagcaaagggttcacttagttgcccctcatgcttcacaggttgactagtatctgtgggtacctccctgcccaggttattcactcacaagccaccgggccttcaggacatctcaagattcagtcttgacaatataatagcaaaagctggactaaagcccaaatggattgtctgtggcaatgcagaagctgatagcattaacagcagggtgttacagcataattgttaattcgcacatctattaggatccttaaatattcattacttaatgttaaattaacattctgtgtagggaggggaggcttattcaattcttctgacctcagaactggcagaaggtcagatgtgactacagaactctaggtgaaaaatcaggtagggttcaaattaagtagaactgcccttgccggaatagtgatcttcaaaaaacccttgcttttaggggagggaagcggggaaggaaaggaatgagggaggaaatattcctttctagcattcattttgcttagatcactccattgtgagtttgaccattttggagtcaaatgagcagacttccaaggagttgaccagtttgtgactagtctggtcacctttccagttacaggatcatattaactgtgtaaatgaattcatgggtagatgatttgtgcagatctgaatttaagaacatttcctttttctgtgggaatcacaagagtttatccactaaaaaaagatatgtaaaaaagatactttccagcacataaataaaggctggaattttacaacctgatgtatatattagacagttctaggatgttagttcccttcattccagagctatgcttgtgatacagccccttttcttataaagtcagttagaaggacttccttaacaatgactattataatgtcttacttaaaatacagttttgtattctgtcaatgcaaatataagacaggttgagccttaatcatgtaacaaaatattttgtagattacatattgatttttcaaaaattaaaaatgtatttcaaact

SEQ ID NO: 186990 - DNA, 1006 bp, Homo sapiens
  Payload ID: 16818
  Gene Symbol: STON1
  Gene Name: stonin 1
  ENST ID: ENST00000444932
  CDS Start-End: 1-282
aggtcatcctatgctggttccttaaggtcctgtgacaatataaggatacactttcctgtcccatcgcagtggatcaaggccctttggaccatgaacctccagaggcagaagtctctgaaagctaaaatgaaccgccgagcatgtctggggagtttacaggaacttgaatctgaacctgtcattcaagtcactgtggggtcagcaaaatatgagagtgcctaccaggcagtggtatggaagatagatcggcttccagacaaaaattcaattttccgtgcctgacacctgtgcctcaaggacagaggtcaggtctctgggagtggagagtgatgtccagccacagaaacatgttcagcagcgagcttgctacaacatccaggttgaaatagaaaagaagtggattaaaatcgatggagaagacccagataaaattggtgactgcataactcagtaggagtagcaagagtttatgatgacagcccacttgtcaaatatgtaattcaccgaaaccacaccaagtcctgctactgtagagtggaaatgacttctgaatagcggttttaggacaggtctgatggctgtgtttagagaagtttagacctaaaaccgaacaatctgtattttttgcttttcatgtgtttttgtcctaggggttcgatctaaaatgtttctataattcgtgtgatgttttgcttcctattgaaactcaaaggcactgttactcgttgtgtgaccccgcagccagtatgatttttgattactcagtggctgactgttttgctctctggattactgaggtgccgtcttcatttcttcccatctcttcttgctgcttagtgtctgtactagagggtaagggaatcaaaggagacataaaccaaaatagttaattttccctctttcttgcctctgaaatgtggctaggtgtagaatgatgttgaaaccacaggctaaaatgtagatctggaagtatctgtgcttttgaattacttatttacctgtcctc

SEQ ID NO: 186991 - DNA, 2977 bp, Homo sapiens
  Payload ID: 16819
  Gene Symbol: STON2
  Gene Name: stonin 2
  Uniprot ID: Q8WXE9
  ENST ID: ENST00000267540
  CDS Start-End: 202-2919
cagatttctgcctggcagattaaccaacggcaagagaggctgatctgtctacattctgagtactgcccttggcaagacacctagaacagaccctggacccaagtctaccgtactaccatacccctactccagcccaccccagacagtattctggggttcacctgaggtcagcagtgtgaagatgaccagtgcctttttagcatgacgactttggaccatgtgattgccacccaccagtcagaatgggtctccttcaatgaagagccaccctttcctgcccactcgcaggggggcacggaagagcacctcccaggactgtcatcttccccagaccagtccgagagctcctccggggagaaccatgtggtggatggaggctctcaagaccattcccactcggagcaggatgactcctctgaaaagatgggcctcatctctgaagcagcttccccacctgggagccctgagcagcccccacctgacctggcctcggccatcagcaactgggttcagtttgaagatgacacaccctgggccagcacatctccacctcatcaggaaacagctgagacagccctaccattgaccatgccctgctggacatgcccttcctttgactccctggggagatgccctctgacttctgagagcagctggaccacccattctgaagacaccagcagtcctagctttggatgttcgtatacagatctgcagctcatcaatgctgaggagcagacgagtggccaggcttctggggctgactcaactgacaattcctcctcgcttcaagaagatgaagaagtagagatggaggccatcagctggcaggccagcagtccagccatgaatgggcaccctgcccctccagtgacctctgctcgttttcccagctgggtcacctttgatgacaatgaagtcagctgccctttaccaccagtcacctctcctctgaagccaaatacaccaccaagtgcatctgtgatcccagatgtaccttataattcaatgggatcatttaagaagagggaccgtcccaagagcactttgatgaacttctccaaagttcagaagctggatatttcctctttaaaccgcacgccttctgtaactgaggcttcaccttggagggcaaccaaccctttcctgaatgagactctgcaggatgtacagccctcccctatcaaccctttcagtgctttctttgaggagcaggagaggcgctcccaaaacagttccatttccagtaccacgggcaaaagccaaagagattccctcattgtcatctaccaggatgccatcagttttgatgattcaagcaaaacccagtcacactctgatgctgttgaaaaactcaaacaactccaaattgatgaccctgatcactttggcagtgcaactctacctgatgatgacccagtagcctggattgaactagatgctcacccgcctggatcagcacggtcccagcctcgtgacgggtggccaatgatgttgaggatccctgagaagaaaaacatcatgtcctccaggcactggggaccgatcttcgtcaaactgacagacactggttacctgcagctgtattatgagcagggcctagaaaaaccattccgtgagttcaagctggagatctgtcatgagatttcagaaccccggcttcaaaactatgatgagaatggcagaatccacagcttgcggatagaccgtgtcacctataaagagaagaagaaataccagcccaaacctgctgtggcccacacagcagagagggaacaggtgattaagctgggcaccaccaattacgatgacttcctgagtttcatccatgcagttcaggaccgtctcatggatctgccagtgttgtcaatggacttgagcacagttggcctcaactaccttgaagaggagattacagtggatgtcagagatgaattctctggcattgtgagcaaaggagacaaccagattctccagcaccatgtcttgacacggatccacatcctgagtttcctgtctgggctcgcagagtgccgcctgggcctcaatgacatcctcgtcaaagggaatgaaatagttttgaggcaggacatcatgcccaccaccaccacaaagtggatcaagctccatgagtgccgtttccatgggtgtgtggatgaggatgttttccacaactcacgggtcattctgttcaaccctttggatgcgtgccggtttgagctaatgcggttcaggacagtgtttgctgagaagaccttgcctttcacactcaggacggccacaagtgtcaatggggcagaggtggaggtgcagagctggctgaggatgtcaactggcttctccgccaatcgtgaccccctcactcaggttccctgtgagaatgtgatgatccgttaccctgtgcccagtgagtgggtgaaaaacttccgcagggaaagtgtcctgggggaaaagtctttgaaagccaaagtgaaccggggggcaagttttggctccactagtgtttctggctctgagcctgtcatgagagtaactctgggaactgccaagtacgagcatgccttcaactccattgtgtggaggataaaccgactgccggacaaaaactcagcttccggtcacccacactgtttcttttgccaccttgaactcggctctgaccgggaagtgccttccagatttgccaatcacgtgaatgtcgagttcagcatgcccacaacttctgcctccaaagccagcgtgagatctatctctgtagaagacaagactgacgtcaggaagtgggtcaattattctgcacactacagctaccaggtagccttgggaagcatctggctaatgcttccaactccatttgttcaccccactaccctccccctcttattccttttagccatgcttactatgttcgcctggtaacctcttactgccttagaggaagttcaccatacatagctgtgggtgcgtctgctctgat

SEQ ID NO: 186992 - DNA, 686 bp, Homo sapiens
  Payload ID: 16819
  Gene Symbol: STON2
  Gene Name: stonin 2
  ENST ID: ENST00000553821
  CDS Start-End: 1-320
ggaggataaaccgactgccggacaaaaactcagcttccggtcacccacactgtttcttttgccaccttgaactcggctctgaccgggaagtgccttccagatttgccaatcacgtgaatgtcgagttcagcatgcccacaacttctgcctccaaagccagcgtgagatctatctctgtagaagacaagactgacgtcaggaagtgggtcaattattctgcacactacagctaccaggtggaaattgagcaaaaaaagagtttgaagccggactttgaaggagatgaaatggaaaatcccaaggagtgtggagtgcagtgacaaagccttgcggcaaggaatcctgatcccagagtcatgatagggtgtcttcctgagtcatgatagggtgtcttcctgagtagctgaagttgcagtcaatacctgctgtggccactgcatgttgggaacagtataccagatcttcctgtttgcagttacttgtattttaccaggaaaccctgagaatggtggcttttggagaggctctttgattctggtcatgcctaaagcacgaggttcacctgactgttggagcttactgtataattaagcctccttgtcttgtctctgcttatctcacagcactggtatgtggtttgttgtgactgttacagtcaggaaaagaacctcccacatcagtgttag

SEQ ID NO: 186993 - DNA, 4302 bp, Homo sapiens
  Payload ID: 16819
  Gene Symbol: STON2
  Gene Name: stonin 2
  Uniprot ID: Q8WXE9
  ENST ID: ENST00000555447
  CDS Start-End: 414-3176
cttggctggtcacagcacagtgctcctgggcccaggggctgtgatctcctgtcatttggttgccattttcctgtgaagagggtagagaatatgcacccagtcaggaaaacaactcacgaggcaaaaaagtacatctcgtggatggagcagggcgaagtggttacaagtacagactctggagccagactgcctgggtttgaattgtgcggtttcagatttctgcctggcagattaaccaacggcaagagaggctgatctgtctacattctgagtactgcccttggcaagacacctagaacagaccctggacccaagtctaccgtactaccatacccctactccagcccaccccagacagtattctggggttcacctgaggtcagcagtgtgaagatgaccagtgcctttttagcatgacgactttggaccatgtgattgccacccaccagtcagaatgggtctccttcaatgaagagccaccctttcctgcccactcgcaggggggcacggaagagcacctcccaggactgtcatcttccccagaccagtccgagagctcctccggggagaaccatgtggtggatggaggctctcaagaccattcccactcggagcaggatgactcctctgaaaagatgggcctcatctctgaagcagcttccccacctgggagccctgagcagcccccacctgacctggcctcggccatcagcaactgggttcagtttgaagatgacacaccctgggccagcacatctccacctcatcaggaaacagctgagacagccctaccattgaccatgccctgctggacatgcccttcctttgactccctggggagatgccctctgacttctgagagcagctggaccacccattctgaagacaccagcagtcctagctttggatgttcgtatacagatctgcagctcatcaatgctgaggagcagacgagtggccaggcttctggggctgactcaactgacaattcctcctcgcttcaagaagatgaagaagtagagatggaggccatcagctggcaggccagcagtccagccatgaatgggcaccctgcccctccagtgacctctgctcgttttcccagctgggtcacctttgatgacaatgaagtcagctgccctttaccaccagtcacctctcctctgaagccaaatacaccaccaagtgcatctgtgatcccagatgtaccttataattcaatgggatcatttaagaagagggaccgtcccaagagcactttgatgaacttctccaaagttcagaagctggatatttcctctttaaaccgcacgccttctgtaactgaggcttcaccttggagggcaaccaaccctttcctgaatgagactctgcaggatgtacagccctcccctatcaaccctttcagtgctttctttgaggagcaggagaggcgctcccaaaacagttccatttccagtaccacgggcaaaagccaaagagattccctcattgtcatctaccaggatgccatcagttttgatgattcaagcaaaacccagtcacactctgatgctgttgaaaaactcaaacaactccaaattgatgaccctgatcactttggcagtgcaactctacctgatgatgacccagtagcctggattgaactagatgctcacccgcctggatcagcacggtcccagcctcgtgacgggtggccaatgatgttgaggatccctgagaagaaaaacatcatgtcctccaggcactggggaccgatcttcgtcaaactgacagacactggttacctgcagctgtattatgagcagggcctagaaaaaccattccgtgagttcaagctggagatctgtcatgagatttcagaaccccggcttcaaaactatgatgagaatggcagaatccacagcttgcggatagaccgtgtcacctataaagagaagaagaaataccagcccaaacctgctgtggcccacacagcagagagggaacaggtgattaagctgggcaccaccaattacgatgacttcctgagtttcatccatgcagttcaggaccgtctcatggatctgccagtgttgtcaatggacttgagcacagttggcctcaactaccttgaagaggagattacagtggatgtcagagatgaattctctggcattgtgagcaaaggagacaaccagattctccagcaccatgtcttgacacggatccacatcctgagtttcctgtctgggctcgcagagtgccgcctgggcctcaatgacatcctcgtcaaagggaatgaaatagttttgaggcaggacatcatgcccaccaccaccacaaagtggatcaagctccatgagtgccgtttccatgggtgtgtggatgaggatgttttccacaactcacgggtcattctgttcaaccctttggatgcgtgccggtttgagctaatgcggttcaggacagtgtttgctgagaagaccttgcctttcacactcaggacggccacaagtgtcaatggggcagaggtggaggtgcagagctggctgaggatgtcaactggcttctccgccaatcgtgaccccctcactcaggttccctgtgagaatgtgatgatccgttaccctgtgcccagtgagtgggtgaaaaacttccgcagggaaagtgtcctgggggaaaagtctttgaaagccaaagtgaaccggggggcaagttttggctccactagtgtttctggctctgagcctgtcatgagagtaactctgggaactgccaagtacgagcatgccttcaactccattgtgtggaggataaaccgactgccggacaaaaactcagcttccggtcacccacactgtttcttttgccaccttgaactcggctctgaccgggaagtgccttccagatttgccaatcacgtgaatgtcgagttcagcatgcccacaacttctgcctccaaagccagcgtgagatctatctctgtagaagacaagactgacgtcaggaagtgggtcaattattctgcacactacagctaccagacaacagaaacagacaaccttccaaatcctctatattgcagttgccttccacacacagatttaaaaagaggatcaaagagggtggtgaagatcaggtggaatgcttctttggaagttccactggcatcatctatcagaacaatggtgtgagcatgaagaggcacagacaggtctccaaaatagatgttaggatttgggtgctacctgacacagaagtaggtctaaccctccaagtactggggatgataggataatcaatgaggtatatatatatttgtcattttgtataaaatattgtgaaaattgaaggaggacactcagtaaacatcctgggactatttgtaagttatggcaaaaccagatgagagaaaagggacagtcccctctgtatcctcgttgtctcttagtaacatcaaattgtagttaaaaaaattttaaactatgtacaagctacaaaatagcatctctttcatggtatgtttgagtgtgtaattttagtttcttttctggttgtatttgtggtagtcagatgtgttggattgattccaactggacagagtaaggaattccagcatcctcttcctgcttgctcgtgttaccccacagatcaaaccctcaattctagttggggatgctgtctagccccacaccatgactgaagccttaagcactgttgcgcctccatgtgctttggatcagcaaccccagtggtattctaccagagcattgtgggaaagcagatgtatagtcaggtcccaacagcaaattgttgggtgtgagagttctaaagtataggggtgagggaagagaaggatatgaactcctctgaccttaagccagcattcatttaacttttatgtctacttaacaagagaacctggagaaaactaccgtattcaagagattaatcaaaatcagtgttttagccaggcgatgacagagaagcaccattcctcaccctccattcttgtaatgtctgtaataaatttcagtgcgtcaggatggatgaacccaagatccagtgaatgattcagctgttccaagccttacattttccatcattcatcatccattctcattcagtgtaacctcttgcactattgtggttaattttatgtaaaaccagtttatgtttttttttttttaatatgtgcctatgtaataaagtctacacactggctatctctgtagaggtgaggttttgtttttagttgttctactgattatatccttttctgagctatgaaaatgaattattaataaaaaatttttgaac

SEQ ID NO: 186994 - DNA, 603 bp, Homo sapiens
  Payload ID: 16819
  Gene Symbol: STON2
  Gene Name: stonin 2
  ENST ID: ENST00000557055
  CDS Start-End: 455-603
gagtctggagccggcgtcggcgctgcggccgggagggatcgtggcgagagcagtgcggccgggtgggtatcccgcggccagagaagccggctttgccgcggcgacctttcggcggacgccggggaccctgcggaccgcggcgcaggaaaacaactcacgaggcaaaaaagtacatctcgtggatggagcagggcgaagtggttacaagtacagactctggagccagactgcctgggtttgaattgtgcggtttcagatttctgcctggcagattaaccaacggcaagagaggctgatctgtctacattctgagtactgcccttggcaagacacctagaacagaccctggacccaagtctaccgtactaccatacccctactccagcccaccccagacagtattctggggttcacctgaggtcagcagtgtgaagatgaccagtgcctttttagcatgacgactttggaccatgtgattgccacccaccagtcagaatgggtctccttcaatgaagagccaccctttcctgcccactcgcaggggggcacggaagagcacctcccaggactgtcatcttccccagaccagtccgagagctcctc

SEQ ID NO: 186995 - DNA, 439 bp, Homo sapiens
  Payload ID: 16819
  Gene Symbol: STON2
  Gene Name: stonin 2
  ENST ID: ENST00000554710
  CDS Start-End: 430-439
ctagcgccgctgtgccccctggcgcccccgagcctgcctggtcgagccacgcggaggcgcggcgtttccaccagccgcgggcgtcccggggtgggggaggacgaggggactctgcttaaggaaaacaactcacgaggcaaaaaagtacatctcgtggatggagcagggcgaagtggttacaagtacagactctggagccagactgcctgggtttgaattgtgcggtttcagatttctgcctggcagattaaccaacggcaagagaggctgatctgtctacattctgagtactgcccttggcaagacacctagaacagaccctggacccaagtctaccgtactaccatacccctactccagcccaccccagacagtattctggggttcacctgaggtcagcagtgtgaagatgaccagtgcctttttagcatgacgactt

SEQ ID NO: 186996 - DNA, 2964 bp, Homo sapiens
  Payload ID: 16819
  Gene Symbol: STON2
  Gene Name: stonin 2
  Uniprot ID: Q8WXE9
  ENST ID: ENST00000614646
  CDS Start-End: 202-2964
cagatttctgcctggcagattaaccaacggcaagagaggctgatctgtctacattctgagtactgcccttggcaagacacctagaacagaccctggacccaagtctaccgtactaccatacccctactccagcccaccccagacagtattctggggttcacctgaggtcagcagtgtgaagatgaccagtgcctttttagcatgacgactttggaccatgtgattgccacccaccagtcagaatgggtctccttcaatgaagagccaccctttcctgcccactcgcaggggggcacggaagagcacctcccaggactgtcatcttccccagaccagtccgagagctcctccggggagaaccatgtggtggatggaggctctcaagaccattcccactcggagcaggatgactcctctgaaaagatgggcctcatctctgaagcagcttccccacctgggagccctgagcagcccccacctgacctggcctcggccatcagcaactgggttcagtttgaagatgacacaccctgggccagcacatctccacctcatcaggaaacagctgagacagccctaccattgaccatgccctgctggacatgcccttcctttgactccctggggagatgccctctgacttctgagagcagctggaccacccattctgaagacaccagcagtcctagctttggatgttcgtatacagatctgcagctcatcaatgctgaggagcagacgagtggccaggcttctggggctgactcaactgacaattcctcctcgcttcaagaagatgaagaagtagagatggaggccatcagctggcaggccagcagtccagccatgaatgggcaccctgcccctccagtgacctctgctcgttttcccagctgggtcacctttgatgacaatgaagtcagctgccctttaccaccagtcacctctcctctgaagccaaatacaccaccaagtgcatctgtgatcccagatgtaccttataattcaatgggatcatttaagaagagggaccgtcccaagagcactttgatgaacttctccaaagttcagaagctggatatttcctctttaaaccgcacgccttctgtaactgaggcttcaccttggagggcaaccaaccctttcctgaatgagactctgcaggatgtacagccctcccctatcaaccctttcagtgctttctttgaggagcaggagaggcgctcccaaaacagttccatttccagtaccacgggcaaaagccaaagagattccctcattgtcatctaccaggatgccatcagttttgatgattcaagcaaaacccagtcacactctgatgctgttgaaaaactcaaacaactccaaattgatgaccctgatcactttggcagtgcaactctacctgatgatgacccagtagcctggattgaactagatgctcacccgcctggatcagcacggtcccagcctcgtgacgggtggccaatgatgttgaggatccctgagaagaaaaacatcatgtcctccaggcactggggaccgatcttcgtcaaactgacagacactggttacctgcagctgtattatgagcagggcctagaaaaaccattccgtgagttcaagctggagatctgtcatgagatttcagaaccccggcttcaaaactatgatgagaatggcagaatccacagcttgcggatagaccgtgtcacctataaagagaagaagaaataccagcccaaacctgctgtggcccacacagcagagagggaacaggtgattaagctgggcaccaccaattacgatgacttcctgagtttcatccatgcagttcaggaccgtctcatggatctgccagtgttgtcaatggacttgagcacagttggcctcaactaccttgaagaggagattacagtggatgtcagagatgaattctctggcattgtgagcaaaggagacaaccagattctccagcaccatgtcttgacacggatccacatcctgagtttcctgtctgggctcgcagagtgccgcctgggcctcaatgacatcctcgtcaaagggaatgaaatagttttgaggcaggacatcatgcccaccaccaccacaaagtggatcaagctccatgagtgccgtttccatgggtgtgtggatgaggatgttttccacaactcacgggtcattctgttcaaccctttggatgcgtgccggtttgagctaatgcggttcaggacagtgtttgctgagaagaccttgcctttcacactcaggacggccacaagtgtcaatggggcagaggtggaggtgcagagctggctgaggatgtcaactggcttctccgccaatcgtgaccccctcactcaggttccctgtgagaatgtgatgatccgttaccctgtgcccagtgagtgggtgaaaaacttccgcagggaaagtgtcctgggggaaaagtctttgaaagccaaagtgaaccggggggcaagttttggctccactagtgtttctggctctgagcctgtcatgagagtaactctgggaactgccaagtacgagcatgccttcaactccattgtgtggaggataaaccgactgccggacaaaaactcagcttccggtcacccacactgtttcttttgccaccttgaactcggctctgaccgggaagtgccttccagatttgccaatcacgtgaatgtcgagttcagcatgcccacaacttctgcctccaaagccagcgtgagatctatctctgtagaagacaagactgacgtcaggaagtgggtcaattattctgcacactacagctaccagacaacagaaacagacaaccttccaaatcctctatattgcagttgccttccacacacagatttaaaaagaggatcaaagagggtggtgaagatcaggtggaatgcttctttggaagttccactggcatcatctatcagaacaatggtgtga

SEQ ID NO: 186997 - DNA, 2154 bp, Homo sapiens
  Payload ID: 16820
  Gene Symbol: SARAF
  Gene Name: store-operated calcium entry-associated regulatory factor
  Uniprot ID: Q96BY9
  ENST ID: ENST00000256255
  CDS Start-End: 259-1278
acaccgcctcgccccgccccaagccgcgctgtgctccaggggcgggggcccacggcggccactcactgagccccacgggccgcagcggcagtgacgtagggttggcgcacggatccgttgcggctgcagctctgcagtcgggccgttccttcgccgccgccaggggtagcggtgtagctgcgcagcgtcgcgcgcgctaccgcacccaggttcggcccgtaggcgtctggcagcccggcgccatcttcatcgagcgccatggccgcagcctgcgggccgggagcggccgggtactgcttgctcctcggcttgcatttgtttctgctgaccgcgggccctgccctgggctggaacgaccctgacagaatgttgctgcgggatgtaaaagctcttaccctccactatgaccgctataccacctcccgcaggctggatcccatcccacagttgaaatgtgttggaggcacagctggttgtgattcttataccccaaaagtcatacagtgtcagaacaaaggctgggatgggtatgatgtacagtgggaatgtaagacggacttagatattgcatacaaatttggaaaaactgtggtgagctgtgaaggctatgagtcctctgaagaccagtatgtactaagaggttcttgtggcttggagtataatttagattatacagaacttggcctgcagaaactgaaggagtctggaaagcagcacggctttgcctctttctctgattattattataagtggtcctcggcggattcctgtaacatgagtggattgattaccattgtggtactccttgggatcgcgtttgtagtctataagctgttcctgagtgacgggcagtattctcctccaccgtactctgagtatcctccattttcccaccgttaccagagattcaccaactcagcaggacctcctcccccaggctttaagtctgagttcacaggaccacagaatactggccatggtgcaacttctggttttggcagtgcttttacaggacaacaaggatatgaaaattcaggaccagggttctggacaggcttgggaactggtggaatactaggatatttgtttggcagcaatagagcggcaacacccttctcagactcgtggtactacccgtcctatcctccctcctaccctggcacgtggaatagggcttactcaccccttcatggaggctcgggcagctattcggtatgttcaaactcagacacgaaaaccagaactgcatcaggatatggtggtaccaggagacgataaagtagaaagttggagtcaaacactggatgcagaaattttggatttttcatcactttctctttagaaaaaaagtactacctgttaacaattgggaaaaggggatattcaaaagttctgtggtgttatgtccagtgtagctttttgtattctattatttgaggctaaaagttgatgtgtgacaaaatacttatgtgttgtatgtcagtgtaacatgcagatgtatattgcagtttttgaaagtgatcattactgtggaatgctaaaaatacattaatttctaaaacctgtgatgccctaagaagcattaagaatgaaggtgttgtactaatagaaactaagtacagaaaatttcagttttaggtggttgtagctgatgagttattacctcatagagactataatattctatttggtattatattatttgatgtttgctgttcttcaaacatttaaatcaagctttggactaattatgctaatttgtgagttctgatcacttttgagctctgaagctttgaatcattcagtggtggagatggccttctggtaactgaatattaccttctgtaggaaaaggtagaaaataagcatctagaaggttgttgtgaatgactctgtgctggcaaaaatgcttgaaacctctatatttctttcgttcataagaggtaaaggtcaaatttttcaacaaaagtcttttaataacaaaagcatgcagttctctgtgaaatctcaaatattgttgtaatagtctgtttcaatcttaaaaagaatcaataaaaacaaacaaggggtttagtctcattctttctattagcctaggcgcaaataaatgttactttttgtttttttaaaccctttttcccaaaggggaaagtt

SEQ ID NO: 186998 - DNA, 878 bp, Homo sapiens
  Payload ID: 16820
  Gene Symbol: SARAF
  Gene Name: store-operated calcium entry-associated regulatory factor
  ENST ID: ENST00000518296
  CDS Start-End: 1-655
cttggagtataatttagattatacagaacttggcctgcagaaactgaaggagtctggaaagcagcacggctttgcctctttctctgattattattataagtggtcctcggcggattcctgtaacatgagtggattgattaccattgtggtactccttgggatcgcgtttgtagtctataagctgttcctgagtgacgggcagtattctcctccaccgtactctgagtatcctccattttcccaccgttaccagagattcaccaactcagcaggacctcctcccccaggctttaagtctgagttcacaggaccacagaatactggccatggtgcaacttctggttttggcagtgcttttacaggacaacaaggatatgaaaattcaggaccagggttctggacaggcttgggaactggtggaatactaggatatttgtttggcagcaatagagcggcaacacccttctcagactcgtggtactacccgtcctatcctccctcctaccctggcacgtggaatagggcttactcaccccttcatggaggctcgggcagctattcggtatgttcaaactcagacacgaaaaccagaactgcatcaggtaagagcaaaaaatacaagttccttttacctaggagtaaagtacagaaatagtttgggaactttagaagatgattatctgtttagcaaccatggttttatttggtgtacctaccaaaaatattaatagcacagttaactgagatcccacttttaaacattctttaaaaatcaaacagggatttgatttaggcttagctctaccatagaccaaggttttaacttgaaccttactgggtgctagcttccccatatatttaattctgtgatctctaga

SEQ ID NO: 186999 - DNA, 582 bp, Homo sapiens
  Payload ID: 16820
  Gene Symbol: SARAF
  Gene Name: store-operated calcium entry-associated regulatory factor
  ENST ID: ENST00000522055
  CDS Start-End: 116-226
cgttccttcgccgccgccaggggtagcggtgtagctgcgcagcgtcgcgcgcgctaccgcacccaggttcggcccgtaggcgtctggcagcccggcgccatcttcatcgagcgccatggccgcagcctgcgggccgggagcggccgggtactgcttgctcctcggcttgcatttgtttctgctgaccgcgggccctgccctgggctggatcccatcccacagttgaaatgtgttggaggcacagctggttgtgattcttataccccaaaagtcatacagtgtcagaacaaaggctgggatgggtatgatgtacagtgggaatgtaagacggacttagatattgcatacaaatttggaaaaactgtggtgagctgtgaaggctatgagtcctctgaagaccagtatgtactaagaggttcttgtggcttggagtataatttagattatacagaacttggcctgcagaaactgaaggagtctggaaagcagcacggctttgcctctttctctgattattattataagtggtcctcggcggattcctgtaacatgagtggattgattaccattgtggtactcctt

SEQ ID NO: 187000 - DNA, 735 bp, Homo sapiens
  Payload ID: 16820
  Gene Symbol: SARAF
  Gene Name: store-operated calcium entry-associated regulatory factor
  ENST ID: ENST00000523127
  CDS Start-End: 1-642
attgcatacaaatttggaaaaactgtggtgagctgtgaaggctatgagtcctctgaagaccagtatgtactaagaggttcttgtggcttggagtataatttagattatacagaacttggcctgcagaaactgaaggagtctggaaagcagcacggctttgcctctttctctgattattattataagtggtcctcggcggattcctgtaacatgagtggattgattaccattgtggtactccttgggatcgcgtttgtagtctataagctgttcctgagtgacgggcagtattctcctccaccgtactctgagtatcctccattttcccaccgttaccagagattcaccaactcagcaggacctcctcccccaggctttaagtctgagttcacaggaccacagaatactggccatggtgcaacttctggttttggcagtgcttttacaggacaacaaggatatgaaaattcaggaccagggttctggacaggcttgggaactggtggaatactaggatatttgtttggcagcaatagggcttactcaccccttcatggaggctcgggcagctattcggtatgttcaaactcagacacgaaaaccagaactgcatcaggatatggtggtaccaggagacgataaagtagaaagttggagtcaaacactggatgcagaaattttggatttttcatcactttctctttagaaaaaaagtactacctgttaacaattggg

SEQ ID NO: 187001 - DNA, 566 bp, Homo sapiens
  Payload ID: 16820
  Gene Symbol: SARAF
  Gene Name: store-operated calcium entry-associated regulatory factor
  ENST ID: ENST00000523761
  CDS Start-End: 126-566
gcagtcgggccgttccttcgccgccgccaggggtagcggtgtagctgcgcagcgtcgcgcgcgctaccgcacccaggttcggcccgtaggcgtctggcagcccggcgccatcttcatcgagcgccatggccgcagcctgcgggccgggagcggccgggtactgcttgctcctcggcttgcatttgtttctgctgaccgcgggccctgccctgggctggaacgaccctgctcttaccctccactatgaccgctataccacctcccgcaggctggatcccatcccacagttgaaatgtgttggaggcacagctggttgtgattcttataccccaaaagtcatacagtgtcagaacaaaggctgggatgggtatgatgtacagtgggaatgtaagacggacttagatattgcatacaaatttggaaaaactgtggtgagctgtgaaggctatgagtcctctgaagaccagtatgtactaagaggttcttgtggcttggagtataatttagattatacagaacttggcctgcagaaactgaaggagtctggaaagcagcacggctttgcc

SEQ ID NO: 187002 - DNA, 1803 bp, Homo sapiens
  Payload ID: 16820
  Gene Symbol: SARAF
  Gene Name: store-operated calcium entry-associated regulatory factor
  ENST ID: ENST00000520303
  CDS Start-End: 205-318
gcggccactcactgagccccacgggccgcagcggcagtgacgtagggttggcgcacggatccgttgcggctgcagctctgcagtcgggccgttccttcgccgccgccaggggtagcggtgtagctgcgcagcgtcgcgcgcgctaccgcacccaggttcggcccgtaggcgtctggcagcccggcgccatcttcatcgagcgccatggccgcagcctgcgggccgggagcggccgggtactgcttgctcctcggcttgcatttgtttctgctgaccgcgggccctgccctgggctggaacgaccctgtgggaatgtaagacggacttagatattgcatacaaatttggaaaaactgtggtgagctgtgaaggctatgagtcctctgaagaccagtatgtactaagaggttcttgtggcttggagtataatttagattatacagaacttggcctgcagaaactgaaggagtctggaaagcagcacggctttgcctctttctctgattattattataagtggtcctcggcggattcctgtaacatgagtggattgattaccattgtggtactccttgggatcgcgtttgtagtctataagctgttcctgagtgacgggcagtattctcctccaccgtactctgagtatcctccattttcccaccgttaccagagattcaccaactcagcaggacctcctcccccaggctttaagtctgagttcacaggaccacagaatactggccatggtgcaacttctggttttggcagtgcttttacaggacaacaaggatatgaaaattcaggaccagggttctggacaggcttgggaactggtggaatactaggatatttgtttggcagcaatagagcggcaacacccttctcagactcgtggtactacccgtcctatcctccctcctaccctggcacgtggaatagggcttactcaccccttcatggaggctcgggcagctattcggtatgttcaaactcagacacgaaaaccagaactgcatcaggatatggtggtaccaggagacgataaagtagaaagttggagtcaaacactggatgcagaaattttggatttttcatcactttctctttagaaaaaaagtactacctgttaacaattgggaaaaggggatattcaaaagttctgtggtgttatgtccagtgtagctttttgtattctattatttgaggctaaaagttgatgtgtgacaaaatacttatgtgttgtatgtcagtgtaacatgcagatgtatattgcagtttttgaaagtgatcattactgtggaatgctaaaaatacattaatttctaaaacctgtgatgccctaagaagcattaagaatgaaggtgttgtactaatagaaactaagtacagaaaatttcagttttaggtggttgtagctgatgagttattacctcatagagactataatattctatttggtattatattatttgatgtttgctgttcttcaaacatttaaatcaagctttggactaattatgctaatttgtgagttctgatcacttttgagctctgaagctttgaatcattcagtggtggagatggccttctggtaactgaatattaccttctgtaggaaaaggtagaaaataagcatctagaaggttgttgtgaatgactctgtgctggcaaaaatgcttgaaacctctatatttctttcgttcataagaggtaaaggtcaaatttttcaacaaaagtcttttaataacaaaagcatgcagttctctgtgaaatctcaaatattgttgtaatagtctgtttcaa

SEQ ID NO: 187003 - DNA, 1741 bp, Homo sapiens
  Payload ID: 16820
  Gene Symbol: SARAF
  Gene Name: store-operated calcium entry-associated regulatory factor
  ENST ID: ENST00000521265
  CDS Start-End: 1-1043
tggccgcagcctgcgggccgggagcggccgggtactgcttgctcctcggcttgcatttgtttctgctgaccgcgggccctgccctgggctggaacgaccctgacagaatgttgctgcgggatgtaaaagctcttaccctccactatgaccgctataccacctcccgcaggctggatcccatcccacagttgaaatgtgttggaggcacagctggttgtgattcttataccccaaaagtcatacagtgtcagaacaaaggctgggatgggtatgatgtacagtgggaatgtaagacggacttagatattgcatacaaatttggaaaaactgtggtgagctgtgaaggctatgagtcctctgaagaccagtatgtactaagaggttcttgtggcttggagtataatttagattatacagaacttggcctgcagaaactgaaggagtctggaaagcagcacggctttgcctctttctctgattattattataagtggtcctcggcggattcctgtaacatgagtggattgattaccattgtggtactccttgggatcgcgtttgtagtctataagctgttcctgagtgacgggcagtattctcctccaccgtactctgagtatcctccattttcccaccgttaccagagattcaccaactcagcaggacctcctcccccaggctttaagtctgagttcacaggaccacagaatactggccatggtgcaacttctggttttggcagtgcttttacaggacaacaaggatatgaaaattcaggaccagggttctggacaggcttgggaactggtggaatactaggatatttgtttggcagcaatagagcggcaacacccttctcagactcgtggtactacccgtcctatcctccctcctaccctggcacgtggaatagggcttactcaccccttcatggaggctcgggcagctattcggatatggtggtaccaggagacgataaagtagaaagttggagtcaaacactggatgcagaaattttggatttttcatcactttctctttagaaaaaaagtactacctgttaacaattgggaaaaggggatattcaaaagttctgtggtgttatgtccagtgtagctttttgtattctattatttgaggctaaaagttgatgtgtgacaaaatacttatgtgttgtatgtcagtgtaacatgcagatgtatattgcagtttttgaaagtgatcattactgtggaatgctaaaaatacattaatttctaaaacctgtgatgccctaagaagcattaagaatgaaggtgttgtactaatagaaactaagtacagaaaatttcagttttaggtggttgtagctgatgagttattacctcatagagactataatattctatttggtattatattatttgatgtttgctgttcttcaaacatttaaatcaagctttggactaattatgctaatttgtgagttctgatcacttttgagctctgaagctttgaatcattcagtggtggagatggccttctggtaactgaatattaccttctgtaggaaaaggtagaaaataagcatctagaaggttgttgtgaatgactctgtgctggcaaaaatgcttgaaacctctatatttctttcgttcataagaggtaaaggtcaaatttttcaacaaaagtcttttaataacaaaagcatgcagttctctgtgaaatctcaaatattgttgtaatagtctgtttcaatctt

SEQ ID NO: 187004 - DNA, 808 bp, Homo sapiens
  Payload ID: 16820
  Gene Symbol: SARAF
  Gene Name: store-operated calcium entry-associated regulatory factor
  ENST ID: ENST00000522794
  CDS Start-End: 202-808
agtctctgagtcacccttagcggacagggctgcagacctcgcaggtctgttagcagaatcgcagattgcactcttttttttttttttgagtcggagtctcacattgtcgccccggccgcactgcaatgacgtgatctcggctcactgcaacctccgcctcctgggttcaagagattctcctgcctcggcctcaccgacagaatgttgctgcgggatgtaaaagctcttaccctccactatgaccgctataccacctcccgcaggctggatcccatcccacagttgaaatgtgttggaggcacagctggttgtgattcttataccccaaaagtcatacagtgtcagaacaaaggctgggatgggtatgatgtacagtgggaatgtaagacggacttagatattgcatacaaatttggaaaaactgtggtgagctgtgaaggctatgagtcctctgaagaccagtatgtactaagaggttcttgtggcttggagtataatttagattatacagaacttggcctgcagaaactgaaggagtctggaaagcagcacggctttgcctctttctctgattattattataagtggtcctcggcggattcctgtaacatgagtggattgattaccattgtggtactccttgggatcgcgtttgtagtctataagctgttcctgagtgacgggcagtattctcctccaccgtactctgagtatcctccattttcccaccgttaccagagattcaccaactcagcaggacctcctcccccaggctttaagtctgagttcacaggaccacagaatactg

SEQ ID NO: 187005 - DNA, 582 bp, Homo sapiens
  Payload ID: 16820
  Gene Symbol: SARAF
  Gene Name: store-operated calcium entry-associated regulatory factor
  ENST ID: ENST00000518340
  CDS Start-End: 17-130
atcttcatcgagcgccatggccgcagcctgcgggccgggagcggccgggtactgcttgctcctcggcttgcatttgtttctgctgaccgcgggccctgccctgggctggaacgaccctgtgggaatgtaagacggacttagatattgcatacaaatttggaaaaactgtggtgagctgtgaaggctatgagtcctctgaagaccagtatgtactaagaggttcttgtggcttggagtataatttagattatacagaacttggcctgcagaaactgaaggagtctggaaagcagcacggctttgcctctttctctgattattattataagtggtcctcggcggattcctgtaacatgagtggattgattaccattgtggtactccttgggatcgcgtttgtagtctataagctgttcctgagtgacgggcagtattctcctccaccgtactctgagtatcctccattttcccaccgttaccagagattcaccaactcagcaggacctcctcccccaggctttaagtctgagttcacaggagacgataaagtagaaagttggagtcaaacactggatgcagaaa

SEQ ID NO: 187006 - DNA, 1981 bp, Homo sapiens
  Payload ID: 16820
  Gene Symbol: SARAF
  Gene Name: store-operated calcium entry-associated regulatory factor
  ENST ID: ENST00000518174
  CDS Start-End: 176-298
agcggcagtgacgtagggttggcgcacggatccgttgcggctgcagctctgcagtcgggccgttccttcgccgccgccaggggtagcggtgtagctgcgcagcgtcgcgcgcgctaccgcacccaggttcggcccgtaggcgtctggcagcccggcgccatcttcatcgagcgccatggccgcagcctgcgggccgggagcggccgggtactgcttgctcctcggcttgcatttgtttctgctgaccgcgggccctgccctgggctggaacgaccctgaatgttgctgcgggatgtaaaagctcttaccctccactatgaccgctataccacctcccgcaggctggatcccatcccacagttgaaatgtgttggaggcacagctggttgtgattcttataccccaaaagtcatacagtgtcagaacaaaggctgggatgggtatgatgtacagtgggaatgtaagacggacttagatattgcatacaaatttggaaaaactgtggtgagctgtgaaggctatgagtcctctgaagaccagtatgtactaagaggttcttgtggcttggagtataatttagattatacagaacttggcctgcagaaactgaaggagtctggaaagcagcacggctttgcctctttctctgattattattataagtggtcctcggcggattcctgtaacatgagtggattgattaccattgtggtactccttgggatcgcgtttgtagtctataagctgttcctgagtgacgggcagtattctcctccaccgtactctgagtatcctccattttcccaccgttaccagagattcaccaactcagcaggacctcctcccccaggctttaagtctgagttcacaggaccacagaatactggccatggtgcaacttctggttttggcagtgcttttacaggacaacaaggatatgaaaattcaggaccagggttctggacaggcttgggaactggtggaatactaggatatttgtttggcagcaatagagcggcaacacccttctcagactcgtggtactacccgtcctatcctccctcctaccctggcacgtggaatagggcttactcaccccttcatggaggctcgggcagctattcggtatgttcaaactcagacacgaaaaccagaactgcatcaggatatggtggtaccaggagacgataaagtagaaagttggagtcaaacactggatgcagaaattttggatttttcatcactttctctttagaaaaaaagtactacctgttaacaattgggaaaaggggatattcaaaagttctgtggtgttatgtccagtgtagctttttgtattctattatttgaggctaaaagttgatgtgtgacaaaatacttatgtgttgtatgtcagtgtaacatgcagatgtatattgcagtttttgaaagtgatcattactgtggaatgctaaaaatacattaatttctaaaacctgtgatgccctaagaagcattaagaatgaaggtgttgtactaatagaaactaagtacagaaaatttcagttttaggtggttgtagctgatgagttattacctcatagagactataatattctatttggtattatattatttgatgtttgctgttcttcaaacatttaaatcaagctttggactaattatgctaatttgtgagttctgatcacttttgagctctgaagctttgaatcattcagtggtggagatggccttctggtaactgaatattaccttctgtaggaaaaggtagaaaataagcatctagaaggttgttgtgaatgactctgtgctggcaaaaatgcttgaaacctctatatttctttcgttcataagaggtaaaggtcaaatttttcaacaaaagtcttttaataacaaaagcatgcagttctctgtgaaatctcaaatattgttgtaatagtctgtttcaatcttaaaaagaatcaataaaaacaaacaaggg

SEQ ID NO: 187007 - DNA, 1976 bp, Homo sapiens
  Payload ID: 16820
  Gene Symbol: SARAF
  Gene Name: store-operated calcium entry-associated regulatory factor
  Uniprot ID: Q96BY9
  ENST ID: ENST00000545648
  CDS Start-End: 597-1100
cacaccgcctcgccccgccccaagccgcgctgtgctccaggggcgggggcccacggcggccactcactgagccccacgggccgcagcggcagtgacgtagggttggcgcacggatccgttgcggctgcagctctgcagtcgggccgttccttcgccgccgccaggggtagcggtgtagctgcgcagcgtcgcgcgcgctaccgcacccaggttcggcccgtaggcgtctggcagcccggcgccatcttcatcgagcgccatggccgcagcctgcgggccgggagcggccgggtactgcttgctcctcggcttgcatttgtttctgctgaccgcgggccctgccctgggctggaacgaccctgtgggaatgtaagacggacttagatattgcatacaaatttggaaaaactgtggtgagctgtgaaggctatgagtcctctgaagaccagtatgtactaagaggttcttgtggcttggagtataatttagattatacagaacttggcctgcagaaactgaaggagtctggaaagcagcacggctttgcctctttctctgattattattataagtggtcctcggcggattcctgtaacatgagtggattgattaccattgtggtactccttgggatcgcgtttgtagtctataagctgttcctgagtgacgggcagtattctcctccaccgtactctgagtatcctccattttcccaccgttaccagagattcaccaactcagcaggacctcctcccccaggctttaagtctgagttcacaggaccacagaatactggccatggtgcaacttctggttttggcagtgcttttacaggacaacaaggatatgaaaattcaggaccagggttctggacaggcttgggaactggtggaatactaggatatttgtttggcagcaatagagcggcaacacccttctcagactcgtggtactacccgtcctatcctccctcctaccctggcacgtggaatagggcttactcaccccttcatggaggctcgggcagctattcggtatgttcaaactcagacacgaaaaccagaactgcatcaggatatggtggtaccaggagacgataaagtagaaagttggagtcaaacactggatgcagaaattttggatttttcatcactttctctttagaaaaaaagtactacctgttaacaattgggaaaaggggatattcaaaagttctgtggtgttatgtccagtgtagctttttgtattctattatttgaggctaaaagttgatgtgtgacaaaatacttatgtgttgtatgtcagtgtaacatgcagatgtatattgcagtttttgaaagtgatcattactgtggaatgctaaaaatacattaatttctaaaacctgtgatgccctaagaagcattaagaatgaaggtgttgtactaatagaaactaagtacagaaaatttcagttttaggtggttgtagctgatgagttattacctcatagagactataatattctatttggtattatattatttgatgtttgctgttcttcaaacatttaaatcaagctttggactaattatgctaatttgtgagttctgatcacttttgagctctgaagctttgaatcattcagtggtggagatggccttctggtaactgaatattaccttctgtaggaaaaggtagaaaataagcatctagaaggttgttgtgaatgactctgtgctggcaaaaatgcttgaaacctctatatttctttcgttcataagaggtaaaggtcaaatttttcaacaaaagtcttttaataacaaaagcatgcagttctctgtgaaatctcaaatattgttgtaatagtctgtttcaatcttaaaaagaatcaataaaaacaaacaaggggtttagtctcattctttctattagcctaggcgcaaataaatgttactttttgtttttttaaaccctttttcccaaaggggaaagtt

SEQ ID NO: 187008 - DNA, 3377 bp, Homo sapiens
  Payload ID: 16821
  Gene Symbol: STOX1
  Gene Name: storkhead box 1
  Uniprot ID: Q6ZVD7
  ENST ID: ENST00000298596
  CDS Start-End: 84-3053
gatcctcccgccgagcgagcggcgtcgtagccgccgcgctcgccgaggccctgcgttgcgggctcccggccgccggcgaaagcatggcccggcccgtgcagctggcgccgggctcgctggcgctagtgctgtgccggctggaggcgcagaaggcggcgggggccgcggaggagcctggtgggcgcgcggtgttccgcgctttccgtcgcgccaacgcgcgctgcttctggaacgcgcggctggcgcgcgccgcctcgcggctggccttccagggctggctgcggcggggggtgctgctggtgcgcgcgccccccgcctgcctgcaggtgctgcgcgatgcctggcggcgccgggccctgcggccgccgcgcggcttccgcatcagggcggtgggtgatgtctttccagtgcaaatgaatccaataactcaatctcagttcgtacctttgggtgaagttctttgctgtgctatatctgatatgaatacagctcagattgtagtaacgcaggaatcacttttggagcgtttgatgaaacattacccaggcattgcaattccatcggaagatattctttataccactctgggaacgctgattaaagaaaggaagatttatcacactggagaaggatacttcatagttactcctcagacttacttcattacaaatacaaccacccaggaaaataagagaatgctgccatcagatgaaagtcgcctgatgccagcttccatgacatatctggtgagcatggagagctgtgcagagtcagcccaagagaatgctgcccccatatcccactgtcagtcttgccagtgtttccgggacatgcacactcaggatgttcaggaagcaccagttgctgcagaagtgactaggaagagtcacagaggtcttggggaatccgtatcttgggtacagaatggggcagtttcagtgtctgcggagcaccacatttgtgagagcaccaaacctttaccatacacaagagataaagaaaaaggcaagaagtttggttttagtctcttatggcgcagcttatctagaaaggagaagcccaaaacagaacacagcagtttctctgctcagttcccacctgaagaatggcccgtccgagatgaagatgacttggacaatatccctcgagatgttgaacatgagataatcaaacgaattaaccccattttgactgttgacaatttaatcaaacacactgtcctaatgcaaaaatacgaagaacagaaaaaatataatagccagggcacttccactgacatgctgacaatcgggcataagtatccttcaaaagagggggttaagaaaaggcagggtctgtctgcaaaacctcaagggcagggccattctcgaagggatagacacaaagccaggaatcagggaagtgagtttcagccaggaagcattagactggagaaacaccccaagctccctgctacacagcccatccccagaattaaaagcccaaatgaaatggtaggtcagaaaccacttggtgagattacaacagtgctaggttcccatttgatttacaaaaagcgaatcagtaatcctttccagggtttgtctcaccgaggaagcacaatatccaaagggcacaaaattcagaagacgagtgatctgaaacccagccagactggaccaaaggaaaagcctttccaaaagcctaggtccttggattcctcaagaatctttgatggtaaagccaaagagccatatgctgaacaacctaatgataaaatggaagcagaatccatttacataaatgaccctactgtcaaacccatcaatgatgacttcagaggtcacctcttcagtcaccctcaacagagcatgttgcaaaatgatggtaaatgctgtccctttatggaaagcatgttgagatatgaagtgtatggtggagaaaatgaggtaattcctgaagtcttgaggaaaagtcattcccactttgacaaattaggggagaccaaacagactccgcatagtctgccatcacgaggtgcctccttttcagaccgaacaccctctgcttgtagattagtggataacacaatacaccagtttcaaaatcttggccttttggattacccagttggcgtgaaccctttaagacaagctgcaagacaagacaaagactcagaagaattattgagaaaaggatttgtccaggatgcagagactacaagcctagaaaatgaacagctttctaacgatgaccaggccttgtatcagaatgaagtggaagatgatgatggtgcctgtagttcattatatctagaggaggatgacatttctgagaatgacgacttacgtcaaatgctgcctggccacagtcagtattccttcacaggtggaagccagggaaatcatttaggaaaacaaaaagtgattgagagatctctgaccgagtacaacagcacaatggagagggttgagtctcaggtgcttaaaagaaatgaatgctacaaacccactgggctgcatgctaccccaggtgaaagccaagaacctaacctctctgctgaaagttgtggcctaaattcaggggcccagtttggttttaactacgaagaagaacccagtgttgctaaatgtgtacaggcctcagcacctgctgatgaaagaatctttgattactatagcgcaagaaaagccagttttgaagctgaagtcatacaagacactattggtgacacaggaaagaagccagctagctggagtcagagtcctcagaatcaggaaatgagaaaacatttcccacaaaagttccaacttttcaacacttcacatatgccagtgttggctcaggatgtccaatatgaacacagtcacttggaagggacagaaaatcacagcatggcaggagatagtggaatagattctccacggacacagagtctgggatctaataattcagtcattttggatggactaaaaagaagacagaattttctgcaaaatgtcgaaggcacaaagagcagtcaaccactcacatctaattccttactaccgctaactccagtcataaacgtttaattttcttttggaaacctacttttttctttataaaaaggtagagcattattacagaatctttcaatcatgtaagaattgagtatataagaattgtctaaaggcaagcatatctatactattaaccacattacacattttgttctaattactggctttttttcctcttttggtgtcttaaggctttttgaagcttattttactgtgagtttattgggagtatatagattattttcgattaaaaagtggaattattggtccccttccaattgtaattatcttgaatttttatacattagtttctcaaatatatagaatgccaattta

SEQ ID NO: 187009 - DNA, 935 bp, Homo sapiens
  Payload ID: 16821
  Gene Symbol: STOX1
  Gene Name: storkhead box 1
  Uniprot ID: Q6ZVD7
  ENST ID: ENST00000399162
  CDS Start-End: 1-510
atggcccggcccgtgcagctggcgccgggctcgctggcgctagtgctgtgccggctggaggcgcagaaggcggcgggggccgcggaggagcctggtgggcgcgcggtgttccgcgctttccgtcgcgccaacgcgcgctgcttctggaacgcgcggctggcgcgcgccgcctcgcggctggccttccagggctggctgcggcggggggtgctgctggtgcgcgcgccccccgcctgcctgcaggtgctgcgcgatgcctggcggcgccgggccctgcggccgccgcgcggcttccgcatcagggcggtgggtgatgtctttccagtgcaaatgaatccaataactcaatctcagttcgtacctttgggtgaagttctttgctgtgctatatctgatatgaatacagctcagattgtagtaacgcaggaatcacttttggagcgtttgatgaaacattacccaggacacagagtctgggatctaataattcagtcattttggatggactaaaaagaagacagaattttctgcaaaatgtcgaaggcacaaagagcagtcaaccactcacatctaattccttactaccgctaactccagtcataaacgtttaattttcttttggaaacctacttttttctttataaaaaggtagagcattattacagaatctttcaatcatgtaagaattgagtatataagaattgtctaaaggcaagcatatctatactattaaccacattacacattttgttctaattactggctttttttcctcttttggtgtcttaaggctttttgaagcttattttactgtgagtttattgggagtatatagattattttcgattaaaaagtggaattattggtccccttccaattgtaattatcttgaatttttatacattagtttctcaaatatatagaatgccaattta

SEQ ID NO: 187010 - DNA, 1135 bp, Homo sapiens
  Payload ID: 16821
  Gene Symbol: STOX1
  Gene Name: storkhead box 1
  Uniprot ID: Q6ZVD7
  ENST ID: ENST00000399165
  CDS Start-End: 1-684
atggcccggcccgtgcagctggcgccgggctcgctggcgctagtgctgtgccggctggaggcgcagaaggcggcgggggccgcggaggagcctggtgggcgcgcggtgttccgcgctttccgtcgcgccaacgcgcgctgcttctggaacgcgcggctggcgcgcgccgcctcgcggctggccttccagggctggctgcggcggggggtgctgctggtgcgcgcgccccccgcctgcctgcaggtgctgcgcgatgcctggcggcgccgggccctgcggccgccgcgcggcttccgcatcagggcggtgggtgatgtctttccagtgcaaatgaatccaataactcaatctcagttcgtacctttgggtgaagttctttgctgtgctatatctgatatgaatacagctcagattgtagtaacgcaggaatcacttttggagcgtttgatgaaacattacccaggcattgcaattccatcggaagatattctttataccactctgggaacgctgattaaagaaaggaagatttatcacactggagaaggatacttcatagttactcctcagacttacttcattacaaatacaaccacccaggaaaataagagaatgctgccatcagatgaaagtcgcctgatgccagcttccatgacatatctggacacagagtctgggatctaataattcagtcattttggatggactaaaaagaagacagaattttctgcaaaatgtcgaaggcacaaagagcagtcaaccactcacatctaattccttactaccgctaactccagtcataaacgtttaattttcttttggaaacctacttttttctttataaaaaggtagagcattattacagaatctttcaatcatgtaagaattgagtatataagaattgtctaaaggcaagcatatctatactattaaccacattacacattttgttctaattactggctttttttcctcttttggtgtcttaaggctttttgaagcttattttactgtgagtttattgggagtatatagattattttcgattaaaaagtggaattattggtccccttccaattgtaattatcttgaatttttatacattagtttctcaaatatatagaatgccaattta

SEQ ID NO: 187011 - DNA, 3281 bp, Homo sapiens
  Payload ID: 16821
  Gene Symbol: STOX1
  Gene Name: storkhead box 1
  Uniprot ID: Q6ZVD7
  ENST ID: ENST00000399169
  CDS Start-End: 84-3053
gatcctcccgccgagcgagcggcgtcgtagccgccgcgctcgccgaggccctgcgttgcgggctcccggccgccggcgaaagcatggcccggcccgtgcagctggcgccgggctcgctggcgctagtgctgtgccggctggaggcgcagaaggcggcgggggccgcggaggagcctggtgggcgcgcggtgttccgcgctttccgtcgcgccaacgcgcgctgcttctggaacgcgcggctggcgcgcgccgcctcgcggctggccttccagggctggctgcggcggggggtgctgctggtgcgcgcgccccccgcctgcctgcaggtgctgcgcgatgcctggcggcgccgggccctgcggccgccgcgcggcttccgcatcagggcggtgggtgatgtctttccagtgcaaatgaatccaataactcaatctcagttcgtacctttgggtgaagttctttgctgtgctatatctgatatgaatacagctcagattgtagtaacgcaggaatcacttttggagcgtttgatgaaacattacccaggcattgcaattccatcggaagatattctttataccactctgggaacgctgattaaagaaaggaagatttatcacactggagaaggatacttcatagttactcctcagacttacttcattacaaatacaaccacccaggaaaataagagaatgctgccatcagatgaaagtcgcctgatgccagcttccatgacatatctggtgagcatggagagctgtgcagagtcagcccaagagaatgctgcccccatatcccactgtcagtcttgccagtgtttccgggacatgcacactcaggatgttcaggaagcaccagttgctgcagaagtgactaggaagagtcacagaggtcttggggaatccgtatcttgggtacagaatggggcagtttcagtgtctgcggagcaccacatttgtgagagcaccaaacctttaccatacacaagagataaagaaaaaggcaagaagtttggttttagtctcttatggcgcagcttatctagaaaggagaagcccaaaacagaacacagcagtttctctgctcagttcccacctgaagaatggcccgtccgagatgaagatgacttggacaatatccctcgagatgttgaacatgagataatcaaacgaattaaccccattttgactgttgacaatttaatcaaacacactgtcctaatgcaaaaatacgaagaacagaaaaaatataatagccagggcacttccactgacatgctgacaatcgggcataagtatccttcaaaagagggggttaagaaaaggcagggtctgtctgcaaaacctcaagggcagggccattctcgaagggatagacacaaagccaggaatcagggaagtgagtttcagccaggaagcattagactggagaaacaccccaagctccctgctacacagcccatccccagaattaaaagcccaaatgaaatggtaggtcagaaaccacttggtgagattacaacagtgctaggttcccatttgatttacaaaaagcgaatcagtaatcctttccagggtttgtctcaccgaggaagcacaatatccaaagggcacaaaattcagaagacgagtgatctgaaacccagccagactggaccaaaggaaaagcctttccaaaagcctaggtccttggattcctcaagaatctttgatggtaaagccaaagagccatatgctgaacaacctaatgataaaatggaagcagaatccatttacataaatgaccctactgtcaaacccatcaatgatgacttcagaggtcacctcttcagtcaccctcaacagagcatgttgcaaaatgatggtaaatgctgtccctttatggaaagcatgttgagatatgaagtgtatggtggagaaaatgaggtaattcctgaagtcttgaggaaaagtcattcccactttgacaaattaggggagaccaaacagactccgcatagtctgccatcacgaggtgcctccttttcagaccgaacaccctctgcttgtagattagtggataacacaatacaccagtttcaaaatcttggccttttggattacccagttggcgtgaaccctttaagacaagctgcaagacaagacaaagactcagaagaattattgagaaaaggatttgtccaggatgcagagactacaagcctagaaaatgaacagctttctaacgatgaccaggccttgtatcagaatgaagtggaagatgatgatggtgcctgtagttcattatatctagaggaggatgacatttctgagaatgacgacttacgtcaaatgctgcctggccacagtcagtattccttcacaggtggaagccagggaaatcatttaggaaaacaaaaagtgattgagagatctctgaccgagtacaacagcacaatggagagggttgagtctcaggtgcttaaaagaaatgaatgctacaaacccactgggctgcatgctaccccaggtgaaagccaagaacctaacctctctgctgaaagttgtggcctaaattcaggggcccagtttggttttaactacgaagaagaacccagtgttgctaaatgtgtacaggcctcagcacctgctgatgaaagaatctttgattactatagcgcaagaaaagccagttttgaagctgaagtcatacaagacactattggtgacacaggaaagaagccagctagctggagtcagagtcctcagaatcaggaaatgagaaaacatttcccacaaaagttccaacttttcaacacttcacatatgccagtgttggctcaggatgtccaatatgaacacagtcacttggaagggacagaaaatcacagcatggcaggagatagtggaatagattctccacggacacagagtctgggatctaataattcagtcattttggatggactaaaaagaagacagaattttctgcaaaatgtcgaaggcacaaagagcagtcaaccactcacatctaattccttactaccgctaactccagtcataaacgtttaattttcttttggaaacctacttttttctttataaaaaggagatggggttttgccatgttgcgcaactaatgaagtccatctaattttgccactggatgcattatgacactctccctgttttaaaggaatgtattaaatgaatcaagctcattatgaaaccagtaaaattttctcctatgaaactcatcatataacacagacattaaagatgggaatatgtgcgattaaa

SEQ ID NO: 187012 - DNA, 10458 bp, Homo sapiens
  Payload ID: 16822
  Gene Symbol: STOX2
  Gene Name: storkhead box 2
  Uniprot ID: Q9P2F5
  ENST ID: ENST00000308497
  CDS Start-End: 1436-4216
gcagcgtagcgggctggcggtgacttacaccgggactccagagggagagaggaagcgctgcaggccacttgcattgcgtcttccaggctgcgtggacccggcgccccggcgtgtgcggttgtgggggagctcgccgtggcctcccctccctctggctttagcttcctttggggttggcgcaggtgggccaggcagcgcaccgcagatctccccgttcccacgaaggctggctcgctgtctctctccgagcgggagggaccatcctaaaaatatgtaaatatccaagcgctggctccaggctggggcagctgccaaggtccccgcgccgccgccgggtgttttacatgaaaatgagaagcctgatgggaaccgcgttctaacttaaggcagcctggtgattagcatgagactgggcggctgtcctgcttcctgcccttcaatagccgttccgcgcgctcgcgccggagcagcgctgccgccgcgcgggggtcgatcgcaggctcggcgtccttggcagccatggctccggcgccgcctcggccagtaagtaggagcatgcatgtgtagggggcacatgcgtgtcggcgcacccacccagccatccacccgcgcgcacgcacagcgcccggagcctcggcaaggggaagattgacgaggcgctgcagtcgcggggacgacgcgggctcttcctggattccgcaggagcccgcccgccgcagctgctgtctgcagagcctgctcggatcctgtgcacacgcgccccccgctcgagcctctgtgatgaagactgtctcccggggactgcagcggaggcagagccagccagcgccggggactgcgggccgtgcggctgataggcccgcggggacacgactcggacactgtcatccccacgcctcgcgctgagctgcccggcgcggagggtctgccgccgcccctccggcctcccgcacgcccgatcccgggtcagccccggaggcctcggctgcctcatttgtttgggtcttttgtgccgtggctcccagttggccaagcactcctgcgctgaatcgggccattgtctgcgctcccattgccttcacgctgcaagtctcggcgcccccaccccgcccgccccctccccgcctcctcccggccggggagcctcctaacgtgcctttccccccaggaatctggaagctataagccgggcggattgcaaatgaagtgtaatgcattgtgggacgtgtgtaaaatcggagccttcgccgtgggggtgtgggggggcgtggggagggccggacccgccgctggcggtgtagacgccgacgaggaggggctgggaaaatgtgcgcagagtccgcccgggtcgtgcccgccgtagacggatgaaggagcgcgctgcgccccggcgctgaggccccgaggatcggggcggcaggtcgccctccccaccatgaagaagacccggagcacaaccttgcggcgagcctggcctagctcggatttctcggaccgggcctcggaccgcatgaggtcccgcagcgagaaggactaccgcctgcacaagcgtttccccgcggccttcgcgccccaggcttcgcggggctacatgacatcaggtgatgtatcacccatcagtatgtctcccatcagtcagtctcagtttattccactcggggagatcctctgcttggccatctcagcaatgaactcggcaagaaagcctgtcacccaagaagcactgatggagcacctgaccacgtgcttcccaggtgttccaacgccaagccaagaaattctgcggcacacgctgaacacgctggtacgggagaggaagatctacccaactccagatggctacttcatcgtgaccccacagacttatttcataactccttccctcataagaactaacagtaaatggtaccatttggacgagaggatacctgaccggtctcagtgcacctctccgcaacccgggaccatcacgccctctgcctcaggctgtgtcagggaaaggacattgccccgaaaccactgcgactcttgccactgctgcagagaagacgtgcacagcacgcatgcacccaccctgcaaaggaagtctgccaaggactgcaaagacccttactgtcccccttctctgtgccaggtgccacccactgaaaagagcaaaagtactgtaaatttttcctataagacagaaactctctcaaaacctaaagatagtgaaaagcagtcaaaaaaattcgggctaaagttattccggttaagttttaaaaaagacaagaccaaacagctggccaatttttctgcccagtttcctcctgaagagtggcccctgcgagacgaggacacgccagctacgatccctcgggaagtagagatggaaatcattaggcgcattaacccagacctgaccgtggaaaatgtcatgcggcacaccgcgctcatgaagaaactggaagaagaaaaggcccagaggagtaaagccgggtcctctgcccatcacagcggaaggagtaaaaagagtaggactcatcggaagtcccatggaaagtctcggtctcacagcaagacacgggtgtctaaaggagacccttccgacggttcacatctggatatcccagctgaaagagagtatgacttttgtgatcctcttaccagggtgcccagggagggctgcttcatcattgaacacaaaggagataacttcatcatgcacagcaacacaaacgtgctcgagtcccacttccccatgacaccagaatgggatgtgtctggtgaattggctaaaaggagaactgagatgccttttcctgaaccttctaggggaagctcccactcaaaagtgcaccgaagccacagccatacacaggaccggaggtccaggaatgagagatccaacaaagccaaggagagatccaggtcgatggataactccaaaggccctctgggtgcttcttctctagggacgccggaagaccttgctgaaggctgcagccaagacgaccagacccccagccaatcctacattgacgacagtactttaaggcctgcacagaccgttagtctccaaagggctcacatttcgtccacaagctataaagaggtgtgtattccagagatagtcagtggcagcaaggaaccgtccagcgcttgcagccttttggagccaggaaaaccacccgagagtttgccatcctatggcgaactcaactcttgtccaacaaaaacagccacagatgactatttccagtgcaacacctctagtgagacggtgctcacggcaccatcacctctgggaaagaataaggaggaccatgacactctgactttggcagaaggggtgaaaaagctctccccttctgataggcaggtcccccactcctccagggagcctgtggggcacaaggaggagtcaccaaaagggccgggtgggggccccgctgcttcgggaggagtggctgaagggatcgccaacggacgcctcgtccagcaccatggtgccgagcccagcagcttggacaagaggaaagagatatttagcaaagacacactgttcaaacctcttcacagcaccttgtctgtaaacagctatcacaagtcgagcctgtccctcctcaaatctcacccgaagacacctgctgacacattgccaggccgatgtgagaaactggaaccgtccctggggacctcggcggcacaagccatgcctgcttcccagcgtcagcaggagtcaggagggaaccaggaagcctcttttgactattacaacgtctctgatgatgacgactctgaggaaggggcaaacaagaacacagaggaggagaaaaatagagaggacgtaggcaccatgcagtggctcctcgagcgggagaaggaaagagacttgcagaggaaatttgaaaagaacctcacccttcttgctccaaaagaaaccgacagcagcagcaaccagagagccacccattcagcccggctcgacagcatggacagcagcagcatcacagtggacagtggattcaactccccacgtactcgggagagcctggcttccaacacatcaagcattgttgaaagtaaccgtcgtcagaaccccgctttgagcccggcccatggtggagctggtccagccttcaacttccgagcgagcgcggagcccccgacaaatgaagctgagaagctacagaaaccttccaactgcttgcaagcttctgttactagcgtgtgattgtccttctgcctcagatcttctgtctcattcgatacagcaaagtttacgacactgggactgatgtttacatctttggaaagacaagcatctcaaccacagtttttgtgtttacttaaactgtgctgctaagtagggctagggcaaaaaaacaaaaaatctttatttcagagtattgcttttcacatttatggctctgtagcaactgagtaacagtaggggtgatatgtatacttttgcttcactaattgtatctgagcacacataggaaagtctagacactgtaagtgtaatacgcattttcaatgtcatgcagttgccaattccattttaaaatgccacagatgcgtgttgctcccagtctgtggttaaacggtgccacagaactgatccttgacacttccaaaaaaaaaaaaacaaaacaaaacaaaaaaaatttaaaaaaaaaaaacaaaaaacaaaactaagctaccacgaaatgtcaaatgcaagggtccaccttgagggaaatagatgccaaactaactagaagggaccccggccctttgtgtgtgaattgtttatgcaccagtcatttttcactgtgagttttcgtgacactattttgcaggagcccatggaagtgtgtgagaaggggtcgcaatggagatcactgggagtgaatgttttcagggttttgttttgaagtgtcacagatgcttgtctgatttttttaaccttccgtgatcacaaacaggaatataggcctttgaatctgaagtggacaaaggaaagcaatttccagtctggctggggcacagcattaggtgattgaaaaggtgatgtggacttgtaaaaggtgttactcaaatattgaaggaagagaatttcctccttgtgatacttaggatgaccctatcttactctaatagatacaataattagtttgtttaaaagcaaaatgttctttgtgatacaaatgaagagtagggcctgaggatgttattctttctaatggaaggacataaatctattttatgtagttttaaatagaatgcctaaattaggctgtgggagataatttttagtggttgtaggaaagagcaaatttagggagtgttgaacttcaggccttttattcctgggaagatatgtatagagaaaacttttaaaataatttttgattagaaatatacatgtgcccatgtaataaacaacagaatgtgctcattctgctagtgcggtataatccgaatttgtactcccctaaaatttatcagaataacaattatgcatacatgaactatgccagagtaatgtttacagatactttgtaaccaatttcaggaggcgtttttagctggatgtgtagttaattagaccaacttatttccaaatggtttgttaacattttgctttggtttacaatgtcatgttgaacacaaagaagacccagcagcaaagggatgaccaataatttcatcttatagcaaggagacattccaacgttcccatgttttattttctgagaacagtgggacagatctgtagtaatggaatattatttgcaaaagggttacatatgacacaagtaagtgttctgacataaagttttatttagttcagtggcatgtgctgttgggagccatacaccataaaatatatatatcccaaaataaatctagaatattttcacctccaatttcagtaattggcatatgatttgtgagacgcatctgtttttgtatgaggtttaatcactagcaatctgtttaaagaatccagtcctatacacagttggactcattcttgaaacctttaaatgctccctcatagtttttcagttatttggaagttgcattgggtcaaactgaactccttgagtttggtgtaaattccttttttctgcttattatagtgaaacttcagcatgtttcttagtaaactcccataccattgaaatgcttaagccagttggctttcagtctcatgccttatttcctccaaggcatgcctcaacgcattgtttgtctcattgcttaaatatgtccagaaggaatgatcatgtatctaatagactacatagttggttcccttggggagttatatatcatacagttactaaatatttgtctaaattcattttttccaaaaacctgctctcaaatttttcttctactctcagttcataaataatataaccattgaaacaacacatcagcctctagctgatcctctgaaagtagccattgaaataatcgaatactgtgtgaacaggaaaggaaagcgttacctttaagagaagctttaaaataggaatttattgatatttcacaagatataggtttacagaagacattattcaaataaatatgtacactatttgcctgatgctatggggtacataattttttaaaaactcccttagaccagcagccattagtgtagaaatgatggactttaaaggtgataccatgtaagcagatgttgcatataaaaatattcctgcctgaatctgatcgagattcttgaatgggggaggagtggcagccggcagcacattgcaaatgtcattcgaggtcacggtgaggctctcggtcccggaacagtgggggcctcgccaggcgttgccagtatccctttcctcctgtaaaatcatagctttgtgttacacgactgcttatccagtcttagggtttagcagctgaaaggtttacaaaactgaatctggttgaatctctgtgaaagggtcaacacatctgtcggcattttgcacacttatgtattattatgatacaacatattactttatggtaatttttatttttacatataactacctccataaatttgatgaaatggcagccgtgtgttaaagtgtatcgttcagaagagcaaagttgaacacttccttcaacattagggcatggcgtgctgtgtgtgtcagtgattgcctctgtggactcatgactttccatcgccatggctttctcttacgccgctgtttggctttcagatgtaatcctgtcttctcctctcttccccacgaaagcgcactcgattttgttaggaatgaacggaagtttaaaaattcttgtgcccacccccgccctccacccattcctgttaaaagttctctggcgaagagccaatgggtgaacgtaattgaaagagctatttactcttttggaaatctgatttgaagtctaagttttcagtaacagaagacacacaagcaatgtggactgccaagcttgaagcacttcgggctctgccttcactcgcatgctaccatgtcgagcccaaactccactttaattaaaagagctgtgctgtgaattccacaacttctgttaaataatttgtattccattatatatattttgcacatctcaggggaccataatgaacatatgaaaggggggggggtgccatcaaatagagaaaacaaatagaagaggtgaatggagactagctggataaaaataacaaattacttcttctctgatgttgtgaaggtcaggttcaggaagcatcaattcacagttaatccggagtaacaatgatctgaacaccagctgttcccaggtccctctttttcatagcccaaccagcatctaaaatgtaaatttaaattacattgcagtcaccatggggagaagaaacctgttcagtggaagcagaagcattgttccttttttaggttggcgcagctttgcaaaactctacccaggataaaccacttatcaccaccaagtgtacttgaaaataaagtttttaacttaaattacaagcatattgctcataatacaatagtgatcattttttgaaagtcttgccatttataacatgggcagtatttggagcttcatttaaaaaccaacaacaaccgataatgactttgcacgattcactttgggatctcaaagtgcttccaaagcattcagatttacaaacaattcacaagacaggtcatctttgtaatacgcatacttacaacgaattaacaaaaggagtgacttaagattctccaggaacacagtggcagctattgatgatctgttttctatctgtttgatagagcatcatgagaaatcacaaaatacaatgctatttttctgatgtgtgctaataaagtcaaagaaaacaaatacatcttgacacttttgtccattttcattaaaaaaaaaaaagttcagggtgtttggaattttacatctcagcacaccttactggtatcaatggataaagcgggtgattgacagatccacccaaatgccactgcagtcagaagcagatctggacacacccttgtttacagtttcatattgggttgctatagttcccgtgctaaatcaccagctttcaggaacatgactgctcctggcagtggaaggtgctgaaacagaaattttaattaaaaactttatcaagtactcttcacagtgctgcttggcaccatagaaaatcagtacaatatatcgagccctactttggaggagctggatttctgagggagctgatccagttctaagtgtcttctcgaattaggagatagatgatctttgatggggatctcctccgtcaccacaggccagtcacagaaccaactagccacgtgctgccagacctcagtgggcccaagcaggagcaatctcttctatcccccatctcccccaggaccatcccgcccattgtcaacgtcatccagggctcttctggtagtgagtgacttttctgcacatgtttagggcttgggggagctagaacacaggaaacatgaatgcaaaaggcatggaaaacactgttttgctttgggttagtaaaatgtgggcaggacaaagattactattggtctgagctttgccaagtgagatagaatcaactgtcaccccattcctttcccagaaggtcttatggtattaaggatacatccagtattttcccacagatttttattcaggcgatgtttcataaattacatatatgaaaacattcattattacatttccttgtgtgtttcaaacagacattggcaccttcctattgagttaattctctgcatcttttgcagcagcagcccacaaggagattcccagagatggctcccctaacacacagtcctgtgattttacagttctatgacttacagttgatgattcacaagattcaggattctacaagactcaagggggaactaaactttcttacgattgtacatgatcagttatagggctgtaatcattaattgttggcttcaaatgtggacacacacacacacacatcatgccaaggagggaatggggtgtttcaagtcaggcagcgatgattctggaaggttggaaatgtaaggttagaagcttggctggtcttagtaaacttgttcccttgctcccaccaagaagaggtaccaaatgtgagacctgagatctcctccaatatctgtcctctgcagttccgggaaactaatcatgaagtacacatgcagcagctcctccacttcctttcctccgaggtcctcctttccattctcccacctagatactgacacaccgccacggtttccacattggaagggcagaacactgtgcagtatcgtgcacacttgctgggttaggaatagagctgccctagggtcaccttcatgcaagtattgacagctacaaattaaagtccttagagcagttgacacagatactacgttctagaagagaattaaatttaaacgtcaagtttaaagggatcataattctgcaggtatctttctctgagtgactgaatgtgactattgcattagggtaaatgaattaagacgtgcaagtgggatttactgtatgttagaaaggagttttgcagccaagactgccttgaataaaatgtgtttgcactgaaaaaaaattttaaattacttggtctctggttgctgtaaaggtcatccaagatggatgttctgtttatattgtatagtatttcatatgaaataattacagttcatgaaatgtcttccctaatgttactgatttataacagcacatttgtaacatggtttttatcgtgtcagtgtaccatactgtaaatgatgattacttgtcatgcttagtataataacttaaaagaaaaaaaaggacagggatttttgtaagtctatatttgaaagtccctccctatggtgatactgtgttcatgttgtttatgtagtgttgtgtgaaatatccattttggattgtgttactttttaagatattaaataacatttggttata

SEQ ID NO: 187013 - DNA, 443 bp, Homo sapiens
  Payload ID: 16822
  Gene Symbol: STOX2
  Gene Name: storkhead box 2
  ENST ID: ENST00000513034
  CDS Start-End: 1-224
gtgatgtatcacccatcagtatgtctcccatcagtcagtctcagtttattccactcggggagatcctctgcttggccatctcagcaatgaactcggcaagaaagcctgtcacccaagaagcactgatggagcacctgaccacgtgcttcccagtactcgggagagcctggcttccaacacatcaagcattgttgaaagtaaccgtcgtcagaaccccgctttgagcccggcccatggtggagctggtccagccttcaacttccgagcgagcgcggagcccccgacaaatgaagctgagaagctacagaaaccttccaactgcttgcaagcttctgttactagcgtgtgattgtccttctgcctcagatcttctgtctcattcgatacagcaaagtttacgacactgggactgatgtttacatctttggaaagacaagcatctc

SEQ ID NO: 187014 - DNA, 518 bp, Homo sapiens
  Payload ID: 16822
  Gene Symbol: STOX2
  Gene Name: storkhead box 2
  ENST ID: ENST00000512520
  CDS Start-End: 53-518
gaatgctcagcttgtctcaaggctgcaatgaggtgatgtatcacccatcagtatgtctcccatcagtcagtctcagtttattccactcggggagatcctctgcttggccatctcagcaatgaactcggcaagaaagcctgtcacccaagaagcactgatggagcacctgaccacgtgcttcccaggtgttccaacgccaagccaagaaattctgcggcacacgctgaacacgctggtacgggagaggaagatctacccaactccagatggctacttcatcgtgaccccacagacttatttcataactccttccctcataagaactaacagtaaatggtaccatttggacgagaggatacctgaccggtctcagtgcacctctccgcaacccgggaccatcacgccctctgcctcaggctgtgtcagggaaaggacattgccccgaaaccactgcgactcttgccactgctgcagagaagacgtgcacagcacgcatgcacccaccctgcaaaggaagt

SEQ ID NO: 187015 - DNA, 1055 bp, Homo sapiens
  Payload ID: 16822
  Gene Symbol: STOX2
  Gene Name: storkhead box 2
  ENST ID: ENST00000506529
  CDS Start-End: 1-658
ctcctccagggagcctgtggggcacaaggaggagtcaccaaaagggccgggtgggggccccgctgcttcgggaggagtggctgaagggatcgccaacggacgcctcgtccagcaccatggtgccgagcccagcagcttggacaagaggaaagagatatttagcaaagacacactgttcaaacctcttcacagcaccttgtctgtaaacagctatcacaagtcgagcctgtccctcctcaaatctcacccgaagacacctgctgacacattgccaggccgatgtgagaaactggaaccgtccctggggacctcggcggcacaagccatgcctgcttcccagcgtcagcaggagtcaggagggaaccaggaagcctcttttgactattacaacgtctctgatgatgacgactctgaggaaggggcaaacaagaacacagaggaggagaaaaatagagaggacgtaggcaccatgcagtggctcctcgagcgggagaaggaaagagacttgcagaggaaatttgaaaagaacctcacccttcttgctccaaaagaaaccgacagcagcagcaaccagagagccacccattcagcccggctcgacagcatggacagcagcagcatcacagtggacagtggattcaactccccacggaattgaaaaaaatgtttctgcacctgtagagatcaccaatctggactgtactcgggagagcctggcttccaacacatcaagcattgttgaaagtaaccgtcgtcagaaccccgctttgagcccggcccatggtggagctggtccagccttcaacttccgagcgagcgcggagcccccgacaaatgaagctgagaagctacagaaaccttccaactgcttgcaagcttctgttactagcgtgtgattgtccttctgcctcagatcttctgtctcattcgatacagcaaagtttacgacactgggactgatgtttacatctttggaaagacaagcatctcaaccacagtttttgtgtttacttaaactgtgctgctaagtagggctagggcaaaaaaacaaaaaa

SEQ ID NO: 187016 - DNA, 1320 bp, Homo sapiens
  Payload ID: 16823
  Gene Symbol: SFN
  Gene Name: stratifin
  Uniprot ID: P31947
  ENST ID: ENST00000339276
  CDS Start-End: 76-822
gcaggagagacacagagtccggcattggtcccaggcagcagttagcccgccgcccgcctgtgtgtccccagagccatggagagagccagtctgatccagaaggccaagctggcagagcaggccgaacgctatgaggacatggcagccttcatgaaaggcgccgtggagaagggcgaggagctctcctgcgaagagcgaaacctgctctcagtagcctataagaacgtggtgggcggccagagggctgcctggagggtgctgtccagtattgagcagaaaagcaacgaggagggctcggaggagaaggggcccgaggtgcgtgagtaccgggagaaggtggagactgagctccagggcgtgtgcgacaccgtgctgggcctgctggacagccacctcatcaaggaggccggggacgccgagagccgggtcttctacctgaagatgaagggtgactactaccgctacctggccgaggtggccaccggtgacgacaagaagcgcatcattgactcagcccggtcagcctaccaggaggccatggacatcagcaagaaggagatgccgcccaccaaccccatccgcctgggcctggccctgaacttttccgtcttccactacgagatcgccaacagccccgaggaggccatctctctggccaagaccactttcgacgaggccatggctgatctgcacaccctcagcgaggactcctacaaagacagcaccctcatcatgcagctgctgcgagacaacctgacactgtggacggccgacaacgccggggaagaggggggcgaggctccccaggagccccagagctgagtgttgcccgccaccgccccgccctgccccctccagtcccccaccctgccgagaggactagtatggggtgggaggccccacccttctcccctaggcgctgttcttgctccaaagggctccgtggagagggactggcagagctgaggccacctggggctggggatcccactcttcttgcagctgttgagcgcacctaaccactggtcatgcccccacccctgctctccgcacccgcttcctcccgaccccaggaccaggctacttctcccctcctcttgcctccctcctgcccctgctgcctctgatcgtaggaattgaggagtgtcccgccttgtggctgagaactggacagtggcaggggctggagatgggtgtgtgtgtgtgtgtgtgtgtgtgtgtgtgtgtgcgcgcgcgccagtgcaagaccgagattgagggaaagcatgtctgctgggtgtgaccatgtttcctctcaataaagttcccctgtgacactcc

SEQ ID NO: 187017 - DNA, 11121 bp, Homo sapiens
  Payload ID: 16824
  Gene Symbol: SBNO1
  Gene Name: strawberry notch homolog 1 (Drosophila)
  Uniprot ID: A3KN83
  ENST ID: ENST00000267176
  CDS Start-End: 144-4322
gcgtcaagatggcggcggggaggtaggcagagcaggacgccgctgctgccgccgccaccgccgcctccgctccagtcgcctctggtccttcaaactcacacctcccgggaggagctgtgctggcgccgggtcccgcggggaaaatggtggagccagggcaagatttactgcttgctgctttgagtgagagtggaattagtccgaatgacctctttgatattgatggtggagatgcagggcttgcaactccaatgcctaccccgtcagttcagcagtcagtgccacttagtgcattagaactaggtttggagaccgaagcagcagttcctgttaaacaagaaccagagactgtacctactccagcactattaaatgtgaggcagcctccatctactacaacatttgtgctgaatcaaataaatcatcttccacccttgggatctacaattgtaatgactaaaacaccacctgtaacaaccaacaggcaaaccatcactttaactaagtttatccagactactgcaagcacacgcccgtcagtctcagcaccaacagtacgaaatgccatgacctctgcaccttcaaaagaccaagttcagcttaaagatctactgaaaaataatagtcttaatgaactgatgaaactaaagccacctgctaatattgctcagccagtagcaacagcagctactgatgtaagcaatggtacagtaaagaaagagtcttctaataaagaaggagctagaatgtggataaacgacatgaagatgaggagtttttccccaaccatgaaggttcctgttgtaaaagaagatgatgaaccagaggaagaagatgaagaagaaatgggtcatgcagaaacctatgcagaatacatgccaataaaattaaaaattggcctacgtcatccagatgctgtagtggaaaccagctctttatccagtgttactcctcctgatgtttggtacaaaacatccatttctgaggaaaccattgataatggctggttatcagcattgcagcttgaggcaattacatatgcagcccagcaacatgaaactttcctacctaatggagatcgtgctggcttcttaataggtgatggtgccggtgtaggaaaaggaaggacgatagcaggaatcatctatgaaaattatttgttgagtagaaaacgagcattgtggtttagtgtttcaaatgacttaaagtatgatgctgaaagagatttaagggatattggagcaaaaaacattttggttcattcgttaaataagtttaaatacggaaaaatttcttccaaacataatgggagtgtgaaaaagggtgttatttttgctacttactcttcacttattggtgaaagccagtctggcggcaagtataaaactaggttaaaacaacttctgcattggtgcggtgatgacttcgatggagtgatagtgtttgatgagtgtcataaagccaaaaacttatgtcctgttggttcttcaaagccaaccaagacaggcttagcagttttagagcttcagaacaaattgccaaaagccagagttgtttatgctagtgcaactggtgcttctgaaccacgcaacatggcctatatgaaccgtcttggcatatggggtgagggtactccatttagagaattcagtgattttattcaagcagtagaacggagaggagttggtgccatggaaatagttgctatggatatgaagcttagaggaatgtacattgctcgacaactgagctttactggagtgaccttcaaaattgaggaagttcttctttctcagagctacgttaaaatgtataacaaagctgtcaagctgtgggtcatcgccagagagcggtttcagcaagctgcagatctgattgatgctgagcaacgaatgaagaagtccatgtggggtcagttctggtctgctcaccagaggttcttcaaatacttatgcatagcatccaaagttaaaagggttgtgcaactagctcgagaggaaatcaagaatggaaaatgtgttgtaattggtctgcagtctacaggagaagctagaacattagaagctttggaagagggcgggggagaattgaatgattttgtttcaactgccaaaggtgtgttgcagtcactcattgaaaaacattttcctgctccagacaggaaaaaactttatagtttactaggaatcgatttgacagctccaagtaacaacagttcgccaagagatagtccttgtaaagaaaataaaataaagaagcggaaaggtgaagaaataactcgagaagccaaaaaagcacgaaaagtaggtggccttactggtagcagttctgacgacagtggaagtgaatctgatgcctctgataatgaagaaagtgactatgagagctctaaaaacatgagttctggagatgatgacgatttcaacccatttttagatgagtctaatgaggatgatgaaaatgatccctggttaattagaaaagaccacaagaaaaacaaagagaaaaaaaagaagaaaagtatagatccagattctattcaaagtgccttattagcatcaggtcttggatcaaaacgacctagtttttcatctacaccagttatctcacctgctcctaacagtacaccagctaacagtaacaccaacagtaacagtagccttataacaagtcaggatgctgtggaaagggctcagcagatgaagaaagacctgcttgataagctagaaaaattagctgaagacctcccccctaataccctggatgaacttatcgatgaacttggtggccctgagaacgttgctgagatgactggccgcaagggacgggttgtgagcaatgatgatggaagcatatcttatgagtcaagatctgaacttgatgtgcctgtggaaatactaaacatcacagaaaaacaacgatttatggatggagataagaatattgctatcatctcagaagctgccagctcgggtatttcattacaagcagataggagagctaaaaatcaaaggcgaagagttcatatgactttagaattaccttggagcgctgatagagcaattcaacagttcggacgtactcatagatcaaaccaagttactgctcctgagtatgtctttctgatatctgaactggcaggagaacaaagatttgcatctattgttgctaaaagacttgagagtttgggggcacttacacatggtgatagaagggcaacagaatctagagatctgagcaggttcaactttgataataagtatggaagaaatgctttagaaattgtcatgaaatccattgtaaacttggattctcctatggtatcaccacctccagactatcctggagaattttttaaagatgttcgacaaggactgataggcgttggcctgataaatgtagaagatcgctcgggaattcttactctcgataaagattataacaacataggaaaattcttaaatagaattttaggcatggaggtgcatcagcagaatgcgttatttcagtattttgcggacacacttactgcagttgttcaaaatgccaaaaaaaatggaagatatgatatgggaatcttagatcttggttctggagatgaaaaagtgcggaaaagtgatgttaaaaagtttctgactccaggatattcaacctctggccacgtagaattatacacaattagtgtagagaggggaatgtcatgggaggaagctaccaagatttgggctgagctgacaggaccagacgatggcttttacttgtcattgcaaataaggaacaacaagaaaactgccatcttagttaaagaagtgaatcctaaaaagaaacttttcttagtttatcgaccaaatactgggaagcagctcaaattagaaatttatgctgatctaaaaaagaaatataagaaggtcgtctcagatgatgccctgatgcactggttagatcagtataattcatctgcagatacttgtactcatgcttattggcgcggcaattgcaaaaaagcaagcttggggctagtttgtgaaataggtcttcgttgccgtacatattatgtattatgtggttcagtgctgagtgtctggacaaaagttgagggtgttctagcatctgtcagtggcacaaacgtgaagatgcagatcgtgcggctaagaacggaagatgggcaacggattgtaggtttgatcattccggcaaattgtgtgtctcctcttgtaaatctcctatcaacttcagaccagtctcaacagcttgcggtccaacagaaacagctatggcaacagcatcaccctcagagcatcaccaacttgagcaacgcatgaagaacagacaggtttcaacatggatggatctgaaatgctgttgaagcatatcatttgcataaaaatcagggacagtttccaaagaattatatatttttttcagttgtgctctctagttagtttttttgggagtaaggacaaacctggaatagatagcaaaactgaaaatcagcagtgctgatggtggtacatatgtctttcctttagcttctcccctgataattcccatctgcttttacttcgggtgagcagagggggatgtgtgtgtgcgtgtgtgtcagtctgtttgtgagtgtgttaaaggctacagaccacagttggtttaaaatgcttggaacttcccaaactggctttactttatgtttatacagtgctcagggttaacgcagtacatccatgccattgctgtgggaggtatccccggatgcatgtgttttgagtctataaatatagaaaatatatattggtttctttttccaacttaataggtttattaaagcatgaaatgaaaggttgcatatcatgcattcaggttattttctaatttttgttctgacagtgcatgtctttggaagcatgctgaaacaagattaacacaggagtcgagtaacagagagaaacatttgttagatgtacagcattggttattgcatttttatagtgtttatacctgggtattgcttcaaaccctgcagacccctccttccccttctccctgccctgggtttctggtcaaggtaatgaatacatacatttttctgtgataaaactcttaaaagttaattttaatgtattaatagtattcctaatgtgtgctgcagaaatggctatgagcctcttaaatttacatttgcaacttaaaggtagttttagaaggaagtacaaattggctttcatcttgcaaacaatcgttttttacttcattatcttaatttgctttgtcactcataaaaaggaaaccatacctgagttgtagacaatgaggaaacacttgaggcttctgctgtgtgttcttttgttattgttgttattgttgttactcagtaacttgaatattgtttaatgtgttgtaagacgtagagtttatctcaagctgttaaaaatggtaatgtacaaatgtgaatagacacttatctatataatatgggtaagttttgtttcgcctataatagatgtttataaaaacaagtgaggggacagttggtctttttatcttttctttctttttctttcttttctttttttctttttttttttttttttttttttttttgcttccacaggttgcactattgaaaaatcgagattgtataaacctggtaaaaagctgcaagatgccaaaatcttgtagatgtcaaataaaaagttattatactaacaagaagtggactcttgtttaggccctcactggtgaccttcagaagtagtctgtgacggggactcagcagaatttgtgtgttgtctcagcattccaggtagccttatagtttggcttaaaacttatccctaaaatgtaagatggcattgagggaaagggtataatgatagtacttctgaatgttttttaagttgaattgtttgtaaacttcttgcagaattgggtgagatgtgtgttaaaactgacaaacctggctgaaagcttagggcgttcatcctcttgtgtctcctttagcctgagtttggttatgtcaagcttaccgtaagttttcttaggatttatttattcttggtgcctaaaagaataaattgaaagtactttctgttctttggcacattttgcccagcggatgcaacttctatcctcagtccagttcatatatctcaggcagtgatccattttgtatcagccagtttcccttgttagggccgctagacccggctggcagccaagagcagcactctccccaccttcagcagaacttctcagctcatgtgtgtgtttttaaaagcagtaggcagcttccatcagcaatggaagtgtcccccactccagtggtggaggtgcagtcgctggacctgaggaagtggggaagcattacaaaccctcctgcagtaagaatggcagagttgggaaggatcttctctcgcaggctgttggcccaactcctcttttctgtgtatgagggcatcttagttttttatggcgttttcaaagcagcatatgaggattcttagcatgcagctaagtgacaacccccatggcctatgatgtaatgtttgctctggactagccatcttgataaataggagtgtatgtatcttaggttctttgtagaacagctatttttttttctcattaaaaaggcctctgaaagccctctcaaaatggacctcacaaaggcaaccagtgtgaatggatgggagctggggtgctgcatgcccaggctggtcatggtgtgtgcagcacccagagagttgcacccaccccttcttcaggtggacatccgacctttacactgtggtcttgcaaaaatcagcgagttagtttggccgccctgtgaagcttcagcattcaaggtcctcttctgttaaaacccaactcgtagccgggcgtggtggctcactcctataatcccagcacttcgggaggccaaggcaggtgcatcacttgaggccaggagttcgagaccagcctggtccacatggcaaaaccccatctgtaccaaaaaatacaaaaaatttgccgctgacttctgtaaaataggtccattcattgcaggatctaaatgccacacctgaattcagaggccttgtttaattaaccccatgtccactttgcctctgcaatgcctttttctttttagcaatatggctctgagcacaaagatttggttggaaatcatgttcgtgttttcagagtttacagcgtcaattgtactgaaaaccacttccagagtctaaagcagctcagatgttatctctgggggaattagtgttcccctcatttagcaacctccataccacaaggtctctgtctgtagttactgggattatccagatacactatcaatgatacaaattcataggagtattaatgcatttctttaaacacaacttgattaagaagcaaatatgttaagcagttttctttttctgctgctaaattacagttagacacttcagtatcttctctttacatgtgtatataaattagtaagaacctgcatccaaagcaatgtagtgtgtgtatgtatctatatatatttattctaactcagcacttcagaagcctttttgagttacaacaatattttagtttgcctcatctgtagaggtaaaatttctatattaccaagctccagaggaatatgatattttacaggcacaattttctggctgtagtccctggggcattcatttgctggcctccatgggatgctgttagaacaattgttagccggcaagagaagaaaggctaccaggacagcatttataattgtagaatgggagccttcttccctctcccctccactttcattttagcatgagataaaaaaatagattggaaatgattgttgcatctcacttcatggaagtaggggcagaagttccctctggatccttttcttgacaagcagtcaagaggaaggtccccatacacatgtacctgtgtgatacttggtagtttctaagaatggtgctacataagcgttgctgttaggctgggatcctattaatgaacgtttgattagttcaggcctcccaatggcaaaggcagacaccgtggagatggacatttactgactccccttctgtgtggcttcggtctccctggctaacaccacacctgtgcgtactgcgctcggcccactttgctgcagaaacgtagcaagcgtttcatgtcagggctacagctgagagcaaaaactgcaaaaaaaaaaaaaaatgtctcattgaatgccagttgtctgatacaaatgcagtgtcttttaagtgacagaaacacacctaaatacctgcaactcaagctcgctagcattttttttttgagtacttgagataaaatccaaaacccaccctctaattttgtgctgtatttatatatatgtacataaatgtatatatagagaaatgttgagttcttctggattctgaatgtaaataattcttgtaaattgggactctgcccacctgtttctcccttttccctcttcccttcagctctatttattcttttcttgactttcccatatggggcatcttatgacttttttttttttttttttttaagaaaagtatggaaaacttttcatttagaaaagtatttgttcctgtattttagaattcagttttgcatctttgctgtagaattcctgttttgtgttaatgttttttactatgtcttattgtgttgtgtgcaatgcattgtactggggggatgcacttgagtgccatttctgatactgtcattgtatgactgctgatgctcgtttatgttgttctttggaagctatagtgagcctgatgttttcacattttaaaaaatgcttcctgagacttctttaagctcctctaacttcttcagtgcatttgggatcaaacttagctcttagatcagcaaacctgacttgcttctacttttgcaatttttcaggccttaccatatttcttatctctgtcttcccacctgataggaaaatcttgcagatttgaaacagtggtttctggcctgctgctgcagcaaattccctatgtttatttaagaagtcgggcctatgcttttaacctacaaatgatgagtaatttacttgcaatgaacacaggtagcctgctgctgtttataacctgttgaggatatttatagcaggcaggaggcaggcctagtgtgttattgacaggtgactttagagaatgtacattggccgggtgcggtggctcacgcctgtaatcccagcactttgggaggccgaggcgggcggatcatgaggtcaggagattgagaccatctcctggctaacacggtgaaaccccgtctctactaaaaatacaaaaaaaaaaaaaacttagccaggcgtggtggcgggtgcctgtagtcccagctactcaggaggctgaggcaggagaatggcatgaacctgggaggcagagcttgcagtgagcccagatcgcgccactgcactccagcctgggcaacagaccgagactccgtctcgaaaaaaaaaaaagagagagaatgtacattaaggaacaattgtcctccaaaagagagccaagcaactgctctggagcctcctaggctgactctgctggagggtgagacaagcagattcccattgcagcactggtccctggggtaccctgaacggctgtgctctccacccttgtatcggtgagtggatcttgtctacatcagccgtaagcctagaagcagagcgggatcgaggcgtttttaataattcgagttgggaagacccggatggttcatcaaaatgatggtgttgagcacccgggaggcagacattgggtatttgttcacaattttgcacctgtaagaaaatgttcctttataactttcaaggattgccgtgagcgtctttggggccttttcattcatgtacaagtttcattcattactattcaacttggtagacttggtgaaaaatgtaaaagcattctgtatttggatcagtcttgggaactaaatttgtcgtgaattggggcctgtcacagattgcctccagtgtgcatcctccacgcagaccctccttgctcagtctccctctggcgcccatggggaagccgtgctgtggttggcagtgcggccatctgggctgccgcaacgtggcagggcaccgtccagcaagactgccccttagtgcagggctaagcaaggaaaagaagaagcccaaaaaggcgggttctttttgatacttgtaattcaggcgtcctccagagtgaaggccactctgcaggcccctggtgagaacctgtctggcttttccactgcgggcccctaaccagtaccctgcccttgtggcccatttgtgcctgggcagatgtttctggccagcagacactgaaggcctttttgctgtgacagtatttatggcactgaagaggataaagaagcttgagccctctttctgactcccactttatggggcagagagagctttttttctacatagcacattgcagtctcaccgctatcagaaaaatatcctgttcatggtttatactgaatttgcaaactactgatatgatttttcaataaccacttgtatcttccatcatccatgagaggtgggaagaggtacactgtatctctgcaataaaactttggccaggttctacctcctctgagcaaaggatacttttctatgtaggtgtagatggttctcctttactaatctgacatggtgcatctggagacaacatctgatgggatccaaagacaacttgaaacaaaggtggatgtcagctcttggtgtgttttcatttggttctcttttttaaatctcccttttgttatcgctcctgttgtagcgtgtccatcagtgtgtgaagggtgcgccctgttccaatgatactgcattgctgcatccagcctttcgtgggagcacggtaccaagcgtccggaattgattatcccaatcatttttgatatgtaactgaaaaatttggtctcatgcaataaaaatgtactggctgcattttagcaaggtttatttactcttgcaagtaaaaacgatcaaccgtgaagcgtaacaaattctgtatttagtttttttttctgttgtggtggtttttgttttgttttttgtttttgtaagattctaaataaattaaatacgagtca

SEQ ID NO: 187018 - DNA, 10981 bp, Homo sapiens
  Payload ID: 16824
  Gene Symbol: SBNO1
  Gene Name: strawberry notch homolog 1 (Drosophila)
  Uniprot ID: A3KN83
  ENST ID: ENST00000420886
  CDS Start-End: 1-4182
atggtggagccagggcaagatttactgcttgctgctttgagtgagagtggaattagtccgaatgacctctttgatattgatggtggagatgcagggcttgcaactccaatgcctaccccgtcagttcagcagtcagtgccacttagtgcattagaactaggtttggagaccgaagcagcagttcctgttaaacaagaaccagagactgtacctactccagcactattaaatgtgaggcagcagcctccatctactacaacatttgtgctgaatcaaataaatcatcttccacccttgggatctacaattgtaatgactaaaacaccacctgtaacaaccaacaggcaaaccatcactttaactaagtttatccagactactgcaagcacacgcccgtcagtctcagcaccaacagtacgaaatgccatgacctctgcaccttcaaaagaccaagttcagcttaaagatctactgaaaaataatagtcttaatgaactgatgaaactaaagccacctgctaatattgctcagccagtagcaacagcagctactgatgtaagcaatggtacagtaaagaaagagtcttctaataaagaaggagctagaatgtggataaacgacatgaagatgaggagtttttccccaaccatgaaggttcctgttgtaaaagaagatgatgaaccagaggaagaagatgaagaagaaatgggtcatgcagaaacctatgcagaatacatgccaataaaattaaaaattggcctacgtcatccagatgctgtagtggaaaccagctctttatccagtgttactcctcctgatgtttggtacaaaacatccatttctgaggaaaccattgataatggctggttatcagcattgcagcttgaggcaattacatatgcagcccagcaacatgaaactttcctacctaatggagatcgtgctggcttcttaataggtgatggtgccggtgtaggaaaaggaaggacgatagcaggaatcatctatgaaaattatttgttgagtagaaaacgagcattgtggtttagtgtttcaaatgacttaaagtatgatgctgaaagagatttaagggatattggagcaaaaaacattttggttcattcgttaaataagtttaaatacggaaaaatttcttccaaacataatgggagtgtgaaaaagggtgttatttttgctacttactcttcacttattggtgaaagccagtctggcggcaagtataaaactaggttaaaacaacttctgcattggtgcggtgatgacttcgatggagtgatagtgtttgatgagtgtcataaagccaaaaacttatgtcctgttggttcttcaaagccaaccaagacaggcttagcagttttagagcttcagaacaaattgccaaaagccagagttgtttatgctagtgcaactggtgcttctgaaccacgcaacatggcctatatgaaccgtcttggcatatggggtgagggtactccatttagagaattcagtgattttattcaagcagtagaacggagaggagttggtgccatggaaatagttgctatggatatgaagcttagaggaatgtacattgctcgacaactgagctttactggagtgaccttcaaaattgaggaagttcttctttctcagagctacgttaaaatgtataacaaagctgtcaagctgtgggtcatcgccagagagcggtttcagcaagctgcagatctgattgatgctgagcaacgaatgaagaagtccatgtggggtcagttctggtctgctcaccagaggttcttcaaatacttatgcatagcatccaaagttaaaagggttgtgcaactagctcgagaggaaatcaagaatggaaaatgtgttgtaattggtctgcagtctacaggagaagctagaacattagaagctttggaagagggcgggggagaattgaatgattttgtttcaactgccaaaggtgtgttgcagtcactcattgaaaaacattttcctgctccagacaggaaaaaactttatagtttactaggaatcgatttgacagctccaagtaacaacagttcgccaagagatagtccttgtaaagaaaataaaataaagaagcggaaaggtgaagaaataactcgagaagccaaaaaagcacgaaaagtaggtggccttactggtagcagttctgacgacagtggaagtgaatctgatgcctctgataatgaagaaagtgactatgagagctctaaaaacatgagttctggagatgatgacgatttcaacccatttttagatgagtctaatgaggatgatgaaaatgatccctggttaattagaaaagaccacaagaaaaacaaagagaaaaaaaagaagaaaagtatagatccagattctattcaaagtgccttattagcatcaggtcttggatcaaaacgacctagtttttcatctacaccagttatctcacctgctcctaacagtacaccagctaacagtaacaccaacagtaacagtagccttataacaagtcaggatgctgtggaaagggctcagcagatgaagaaagacctgcttgataagctagaaaaattagctgaagacctcccccctaataccctggatgaacttatcgatgaacttggtggccctgagaacgttgctgagatgactggccgcaagggacgggttgtgagcaatgatgatggaagcatatcttatgagtcaagatctgaacttgatgtgcctgtggaaatactaaacatcacagaaaaacaacgatttatggatggagataagaatattgctatcatctcagaagctgccagctcgggtatttcattacaagcagataggagagctaaaaatcaaaggcgaagagttcatatgactttagaattaccttggagcgctgatagagcaattcaacagttcggacgtactcatagatcaaaccaagttactgctcctgagtatgtctttctgatatctgaactggcaggagaacaaagatttgcatctattgttgctaaaagacttgagagtttgggggcacttacacatggtgatagaagggcaacagaatctagagatctgagcaggttcaactttgataataagtatggaagaaatgctttagaaattgtcatgaaatccattgtaaacttggattctcctatggtatcaccacctccagactatcctggagaattttttaaagatgttcgacaaggactgataggcgttggcctgataaatgtagaagatcgctcgggaattcttactctcgataaagattataacaacataggaaaattcttaaatagaattttaggcatggaggtgcatcagcagaatgcgttatttcagtattttgcggacacacttactgcagttgttcaaaatgccaaaaaaaatggaagatatgatatgggaatcttagatcttggttctggagatgaaaaagtgcggaaaagtgatgttaaaaagtttctgactccaggatattcaacctctggccacgtagaattatacacaattagtgtagagaggggaatgtcatgggaggaagctaccaagatttgggctgagctgacaggaccagacgatggcttttacttgtcattgcaaataaggaacaacaagaaaactgccatcttagttaaagaagtgaatcctaaaaagaaacttttcttagtttatcgaccaaatactgggaagcagctcaaattagaaatttatgctgatctaaaaaagaaatataagaaggtcgtctcagatgatgccctgatgcactggttagatcagtataattcatctgcagatacttgtactcatgcttattggcgcggcaattgcaaaaaagcaagcttggggctagtttgtgaaataggtcttcgttgccgtacatattatgtattatgtggttcagtgctgagtgtctggacaaaagttgagggtgttctagcatctgtcagtggcacaaacgtgaagatgcagatcgtgcggctaagaacggaagatgggcaacggattgtaggtttgatcattccggcaaattgtgtgtctcctcttgtaaatctcctatcaacttcagaccagtctcaacagcttgcggtccaacagaaacagctatggcaacagcatcaccctcagagcatcaccaacttgagcaacgcatgaagaacagacaggtttcaacatggatggatctgaaatgctgttgaagcatatcatttgcataaaaatcagggacagtttccaaagaattatatatttttttcagttgtgctctctagttagtttttttgggagtaaggacaaacctggaatagatagcaaaactgaaaatcagcagtgctgatggtggtacatatgtctttcctttagcttctcccctgataattcccatctgcttttacttcgggtgagcagagggggatgtgtgtgtgcgtgtgtgtcagtctgtttgtgagtgtgttaaaggctacagaccacagttggtttaaaatgcttggaacttcccaaactggctttactttatgtttatacagtgctcagggttaacgcagtacatccatgccattgctgtgggaggtatccccggatgcatgtgttttgagtctataaatatagaaaatatatattggtttctttttccaacttaataggtttattaaagcatgaaatgaaaggttgcatatcatgcattcaggttattttctaatttttgttctgacagtgcatgtctttggaagcatgctgaaacaagattaacacaggagtcgagtaacagagagaaacatttgttagatgtacagcattggttattgcatttttatagtgtttatacctgggtattgcttcaaaccctgcagacccctccttccccttctccctgccctgggtttctggtcaaggtaatgaatacatacatttttctgtgataaaactcttaaaagttaattttaatgtattaatagtattcctaatgtgtgctgcagaaatggctatgagcctcttaaatttacatttgcaacttaaaggtagttttagaaggaagtacaaattggctttcatcttgcaaacaatcgttttttacttcattatcttaatttgctttgtcactcataaaaaggaaaccatacctgagttgtagacaatgaggaaacacttgaggcttctgctgtgtgttcttttgttattgttgttattgttgttactcagtaacttgaatattgtttaatgtgttgtaagacgtagagtttatctcaagctgttaaaaatggtaatgtacaaatgtgaatagacacttatctatataatatgggtaagttttgtttcgcctataatagatgtttataaaaacaagtgaggggacagttggtctttttatcttttctttctttttctttcttttctttttttctttttttttttttttttttttttttttgcttccacaggttgcactattgaaaaatcgagattgtataaacctggtaaaaagctgcaagatgccaaaatcttgtagatgtcaaataaaaagttattatactaacaagaagtggactcttgtttaggccctcactggtgaccttcagaagtagtctgtgacggggactcagcagaatttgtgtgttgtctcagcattccaggtagccttatagtttggcttaaaacttatccctaaaatgtaagatggcattgagggaaagggtataatgatagtacttctgaatgttttttaagttgaattgtttgtaaacttcttgcagaattgggtgagatgtgtgttaaaactgacaaacctggctgaaagcttagggcgttcatcctcttgtgtctcctttagcctgagtttggttatgtcaagcttaccgtaagttttcttaggatttatttattcttggtgcctaaaagaataaattgaaagtactttctgttctttggcacattttgcccagcggatgcaacttctatcctcagtccagttcatatatctcaggcagtgatccattttgtatcagccagtttcccttgttagggccgctagacccggctggcagccaagagcagcactctccccaccttcagcagaacttctcagctcatgtgtgtgtttttaaaagcagtaggcagcttccatcagcaatggaagtgtcccccactccagtggtggaggtgcagtcgctggacctgaggaagtggggaagcattacaaaccctcctgcagtaagaatggcagagttgggaaggatcttctctcgcaggctgttggcccaactcctcttttctgtgtatgagggcatcttagttttttatggcgttttcaaagcagcatatgaggattcttagcatgcagctaagtgacaacccccatggcctatgatgtaatgtttgctctggactagccatcttgataaataggagtgtatgtatcttaggttctttgtagaacagctatttttttttctcattaaaaaggcctctgaaagccctctcaaaatggacctcacaaaggcaaccagtgtgaatggatgggagctggggtgctgcatgcccaggctggtcatggtgtgtgcagcacccagagagttgcacccaccccttcttcaggtggacatccgacctttacactgtggtcttgcaaaaatcagcgagttagtttggccgccctgtgaagcttcagcattcaaggtcctcttctgttaaaacccaactcgtagccgggcgtggtggctcactcctataatcccagcacttcgggaggccaaggcaggtgcatcacttgaggccaggagttcgagaccagcctggtccacatggcaaaaccccatctgtaccaaaaaatacaaaaaatttgccgctgacttctgtaaaataggtccattcattgcaggatctaaatgccacacctgaattcagaggccttgtttaattaaccccatgtccactttgcctctgcaatgcctttttctttttagcaatatggctctgagcacaaagatttggttggaaatcatgttcgtgttttcagagtttacagcgtcaattgtactgaaaaccacttccagagtctaaagcagctcagatgttatctctgggggaattagtgttcccctcatttagcaacctccataccacaaggtctctgtctgtagttactgggattatccagatacactatcaatgatacaaattcataggagtattaatgcatttctttaaacacaacttgattaagaagcaaatatgttaagcagttttctttttctgctgctaaattacagttagacacttcagtatcttctctttacatgtgtatataaattagtaagaacctgcatccaaagcaatgtagtgtgtgtatgtatctatatatatttattctaactcagcacttcagaagcctttttgagttacaacaatattttagtttgcctcatctgtagaggtaaaatttctatattaccaagctccagaggaatatgatattttacaggcacaattttctggctgtagtccctggggcattcatttgctggcctccatgggatgctgttagaacaattgttagccggcaagagaagaaaggctaccaggacagcatttataattgtagaatgggagccttcttccctctcccctccactttcattttagcatgagataaaaaaatagattggaaatgattgttgcatctcacttcatggaagtaggggcagaagttccctctggatccttttcttgacaagcagtcaagaggaaggtccccatacacatgtacctgtgtgatacttggtagtttctaagaatggtgctacataagcgttgctgttaggctgggatcctattaatgaacgtttgattagttcaggcctcccaatggcaaaggcagacaccgtggagatggacatttactgactccccttctgtgtggcttcggtctccctggctaacaccacacctgtgcgtactgcgctcggcccactttgctgcagaaacgtagcaagcgtttcatgtcagggctacagctgagagcaaaaactgcaaaaaaaaaaaaaaatgtctcattgaatgccagttgtctgatacaaatgcagtgtcttttaagtgacagaaacacacctaaatacctgcaactcaagctcgctagcattttttttttgagtacttgagataaaatccaaaacccaccctctaattttgtgctgtatttatatatatgtacataaatgtatatatagagaaatgttgagttcttctggattctgaatgtaaataattcttgtaaattgggactctgcccacctgtttctcccttttccctcttcccttcagctctatttattcttttcttgactttcccatatggggcatcttatgacttttttttttttttttttttaagaaaagtatggaaaacttttcatttagaaaagtatttgttcctgtattttagaattcagttttgcatctttgctgtagaattcctgttttgtgttaatgttttttactatgtcttattgtgttgtgtgcaatgcattgtactggggggatgcacttgagtgccatttctgatactgtcattgtatgactgctgatgctcgtttatgttgttctttggaagctatagtgagcctgatgttttcacattttaaaaaatgcttcctgagacttctttaagctcctctaacttcttcagtgcatttgggatcaaacttagctcttagatcagcaaacctgacttgcttctacttttgcaatttttcaggccttaccatatttcttatctctgtcttcccacctgataggaaaatcttgcagatttgaaacagtggtttctggcctgctgctgcagcaaattccctatgtttatttaagaagtcgggcctatgcttttaacctacaaatgatgagtaatttacttgcaatgaacacaggtagcctgctgctgtttataacctgttgaggatatttatagcaggcaggaggcaggcctagtgtgttattgacaggtgactttagagaatgtacattggccgggtgcggtggctcacgcctgtaatcccagcactttgggaggccgaggcgggcggatcatgaggtcaggagattgagaccatctcctggctaacacggtgaaaccccgtctctactaaaaatacaaaaaaaaaaaaaacttagccaggcgtggtggcgggtgcctgtagtcccagctactcaggaggctgaggcaggagaatggcatgaacctgggaggcagagcttgcagtgagcccagatcgcgccactgcactccagcctgggcaacagaccgagactccgtctcgaaaaaaaaaaaagagagagaatgtacattaaggaacaattgtcctccaaaagagagccaagcaactgctctggagcctcctaggctgactctgctggagggtgagacaagcagattcccattgcagcactggtccctggggtaccctgaacggctgtgctctccacccttgtatcggtgagtggatcttgtctacatcagccgtaagcctagaagcagagcgggatcgaggcgtttttaataattcgagttgggaagacccggatggttcatcaaaatgatggtgttgagcacccgggaggcagacattgggtatttgttcacaattttgcacctgtaagaaaatgttcctttataactttcaaggattgccgtgagcgtctttggggccttttcattcatgtacaagtttcattcattactattcaacttggtagacttggtgaaaaatgtaaaagcattctgtatttggatcagtcttgggaactaaatttgtcgtgaattggggcctgtcacagattgcctccagtgtgcatcctccacgcagaccctccttgctcagtctccctctggcgcccatggggaagccgtgctgtggttggcagtgcggccatctgggctgccgcaacgtggcagggcaccgtccagcaagactgccccttagtgcagggctaagcaaggaaaagaagaagcccaaaaaggcgggttctttttgatacttgtaattcaggcgtcctccagagtgaaggccactctgcaggcccctggtgagaacctgtctggcttttccactgcgggcccctaaccagtaccctgcccttgtggcccatttgtgcctgggcagatgtttctggccagcagacactgaaggcctttttgctgtgacagtatttatggcactgaagaggataaagaagcttgagccctctttctgactcccactttatggggcagagagagctttttttctacatagcacattgcagtctcaccgctatcagaaaaatatcctgttcatggtttatactgaatttgcaaactactgatatgatttttcaataaccacttgtatcttccatcatccatgagaggtgggaagaggtacactgtatctctgcaataaaactttggccaggttctacctcctctgagcaaaggatacttttctatgtaggtgtagatggttctcctttactaatctgacatggtgcatctggagacaacatctgatgggatccaaagacaacttgaaacaaaggtggatgtcagctcttggtgtgttttcatttggttctcttttttaaatctcccttttgttatcgctcctgttgtagcgtgtccatcagtgtgtgaagggtgcgccctgttccaatgatactgcattgctgcatccagcctttcgtgggagcacggtaccaagcgtccggaattgattatcccaatcatttttgatatgtaactgaaaaatttggtctcatgcaataaaaatgtactggctgcattttagcaaggtttatttactcttgcaagtaaaaacgatcaaccgtgaagcgtaacaaattctgtatttagtttttttttctgttgtggtggtttttgttttgttttttgtttttgtaagattctaaataaattaaatacgagtca

SEQ ID NO: 187019 - DNA, 4313 bp, Homo sapiens
  Payload ID: 16824
  Gene Symbol: SBNO1
  Gene Name: strawberry notch homolog 1 (Drosophila)
  Uniprot ID: A3KN83
  ENST ID: ENST00000602398
  CDS Start-End: 129-4310
cggggaggtaggcagagcaggacgccgctgctgccgccgccaccgccgcctccgctccagtcgcctctggtccttcaaactcacacctcccgggaggagctgtgctggcgccgggtcccgcggggaaaatggtggagccagggcaagatttactgcttgctgctttgagtgagagtggaattagtccgaatgacctctttgatattgatggtggagatgcagggcttgcaactccaatgcctaccccgtcagttcagcagtcagtgccacttagtgcattagaactaggtttggagaccgaagcagcagttcctgttaaacaagaaccagagactgtacctactccagcactattaaatgtgaggcagcagcctccatctactacaacatttgtgctgaatcaaataaatcatcttccacccttgggatctacaattgtaatgactaaaacaccacctgtaacaaccaacaggcaaaccatcactttaactaagtttatccagactactgcaagcacacgcccgtcagtctcagcaccaacagtacgaaatgccatgacctctgcaccttcaaaagaccaagttcagcttaaagatctactgaaaaataatagtcttaatgaactgatgaaactaaagccacctgctaatattgctcagccagtagcaacagcagctactgatgtaagcaatggtacagtaaagaaagagtcttctaataaagaaggagctagaatgtggataaacgacatgaagatgaggagtttttccccaaccatgaaggttcctgttgtaaaagaagatgatgaaccagaggaagaagatgaagaagaaatgggtcatgcagaaacctatgcagaatacatgccaataaaattaaaaattggcctacgtcatccagatgctgtagtggaaaccagctctttatccagtgttactcctcctgatgtttggtacaaaacatccatttctgaggaaaccattgataatggctggttatcagcattgcagcttgaggcaattacatatgcagcccagcaacatgaaactttcctacctaatggagatcgtgctggcttcttaataggtgatggtgccggtgtaggaaaaggaaggacgatagcaggaatcatctatgaaaattatttgttgagtagaaaacgagcattgtggtttagtgtttcaaatgacttaaagtatgatgctgaaagagatttaagggatattggagcaaaaaacattttggttcattcgttaaataagtttaaatacggaaaaatttcttccaaacataatgggagtgtgaaaaagggtgttatttttgctacttactcttcacttattggtgaaagccagtctggcggcaagtataaaactaggttaaaacaacttctgcattggtgcggtgatgacttcgatggagtgatagtgtttgatgagtgtcataaagccaaaaacttatgtcctgttggttcttcaaagccaaccaagacaggcttagcagttttagagcttcagaacaaattgccaaaagccagagttgtttatgctagtgcaactggtgcttctgaaccacgcaacatggcctatatgaaccgtcttggcatatggggtgagggtactccatttagagaattcagtgattttattcaagcagtagaacggagaggagttggtgccatggaaatagttgctatggatatgaagcttagaggaatgtacattgctcgacaactgagctttactggagtgaccttcaaaattgaggaagttcttctttctcagagctacgttaaaatgtataacaaagctgtcaagctgtgggtcatcgccagagagcggtttcagcaagctgcagatctgattgatgctgagcaacgaatgaagaagtccatgtggggtcagttctggtctgctcaccagaggttcttcaaatacttatgcatagcatccaaagttaaaagggttgtgcaactagctcgagaggaaatcaagaatggaaaatgtgttgtaattggtctgcagtctacaggagaagctagaacattagaagctttggaagagggcgggggagaattgaatgattttgtttcaactgccaaaggtgtgttgcagtcactcattgaaaaacattttcctgctccagacaggaaaaaactttatagtttactaggaatcgatttgacagctccaagtaacaacagttcgccaagagatagtccttgtaaagaaaataaaataaagaagcggaaaggtgaagaaataactcgagaagccaaaaaagcacgaaaagtaggtggccttactggtagcagttctgacgacagtggaagtgaatctgatgcctctgataatgaagaaagtgactatgagagctctaaaaacatgagttctggagatgatgacgatttcaacccatttttagatgagtctaatgaggatgatgaaaatgatccctggttaattagaaaagaccacaagaaaaacaaagagaaaaaaaagaagaaaagtatagatccagattctattcaaagtgccttattagcatcaggtcttggatcaaaacgacctagtttttcatctacaccagttatctcacctgctcctaacagtacaccagctaacagtaacaccaacagtaacagtagccttataacaagtcaggatgctgtggaaagggctcagcagatgaagaaagacctgcttgataagctagaaaaattagctgaagacctcccccctaataccctggatgaacttatcgatgaacttggtggccctgagaacgttgctgagatgactggccgcaagggacgggttgtgagcaatgatgatggaagcatatcttatgagtcaagatctgaacttgatgtgcctgtggaaatactaaacatcacagaaaaacaacgatttatggatggagataagaatattgctatcatctcagaagctgccagctcgggtatttcattacaagcagataggagagctaaaaatcaaaggcgaagagttcatatgactttagaattaccttggagcgctgatagagcaattcaacagttcggacgtactcatagatcaaaccaagttactgctcctgagtatgtctttctgatatctgaactggcaggagaacaaagatttgcatctattgttgctaaaagacttgagagtttgggggcacttacacatggtgatagaagggcaacagaatctagagatctgagcaggttcaactttgataataagtatggaagaaatgctttagaaattgtcatgaaatccattgtaaacttggattctcctatggtatcaccacctccagactatcctggagaattttttaaagatgttcgacaaggactgataggcgttggcctgataaatgtagaagatcgctcgggaattcttactctcgataaagattataacaacataggaaaattcttaaatagaattttaggcatggaggtgcatcagcagaatgcgttatttcagtattttgcggacacacttactgcagttgttcaaaatgccaaaaaaaatggaagatatgatatgggaatcttagatcttggttctggagatgaaaaagtgcggaaaagtgatgttaaaaagtttctgactccaggatattcaacctctggccacgtagaattatacacaattagtgtagagaggggaatgtcatgggaggaagctaccaagatttgggctgagctgacaggaccagacgatggcttttacttgtcattgcaaataaggaacaacaagaaaactgccatcttagttaaagaagtgaatcctaaaaagaaacttttcttagtttatcgaccaaatactgggaagcagctcaaattagaaatttatgctgatctaaaaaagaaatataagaaggtcgtctcagatgatgccctgatgcactggttagatcagtataattcatctgcagatacttgtactcatgcttattggcgcggcaattgcaaaaaagcaagcttggggctagtttgtgaaataggtcttcgttgccgtacatattatgtattatgtggttcagtgctgagtgtctggacaaaagttgagggtgttctagcatctgtcagtggcacaaacgtgaagatgcagatcgtgcggctaagaacggaagatgggcaacggattgtaggtttgatcattccggcaaattgtgtgtctcctcttgtaaatctcctatcaacttcagaccagtctcaacagcttgcggtccaacagaaacagctatggcaacagcatcaccctcagagcatcaccaacttgagcaacgcatgaaga

SEQ ID NO: 187020 - DNA, 4923 bp, Homo sapiens
  Payload ID: 16825
  Gene Symbol: SBNO2
  Gene Name: strawberry notch homolog 2 (Drosophila)
  Uniprot ID: Q9Y2G9
  ENST ID: ENST00000361757
  CDS Start-End: 239-4339
gtgcgcggggcccccaagatggcgcccgaaacccggaagtgagcggcggcagctgcgaggctcggagaaacaggcgccgcgggctccgcgcccggccggacccgggcccgagatcatgatgctgccgccaccgccgccaccacggagcgagaagcccagatagacgccccggcggccccgggtcctggagtcccgccgcctgctgcccggccgaggaccccaccccgcctgccgcccgatgcttgcagtggggcccgccatggacagggattacccgcagcatgaacccccgccggcgggcagcctcctgtacagcccgccgcccctgcagagcgccatgctgcactgcccctactggaacaccttctcgctgccgccataccctgccttctccagcgacagccgcccgttcatgagctccgcctccttcctcggcagccagccctgcccagacaccagctatgcccccgtggccaccgcctccagcttgccaccaaagacctgcgactttgctcaggactcctcctattttgaggacttctccaacatctccatcttctcctcgtccgtggactccctgtcggacatcgtggacacgcccgacttcctgccggctgacagcctcaaccaggtgtccaccatctgggacgataaccctgccccctccacccacgataagctgttccagctcagcaggccgtttgcaggcttcgaggactttctgccctcccacagcaccccgcttctcgtcagctaccaggagcagagtgtgcagagccagccagaggaggaggacgaggctgaggaggaggaggcggaggagctggggcacacagagacctacgccgactacgtgccgtccaagtccaagatcgggaagcagcacccagaccgcgtggtggagaccagcacactgtccagcgtcccacccccagacatcacctacaccctggccctgccctcggacagcggggccctgtctgccctgcagctagaggccatcacctacgcctgccagcaacacgaggtcctgctccccagcgggcagcgcgcgggctttctcatcggcgatggggccggcgtgggcaaaggccggacggtggccggagtcatcctggagaaccacctgcgcggccggaagaaagcattgtggttcagcgtctccaacgacctcaagtacgatgcggagcgcgacctgcgggacatcgaagccacgggcatcgcggtgcacgcgctcagcaagatcaagtacggtgacaccactacctcagagggcgtcctcttcgccacctactccgccctgattggggagagccaggccggcggccagcaccgcactcgcctccggcagatcctggactggtgtggggaggccttcgagggcgtcatcgtgttcgacgagtgtcacaaagccaagaatgccggctccaccaagatgggcaaggctgtgctagacctgcagaacaagctgcccctggcccgcgtggtctacgccagcgccacaggtgcctctgagcctcggaacatgatctacatgagccgcttgggtatctggggcgagggcacacccttccggaactttgaggagttcctgcacgccatcgagaagaggggcgttggcgccatggagatcgtggccatggacatgaaggtcagcggcatgtacatcgcacgccagctcagcttctccggcgtcaccttccgcatcgaggagatcccgctggccccagccttcgagtgcgtctacaaccgcgcggccctgctgtgggccgaggccctgaacgtgttccagcaggcggccgactggatcggcctggagtcgcgcaagtccctgtggggccagttctggtcggcacaccagcgcttcttcaagtatctgtgcatcgcagccaaggtgcgccggctggtggagctggcccgagaggagctggcgcgagacaagtgcgtggtcatcgggctgcagtccacgggcgaggcgcgcacgcgggaggtgctgggggagaacgatgggcacctcaactgcttcgtctcggccgctgaaggcgtgttcctgtcgctaattcagaagcactttccgtccaccaagagaaagcgggacagaggagcgggcagcaagcggaaacggcgacctcggggacgcggggccaaagccccccggctggcgtgcgagacagcgggcgtcatccgcatcagtgacgacagcagcacggagtcggaccctggcctggacagcgacttcaactcctcccccgagtccctggtggatgacgacgttgtcatcgttgatgcagtcgggctccccagtgacgaccggggacccctgtgcctcctgcagagagacccgcatggccccggggtcctggagcgggtggagcggctgaagcaggatctgctggacaaagtgcggcggctgggccgggaactgccagtcaacaccctggacgagctcatcgaccagctgggcggcccccagcgggtggcggagatgaccggcaggaaaggccgcgtggtgtccaggcccgacgggacggtggccttcgagtcgcgggcagagcagggtctgtccatcgaccacgtgaacctcagggagaagcagcgcttcatgagcggcgagaagctcgtggccatcatctcggaggcctccagctcgggtgtctccctccaagccgaccgccgtgtccagaaccagcggcgccgcgtgcacatgaccttggagctgccgtggagcgccgaccgcgccatccagcagttcggccgcacccaccggtccaaccaggtctccgcgccagagtatgtcttcctcatctcggagctggccggggagcgccggttcgcctccatcgtggccaagcgcctggagagtctgggggccctgacccacggagaccgccgcgccacggagtcccgtgacctcagcaagtacaactttgagaacaagtatggcacccgggccctgcactgtgtcctcaccaccatcctgagccagactgagaacaaagtgcctgtgccccagggataccctggaggggtccccaccttcttccgggacatgaagcagggcctgctgtctgtgggcattggtggccgggagtcccggaatggctgcctggacgtggagaaggactgttccatcaccaagttcctgaaccgcatcctggggctggaggtgcacaagcagaacgccctgttccagtacttctcagacaccttcgaccacctcatcgagatggacaagcgggagggcaaatacgacatgggcatcctggaccttgctcccggtatcgaggagatctacgaggagagccagcaggtgttcctggctcccgggcacccgcaggacgggcaggtggtcttctacaagatcagcgtggaccgcggcctgaagtgggaggacgcctttgccaagtcgctggcgctgacgggcccctatgacggcttctacctctcctacaaggtccgcggtaacaagcccagctgcctgctggcggagcagaaccgcggccagttcttcacggtgtacaagcccaacatcggccggcagagccagctggaggccctggacagcctccgccgcaagttccaccgggtcaccgcggaggaggccaaggagccctgggagagtggctacgctttgtcgctgacgcactgcagccacagcgcctggaaccggcactgccggctggcgcaggagggtaaggactgcctgcaggggctgcggctgcggcaccactacatgctgtgcggcgcgctgctgcgcgtgtggggccgcatcgccgccgtcatggccgacgtcagcagcagcagctacctgcagatcgtgcggctgaagaccaaggacaggaagaagcaagtgggcatcaagatccccgagggctgcgtgcgccgggtgctgcaggagctgcggctgatggatgcggacgtgaagcgcaggcaggcgcccgccctgggctgccccgccccgcccgccccgcgcccgctggcgctgccttgcggccccggagaggtgctggacctcacctacagccccccggccgaggccttcccgccgcccccgcacttctctttcccggcgccgctgtccctggacgccggccccggcgtcgtgccgctgggcacccccgacgcccaggccgaccctgcggccctcgcgcaccagggctgcgacatcaacttcaaggaggtgctggaggacatgctgcgctcgctgcacgcggggccgccctccgagggcgcgctgggggagggcgcgggggcggggggcgcggcgggcggtggtcccgagcggcagagcgtgatccagttcagcccacccttccccggcgcccaggctcctctctgacacgcctttaggcgaaacatgccccaagacacagggaccgtttctcccctaggagcagcggtggggagcagggccaaggtcccctgaccactgctcagaggagccctaggccctggccgcagtgccttcagcgcccgacccgggcccccacctggtcagccctggcggggcccactcaggacagctgggggccggggcgtggcagggccctctctgtgcctctcctcccaagtaggaaggggctccgggtggctgctctgggactgggcacccacaagggctcagtgggcccaaacccttgaaatccgtgaaaccgggtggtcccaagagctagaaactcaggaaaccccaggtgctcagggccccgcgtctcgggggctccgtggggcagacccctgctaatatatgcaattctccctcccccagcccttccctgacccctaagttattgcccgctcacctctcccaggccccaggccgcggagctggcagggtggcgcctgcggtttctatgtatttatagcaagttctgatgtacatatgtaaaggacttttttaaatatatgtgccttttgcctacttcc

SEQ ID NO: 187021 - DNA, 4537 bp, Homo sapiens
  Payload ID: 16825
  Gene Symbol: SBNO2
  Gene Name: strawberry notch homolog 2 (Drosophila)
  Uniprot ID: Q9Y2G9
  ENST ID: ENST00000438103
  CDS Start-End: 25-3954
aatgctggggctgctgccgcggtcatgagggagccgctcccgggcagcgcttcctgggggacccctggccccccgagcgccgggaccatgtcccagctgcagctgtggctgcagtttgaggctctgaacaaggactcctcctattttgaggacttctccaacatctccatcttctcctcgtccgtggactccctgtcggacatcgtggacacgcccgacttcctgccggctgacagcctcaaccaggtgtccaccatctgggacgataaccctgccccctccacccacgataagctgttccagctcagcaggccgtttgcaggcttcgaggactttctgccctcccacagcaccccgcttctcgtcagctaccaggagcagagtgtgcagagccagccagaggaggaggacgaggctgaggaggaggaggcggaggagctggggcacacagagacctacgccgactacgtgccgtccaagtccaagatcgggaagcagcacccagaccgcgtggtggagaccagcacactgtccagcgtcccacccccagacatcacctacaccctggccctgccctcggacagcggggccctgtctgccctgcagctagaggccatcacctacgcctgccagcaacacgaggtcctgctccccagcgggcagcgcgcgggctttctcatcggcgatggggccggcgtgggcaaaggccggacggtggccggagtcatcctggagaaccacctgcgcggccggaagaaagcattgtggttcagcgtctccaacgacctcaagtacgatgcggagcgcgacctgcgggacatcgaagccacgggcatcgcggtgcacgcgctcagcaagatcaagtacggtgacaccactacctcagagggcgtcctcttcgccacctactccgccctgattggggagagccaggccggcggccagcaccgcactcgcctccggcagatcctggactggtgtggggaggccttcgagggcgtcatcgtgttcgacgagtgtcacaaagccaagaatgccggctccaccaagatgggcaaggctgtgctagacctgcagaacaagctgcccctggcccgcgtggtctacgccagcgccacaggtgcctctgagcctcggaacatgatctacatgagccgcttgggtatctggggcgagggcacacccttccggaactttgaggagttcctgcacgccatcgagaagaggggcgttggcgccatggagatcgtggccatggacatgaaggtcagcggcatgtacatcgcacgccagctcagcttctccggcgtcaccttccgcatcgaggagatcccgctggccccagccttcgagtgcgtctacaaccgcgcggccctgctgtgggccgaggccctgaacgtgttccagcaggcggccgactggatcggcctggagtcgcgcaagtccctgtggggccagttctggtcggcacaccagcgcttcttcaagtatctgtgcatcgcagccaaggtgcgccggctggtggagctggcccgagaggagctggcgcgagacaagtgcgtggtcatcgggctgcagtccacgggcgaggcgcgcacgcgggaggtgctgggggagaacgatgggcacctcaactgcttcgtctcggccgctgaaggcgtgttcctgtcgctaattcagaagcactttccgtccaccaagagaaagcgggacagaggagcgggcagcaagcggaaacggcgacctcggggacgcggggccaaagccccccggctggcgtgcgagacagcgggcgtcatccgcatcagtgacgacagcagcacggagtcggaccctggcctggacagcgacttcaactcctcccccgagtccctggtggatgacgacgttgtcatcgttgatgcagtcgggctccccagtgacgaccggggacccctgtgcctcctgcagagagacccgcatggccccggggtcctggagcgggtggagcggctgaagcaggatctgctggacaaagtgcggcggctgggccgggaactgccagtcaacaccctggacgagctcatcgaccagctgggcggcccccagcgggtggcggagatgaccggcaggaaaggccgcgtggtgtccaggcccgacgggacggtggccttcgagtcgcgggcagagcagggtctgtccatcgaccacgtgaacctcagggagaagcagcgcttcatgagcggcgagaagctcgtggccatcatctcggaggcctccagctcgggtgtctccctccaagccgaccgccgtgtccagaaccagcggcgccgcgtgcacatgaccttggagctgccgtggagcgccgaccgcgccatccagcagttcggccgcacccaccggtccaaccaggtctccgcgccagagtatgtcttcctcatctcggagctggccggggagcgccggttcgcctccatcgtggccaagcgcctggagagtctgggggccctgacccacggagaccgccgcgccacggagtcccgtgacctcagcaagtacaactttgagaacaagtatggcacccgggccctgcactgtgtcctcaccaccatcctgagccagactgagaacaaagtgcctgtgccccagggataccctggaggggtccccaccttcttccgggacatgaagcagggcctgctgtctgtgggcattggtggccgggagtcccggaatggctgcctggacgtggagaaggactgttccatcaccaagttcctgaaccgcatcctggggctggaggtgcacaagcagaacgccctgttccagtacttctcagacaccttcgaccacctcatcgagatggacaagcgggagggcaaatacgacatgggcatcctggaccttgctcccggtatcgaggagatctacgaggagagccagcaggtgttcctggctcccgggcacccgcaggacgggcaggtggtcttctacaagatcagcgtggaccgcggcctgaagtgggaggacgcctttgccaagtcgctggcgctgacgggcccctatgacggcttctacctctcctacaaggtccgcggtaacaagcccagctgcctgctggcggagcagaaccgcggccagttcttcacggtgtacaagcccaacatcggccggcagagccagctggaggccctggacagcctccgccgcaagttccaccgggtcaccgcggaggaggccaaggagccctgggagagtggctacgctttgtcgctgacgcactgcagccacagcgcctggaaccggcactgccggctggcgcaggagggtaaggactgcctgcaggggctgcggctgcggcaccactacatgctgtgcggcgcgctgctgcgcgtgtggggccgcatcgccgccgtcatggccgacgtcagcagcagcagctacctgcagatcgtgcggctgaagaccaaggacaggaagaagcaagtgggcatcaagatccccgagggctgcgtgcgccgggtgctgcaggagctgcggctgatggatgcggacgtgaagcgcaggcaggcgcccgccctgggctgccccgccccgcccgccccgcgcccgctggcgctgccttgcggccccggagaggtgctggacctcacctacagccccccggccgaggccttcccgccgcccccgcacttctctttcccggcgccgctgtccctggacgccggccccggcgtcgtgccgctgggcacccccgacgcccaggccgaccctgcggccctcgcgcaccagggctgcgacatcaacttcaaggaggtgctggaggacatgctgcgctcgctgcacgcggggccgccctccgagggcgcgctgggggagggcgcgggggcggggggcgcggcgggcggtggtcccgagcggcagagcgtgatccagttcagcccacccttccccggcgcccaggctcctctctgacacgcctttaggcgaaacatgccccaagacacagggaccgtttctcccctaggagcagcggtggggagcagggccaaggtcccctgaccactgctcagaggagccctaggccctggccgcagtgccttcagcgcccgacccgggcccccacctggtcagccctggcggggcccactcaggacagctgggggccggggcgtggcagggccctctctgtgcctctcctcccaagtaggaaggggctccgggtggctgctctgggactgggcacccacaagggctcagtgggcccaaacccttgaaatccgtgaaaccgggtggtcccaagagctagaaactcaggaaaccccaggtgctcagggccccgcgtctcgggggctccgtggggcagacccctgctaatatatgcaattctccctcccccagcccttccctgacccctaagttattgcccgctcacctctcccaggccccaggccgcggagctggcagggtggcgcctgcggtttctatgtatttatagcaagttctgatgtacatatgtaaaggacttttttaaatatatgtgccttttgcctacttc

SEQ ID NO: 187022 - DNA, 561 bp, Homo sapiens
  Payload ID: 16825
  Gene Symbol: SBNO2
  Gene Name: strawberry notch homolog 2 (Drosophila)
  ENST ID: ENST00000590176
  CDS Start-End: 178-561
actcatcggtgcccccgagccccttggtgaccccgcacccgcttttcctcgatcatgatgctgccgccaccgccgccaccacggagcgagaagcccagatagacgccccggcggccccgggtcctggagtcccgccgcctgctgcccggccgaggaccccaccccgcctgccgcccgatgcttgcagtggggcccgccatggacagggattacccgcagcatgaacccccgccggcgggcagcctcctgtacagcccgccgcccctgcagagcgccatgctgcactgcccctactggaacaccttctcgctgccgccataccctgccttctccagcgacagccgcccgttcatgagctccgcctccttcctcggcagccagccctgcccagacaccagctatgcccccgtggccaccgcctccagcttgccaccaaagacctgcgactttgctcaggactcctcctattttgaggacttctccaacatctccatcttctcctcgtccgtggactccctgtcggacatcgtggacacgcccgacttcctgccggctgacagc

SEQ ID NO: 187023 - DNA, 914 bp, Homo sapiens
  Payload ID: 16825
  Gene Symbol: SBNO2
  Gene Name: strawberry notch homolog 2 (Drosophila)
  ENST ID: ENST00000587655
  CDS Start-End: 580-914
gcagatcggactggcgggcctggtgccgctgtctcagtgacctgctttgtgactcgtgcccgtgcttcccggagccttgtgattgacctccatccccagcaagaacaagcgtccaagtgaaaccgaaagaggcggccttggccttggttccaggccccgctgcgttttgaaagtgatgtgcgccaggttccggaaggcggctcactcgcgtttcctgggagtctctgccgctgtgggctcctggggccaaggccctgggtgctggggcgtggggagggggagccggtgagccttcgggcctggcgggcagtaaacgtttctggaactgactcacttgctggggaggggcagccagggagggtcacggagaaagtccctgcccgccatggccccggaccgccgtcggctgcccgtccagcctggagtgaggaggcgtcttcctttgcatgtcagatcatgatgctgccgccaccgccgccaccacggagcgagaagcccagatagacgccccggcggccccgggtcctggagtcccgccgcctgctgcccggccgaggaccccaccccgcctgccgcccgatgcttgcagtggggcccgccatggacagggattacccgcagcatgaacccccgccggcgggcagcctcctgtacagcccgccgcccctgcagagcgccatgctgcactgcccctactggaacaccttctcgctgccgccataccctgccttctccagcgacagccgcccgttcatgagctccgcctccttcctcggcagccagccctgcccagacaccagctatgcccccgtggccaccgcctccagcttgccaccaaagacctgcgactttgctcaggactcctcctattttgaggacttctccaacatctccatcttctcctcgtccgtgga

SEQ ID NO: 187024 - DNA, 4861 bp, Homo sapiens
  Payload ID: 16825
  Gene Symbol: SBNO2
  Gene Name: strawberry notch homolog 2 (Drosophila)
  ENST ID: ENST00000587024
  CDS Start-End: 212-4282
gaaacccggaagtgagcggcggcagctgcgaggctcggagaaacaggcgccgcgggctccgcgcccggccggacccgggcccgagatcatgatgctgccgccaccgccgccaccacggagcgagaagcccagatagacgccccggcggccccgggtcctggagtcccgccgcctgctgcccggccgaggaccccaccccgcctgccgcccgatgcttgcagtggggcccgccatggacagggattacccgcagcatgaacccccgccggcgggcagcctcctgtacagcccgccgcccctgcagagcgccatgctgcactgcccctactggaacaccttctcgctgccgccataccctgccttctccagcgacagccgcccgttcatgagctccgcctccttcctcggcagccagccctgcccagacaccagctatgcccccgtggccaccgcctccagcttgccaccaaagacctgcgactttgctcaggactcctcctattttgaggacttctccaacatctccatcttctcctcgtccgtggactccctgtcggacatcgtggacacgcccgacttcctgccggctgacagcctcaaccaggtgtccaccatctgggacgataaccctgccccctccacccacgataagctgttccagctcagcaggccgtttgcaggcttcgaggactttctgccctcccacagcaccccgcttctcgtcagctaccaggagcagagtgtgcagagccagccagaggaggaggacgaggctgaggaggaggaggcggaggagctggggcacacagagacctacgccgactacgtgccgtccaagtccaagatcgggaagcagcacccagaccgcgtggtggagaccagcacactgtccagcgtcccacccccagacatcacctacaccctggccctgccctcggacagcggggccctgtctgccctgcagctagaggccatcacctacgcctgccagcaacacgaggtcctgctccccagcgggcagcgcgcgggctttctcatcggcgatggggccggcgtgggcaaaggccggacggtggccggagtcatcctggagaaccacctgcgcggccggaagaaagcattgtggttcagcgtctccaacgacctcaagtacgatgcggagcgcgacctgcgggacatcgaagccacgggcatcgcggtgcacgcgctcagcaagatcaagtacggtgacaccactacctcagagggcgtcctcttcgccacctactccgccctgattggggagagccaggccggcggccagcaccgcactcgcctccggcagatcctggactggtgtggggaggccttcgagggcgtcatcgtgttcgacgagtgtcacaaagccaagaatgccggctccaccaagatgggcaaggctgtgctagacctgcagaacaagctgcccctggcccgcgtggtctacgccagcgccacaggtgcctctgagcctcggaacatgatctacatgagccgcttgggtatctggggcgagggcacacccttccggaactttgaggagttcctgcacgccatcgagaagaggggcgttggcgccatggagatcgtggccatggacatgaaggtcagcggcatgtacatcgcacgccagctcagcttctccggcgtcaccttccgcatcgaggagatcccgctggccccagccttcgagtgcgtctacaaccgcgcggccctgctggcggccgactggatcggcctggagtcgcgcaagtccctgtggggccagttctggtcggcacaccagcgcttcttcaagtatctgtgcatcgcagccaaggtgcgccggctggtggagctggcccgagaggagctggcgcgagacaagtgcgtggtcatcgggctgcagtccacgggcgaggcgcgcacgcgggaggtgctgggggagaacgatgggcacctcaactgcttcgtctcggccgctgaaggcgtgttcctgtcgctaattcagaagcactttccgtccaccaagagaaagcgggacagaggagcgggcagcaagcggaaacggcgacctcggggacgcggggccaaagccccccggctggcgtgcgagacagcgggcgtcatccgcatcagtgacgacagcagcacggagtcggaccctggcctggacagcgacttcaactcctcccccgagtccctggtggatgacgacgttgtcatcgttgatgcagtcgggctccccagtgacgaccggggacccctgtgcctcctgcagagagacccgcatggccccggggtcctggagcgggtggagcggctgaagcaggatctgctggacaaagtgcggcggctgggccgggaactgccagtcaacaccctggacgagctcatcgaccagctgggcggcccccagcgggtggcggagatgaccggcaggaaaggccgcgtggtgtccaggcccgacgggacggtggccttcgagtcgcgggcagagcagggtctgtccatcgaccacgtgaacctcagggagaagcagcgcttcatgagcggcgagaagctcgtggccatcatctcggaggcctccagctcgggtgtctccctccaagccgaccgccgtgtccagaaccagcggcgccgcgtgcacatgaccttggagctgccgtggagcgccgaccgcgccatccagcagttcggccgcacccaccggtccaaccaggtctccgcgccagagtatgtcttcctcatctcggagctggccggggagcgccggttcgcctccatcgtggccaagcgcctggagagtctgggggccctgacccacggagaccgccgcgccacggagtcccgtgacctcagcaagtacaactttgagaacaagtatggcacccgggccctgcactgtgtcctcaccaccatcctgagccagactgagaacaaagtgcctgtgccccagggataccctggaggggtccccaccttcttccgggacatgaagcagggcctgctgtctgtgggcattggtggccgggagtcccggaatggctgcctggacgtggagaaggactgttccatcaccaagttcctgaaccgcatcctggggctggaggtgcacaagcagaacgccctgttccagtacttctcagacaccttcgaccacctcatcgagatggacaagcgggagggcaaatacgacatgggcatcctggaccttgctcccggtatcgaggagatctacgaggagagccagcaggtgttcctggctcccgggcacccgcaggacgggcaggtggtcttctacaagatcagcgtggaccgcggcctgaagtgggaggacgcctttgccaagtcgctggcgctgacgggcccctatgacggcttctacctctcctacaaggtccgcggtaacaagcccagctgcctgctggcggagcagaaccgcggccagttcttcacggtgtacaagcccaacatcggccggcagagccagctggaggccctggacagcctccgccgcaagttccaccgggtcaccgcggaggaggccaaggagccctgggagagtggctacgctttgtcgctgacgcactgcagccacagcgcctggaaccggcactgccggctggcgcaggagggtaaggactgcctgcaggggctgcggctgcggcaccactacatgctgtgcggcgcgctgctgcgcgtgtggggccgcatcgccgccgtcatggccgacgtcagcagcagcagctacctgcagatcgtgcggctgaagaccaaggacaggaagaagcaagtgggcatcaagatccccgagggctgcgtgcgccgggtgctgcaggagctgcggctgatggatgcggacgtgaagcgcaggcaggcgcccgccctgggctgccccgccccgcccgccccgcgcccgctggcgctgccttgcggccccggagaggtgctggacctcacctacagccccccggccgaggccttcccgccgcccccgcacttctctttcccggcgccgctgtccctggacgccggccccggcgtcgtgccgctgggcacccccgacgcccaggccgaccctgcggccctcgcgcaccagggctgcgacatcaacttcaaggaggtgctggaggacatgctgcgctcgctgcacgcggggccgccctccgagggcgcgctgggggagggcgcgggggcggggggcgcggcgggcggtggtcccgagcggcagagcgtgatccagttcagcccacccttccccggcgcccaggctcctctctgacacgcctttaggcgaaacatgccccaagacacagggaccgtttctcccctaggagcagcggtggggagcagggccaaggtcccctgaccactgctcagaggagccctaggccctggccgcagtgccttcagcgcccgacccgggcccccacctggtcagccctggcggggcccactcaggacagctgggggccggggcgtggcagggccctctctgtgcctctcctcccaagtaggaaggggctccgggtggctgctctgggactgggcacccacaagggctcagtgggcccaaacccttgaaatccgtgaaaccgggtggtcccaagagctagaaactcaggaaaccccaggtgctcagggccccgcgtctcgggggctccgtggggcagacccctgctaatatatgcaattctccctcccccagcccttccctgacccctaagttattgcccgctcacctctcccaggccccaggccgcggagctggcagggtggcgcctgcggtttctatgtatttatagcaagttctgatgtacatatgtaaaggacttttttaaatatatgtgccttttgccta

SEQ ID NO: 187025 - DNA, 562 bp, Homo sapiens
  Payload ID: 16825
  Gene Symbol: SBNO2
  Gene Name: strawberry notch homolog 2 (Drosophila)
  ENST ID: ENST00000590998
  CDS Start-End: 178-562
ggaaagctttccctgccaccacgggccagcctgggtccctgcactcgccagatcatgatgctgccgccaccgccgccaccacggagcgagaagcccagatagacgccccggcggccccgggtcctggagtcccgccgcctgctgcccggccgaggaccccaccccgcctgccgcccgatgcttgcagtggggcccgccatggacagggattacccgcagcatgaacccccgccggcgggcagcctcctgtacagcccgccgcccctgcagagcgccatgctgcactgcccctactggaacaccttctcgctgccgccataccctgccttctccagcgacagccgcccgttcatgagctccgcctccttcctcggcagccagccctgcccagacaccagctatgcccccgtggccaccgcctccagcttgccaccaaagacctgcgactttgctcaggactcctcctattttgaggacttctccaacatctccatcttctcctcgtccgtggactccctgtcggacatcgtggacacgcccgacttcctgccggctgacagcc

SEQ ID NO: 187026 - DNA, 4686 bp, Homo sapiens
  Payload ID: 16825
  Gene Symbol: SBNO2
  Gene Name: strawberry notch homolog 2 (Drosophila)
  Uniprot ID: Q9Y2G9
  ENST ID: ENST00000612198
  CDS Start-End: 1-4101
atgcttgcagtggggcccgccatggacagggattacccgcagcatgaacccccgccggcgggcagcctcctgtacagcccgccgcccctgcagagcgccatgctgcactgcccctactggaacaccttctcgctgccgccataccctgccttctccagcgacagccgcccgttcatgagctccgcctccttcctcggcagccagccctgcccagacaccagctatgcccccgtggccaccgcctccagcttgccaccaaagacctgcgactttgctcaggactcctcctattttgaggacttctccaacatctccatcttctcctcgtccgtggactccctgtcggacatcgtggacacgcccgacttcctgccggctgacagcctcaaccaggtgtccaccatctgggacgataaccctgccccctccacccacgataagctgttccagctcagcaggccgtttgcaggcttcgaggactttctgccctcccacagcaccccgcttctcgtcagctaccaggagcagagtgtgcagagccagccagaggaggaggacgaggctgaggaggaggaggcggaggagctggggcacacagagacctacgccgactacgtgccgtccaagtccaagatcgggaagcagcacccagaccgcgtggtggagaccagcacactgtccagcgtcccacccccagacatcacctacaccctggccctgccctcggacagcggggccctgtctgccctgcagctagaggccatcacctacgcctgccagcaacacgaggtcctgctccccagcgggcagcgcgcgggctttctcatcggcgatggggccggcgtgggcaaaggccggacggtggccggagtcatcctggagaaccacctgcgcggccggaagaaagcattgtggttcagcgtctccaacgacctcaagtacgatgcggagcgcgacctgcgggacatcgaagccacgggcatcgcggtgcacgcgctcagcaagatcaagtacggtgacaccactacctcagagggcgtcctcttcgccacctactccgccctgattggggagagccaggccggcggccagcaccgcactcgcctccggcagatcctggactggtgtggggaggccttcgagggcgtcatcgtgttcgacgagtgtcacaaagccaagaatgccggctccaccaagatgggcaaggctgtgctagacctgcagaacaagctgcccctggcccgcgtggtctacgccagcgccacaggtgcctctgagcctcggaacatgatctacatgagccgcttgggtatctggggcgagggcacacccttccggaactttgaggagttcctgcacgccatcgagaagaggggcgttggcgccatggagatcgtggccatggacatgaaggtcagcggcatgtacatcgcacgccagctcagcttctccggcgtcaccttccgcatcgaggagatcccgctggccccagccttcgagtgcgtctacaaccgcgcggccctgctgtgggccgaggccctgaacgtgttccagcaggcggccgactggatcggcctggagtcgcgcaagtccctgtggggccagttctggtcggcacaccagcgcttcttcaagtatctgtgcatcgcagccaaggtgcgccggctggtggagctggcccgagaggagctggcgcgagacaagtgcgtggtcatcgggctgcagtccacgggcgaggcgcgcacgcgggaggtgctgggggagaacgatgggcacctcaactgcttcgtctcggccgctgaaggcgtgttcctgtcgctaattcagaagcactttccgtccaccaagagaaagcgggacagaggagcgggcagcaagcggaaacggcgacctcggggacgcggggccaaagccccccggctggcgtgcgagacagcgggcgtcatccgcatcagtgacgacagcagcacggagtcggaccctggcctggacagcgacttcaactcctcccccgagtccctggtggatgacgacgttgtcatcgttgatgcagtcgggctccccagtgacgaccggggacccctgtgcctcctgcagagagacccgcatggccccggggtcctggagcgggtggagcggctgaagcaggatctgctggacaaagtgcggcggctgggccgggaactgccagtcaacaccctggacgagctcatcgaccagctgggcggcccccagcgggtggcggagatgaccggcaggaaaggccgcgtggtgtccaggcccgacgggacggtggccttcgagtcgcgggcagagcagggtctgtccatcgaccacgtgaacctcagggagaagcagcgcttcatgagcggcgagaagctcgtggccatcatctcggaggcctccagctcgggtgtctccctccaagccgaccgccgtgtccagaaccagcggcgccgcgtgcacatgaccttggagctgccgtggagcgccgaccgcgccatccagcagttcggccgcacccaccggtccaaccaggtctccgcgccagagtatgtcttcctcatctcggagctggccggggagcgccggttcgcctccatcgtggccaagcgcctggagagtctgggggccctgacccacggagaccgccgcgccacggagtcccgtgacctcagcaagtacaactttgagaacaagtatggcacccgggccctgcactgtgtcctcaccaccatcctgagccagactgagaacaaagtgcctgtgccccagggataccctggaggggtccccaccttcttccgggacatgaagcagggcctgctgtctgtgggcattggtggccgggagtcccggaatggctgcctggacgtggagaaggactgttccatcaccaagttcctgaaccgcatcctggggctggaggtgcacaagcagaacgccctgttccagtacttctcagacaccttcgaccacctcatcgagatggacaagcgggagggcaaatacgacatgggcatcctggaccttgctcccggtatcgaggagatctacgaggagagccagcaggtgttcctggctcccgggcacccgcaggacgggcaggtggtcttctacaagatcagcgtggaccgcggcctgaagtgggaggacgcctttgccaagtcgctggcgctgacgggcccctatgacggcttctacctctcctacaaggtccgcggtaacaagcccagctgcctgctggcggagcagaaccgcggccagttcttcacggtgtacaagcccaacatcggccggcagagccagctggaggccctggacagcctccgccgcaagttccaccgggtcaccgcggaggaggccaaggagccctgggagagtggctacgctttgtcgctgacgcactgcagccacagcgcctggaaccggcactgccggctggcgcaggagggtaaggactgcctgcaggggctgcggctgcggcaccactacatgctgtgcggcgcgctgctgcgcgtgtggggccgcatcgccgccgtcatggccgacgtcagcagcagcagctacctgcagatcgtgcggctgaagaccaaggacaggaagaagcaagtgggcatcaagatccccgagggctgcgtgcgccgggtgctgcaggagctgcggctgatggatgcggacgtgaagcgcaggcaggcgcccgccctgggctgccccgccccgcccgccccgcgcccgctggcgctgccttgcggccccggagaggtgctggacctcacctacagccccccggccgaggccttcccgccgcccccgcacttctctttcccggcgccgctgtccctggacgccggccccggcgtcgtgccgctgggcacccccgacgcccaggccgaccctgcggccctcgcgcaccagggctgcgacatcaacttcaaggaggtgctggaggacatgctgcgctcgctgcacgcggggccgccctccgagggcgcgctgggggagggcgcgggggcggggggcgcggcgggcggtggtcccgagcggcagagcgtgatccagttcagcccacccttccccggcgcccaggctcctctctgacacgcctttaggcgaaacatgccccaagacacagggaccgtttctcccctaggagcagcggtggggagcagggccaaggtcccctgaccactgctcagaggagccctaggccctggccgcagtgccttcagcgcccgacccgggcccccacctggtcagccctggcggggcccactcaggacagctgggggccggggcgtggcagggccctctctgtgcctctcctcccaagtaggaaggggctccgggtggctgctctgggactgggcacccacaagggctcagtgggcccaaacccttgaaatccgtgaaaccgggtggtcccaagagctagaaactcaggaaaccccaggtgctcagggccccgcgtctcgggggctccgtggggcagacccctgctaatatatgcaattctccctcccccagcccttccctgacccctaagttattgcccgctcacctctcccaggccccaggccgcggagctggcagggtggcgcctgcggtttctatgtatttatagcaagttctgatgtacatatgtaaaggacttttttaaatatatgtgccttttgcctacttccc

SEQ ID NO: 187027 - DNA, 4537 bp, Homo sapiens; identical to SEQ ID NO: 187021
  Payload ID: 16825
  Gene Symbol: SBNO2
  Gene Name: strawberry notch homolog 2 (Drosophila)
  Uniprot ID: Q9Y2G9
  ENST ID: ENST00000622719
  CDS Start-End: 25-3954

SEQ ID NO: 187028 - DNA, 461 bp, Homo sapiens
  Payload ID: 16825
  Gene Symbol: SBNO2
  Gene Name: strawberry notch homolog 2 (Drosophila)
  ENST ID: ENST00000631778
  CDS Start-End: 127-461
atcatgatgctgccgccaccgccgccaccacggagcgagaagcccagatagacgccccggcggccccgggtcctggagtcccgccgcctgctgcccggccgaggaccccaccccgcctgccgcccgatgcttgcagtggggcccgccatggacagggattacccgcagcatgaacccccgccggcgggcagcctcctgtacagcccgccgcccctgcagagcgccatgctgcactgcccctactggaacaccttctcgctgccgccataccctgccttctccagcgacagccgcccgttcatgagctccgcctccttcctcggcagccagccctgcccagacaccagctatgcccccgtggccaccgcctccagcttgccaccaaagacctgcgactttgctcaggactcctcctattttgaggacttctccaacatctccatcttctcctcgtccgtgga

SEQ ID NO: 187029 - DNA, 510 bp, Homo sapiens
  Payload ID: 16825
  Gene Symbol: SBNO2
  Gene Name: strawberry notch homolog 2 (Drosophila)
  ENST ID: ENST00000633604
  CDS Start-End: 127-510
atcatgatgctgccgccaccgccgccaccacggagcgagaagcccagatagacgccccggcggccccgggtcctggagtcccgccgcctgctgcccggccgaggaccccaccccgcctgccgcccgatgcttgcagtggggcccgccatggacagggattacccgcagcatgaacccccgccggcgggcagcctcctgtacagcccgccgcccctgcagagcgccatgctgcactgcccctactggaacaccttctcgctgccgccataccctgccttctccagcgacagccgcccgttcatgagctccgcctccttcctcggcagccagccctgcccagacaccagctatgcccccgtggccaccgcctccagcttgccaccaaagacctgcgactttgctcaggactcctcctattttgaggacttctccaacatctccatcttctcctcgtccgtggactccctgtcggacatcgtggacacgcccgacttcctgccggctgacagc

SEQ ID NO: 187030 - DNA, 4776 bp, Homo sapiens
  Payload ID: 16825
  Gene Symbol: SBNO2
  Gene Name: strawberry notch homolog 2 (Drosophila)
  ENST ID: ENST00000634172
  CDS Start-End: 127-4197
atcatgatgctgccgccaccgccgccaccacggagcgagaagcccagatagacgccccggcggccccgggtcctggagtcccgccgcctgctgcccggccgaggaccccaccccgcctgccgcccgatgcttgcagtggggcccgccatggacagggattacccgcagcatgaacccccgccggcgggcagcctcctgtacagcccgccgcccctgcagagcgccatgctgcactgcccctactggaacaccttctcgctgccgccataccctgccttctccagcgacagccgcccgttcatgagctccgcctccttcctcggcagccagccctgcccagacaccagctatgcccccgtggccaccgcctccagcttgccaccaaagacctgcgactttgctcaggactcctcctattttgaggacttctccaacatctccatcttctcctcgtccgtggactccctgtcggacatcgtggacacgcccgacttcctgccggctgacagcctcaaccaggtgtccaccatctgggacgataaccctgccccctccacccacgataagctgttccagctcagcaggccgtttgcaggcttcgaggactttctgccctcccacagcaccccgcttctcgtcagctaccaggagcagagtgtgcagagccagccagaggaggaggacgaggctgaggaggaggaggcggaggagctggggcacacagagacctacgccgactacgtgccgtccaagtccaagatcgggaagcagcacccagaccgcgtggtggagaccagcacactgtccagcgtcccacccccagacatcacctacaccctggccctgccctcggacagcggggccctgtctgccctgcagctagaggccatcacctacgcctgccagcaacacgaggtcctgctccccagcgggcagcgcgcgggctttctcatcggcgatggggccggcgtgggcaaaggccggacggtggccggagtcatcctggagaaccacctgcgcggccggaagaaagcattgtggttcagcgtctccaacgacctcaagtacgatgcggagcgcgacctgcgggacatcgaagccacgggcatcgcggtgcacgcgctcagcaagatcaagtacggtgacaccactacctcagagggcgtcctcttcgccacctactccgccctgattggggagagccaggccggcggccagcaccgcactcgcctccggcagatcctggactggtgtggggaggccttcgagggcgtcatcgtgttcgacgagtgtcacaaagccaagaatgccggctccaccaagatgggcaaggctgtgctagacctgcagaacaagctgcccctggcccgcgtggtctacgccagcgccacaggtgcctctgagcctcggaacatgatctacatgagccgcttgggtatctggggcgagggcacacccttccggaactttgaggagttcctgcacgccatcgagaagaggggcgttggcgccatggagatcgtggccatggacatgaaggtcagcggcatgtacatcgcacgccagctcagcttctccggcgtcaccttccgcatcgaggagatcccgctggccccagccttcgagtgcgtctacaaccgcgcggccctgctggcggccgactggatcggcctggagtcgcgcaagtccctgtggggccagttctggtcggcacaccagcgcttcttcaagtatctgtgcatcgcagccaaggtgcgccggctggtggagctggcccgagaggagctggcgcgagacaagtgcgtggtcatcgggctgcagtccacgggcgaggcgcgcacgcgggaggtgctgggggagaacgatgggcacctcaactgcttcgtctcggccgctgaaggcgtgttcctgtcgctaattcagaagcactttccgtccaccaagagaaagcgggacagaggagcgggcagcaagcggaaacggcgacctcggggacgcggggccaaagccccccggctggcgtgcgagacagcgggcgtcatccgcatcagtgacgacagcagcacggagtcggaccctggcctggacagcgacttcaactcctcccccgagtccctggtggatgacgacgttgtcatcgttgatgcagtcgggctccccagtgacgaccggggacccctgtgcctcctgcagagagacccgcatggccccggggtcctggagcgggtggagcggctgaagcaggatctgctggacaaagtgcggcggctgggccgggaactgccagtcaacaccctggacgagctcatcgaccagctgggcggcccccagcgggtggcggagatgaccggcaggaaaggccgcgtggtgtccaggcccgacgggacggtggccttcgagtcgcgggcagagcagggtctgtccatcgaccacgtgaacctcagggagaagcagcgcttcatgagcggcgagaagctcgtggccatcatctcggaggcctccagctcgggtgtctccctccaagccgaccgccgtgtccagaaccagcggcgccgcgtgcacatgaccttggagctgccgtggagcgccgaccgcgccatccagcagttcggccgcacccaccggtccaaccaggtctccgcgccagagtatgtcttcctcatctcggagctggccggggagcgccggttcgcctccatcgtggccaagcgcctggagagtctgggggccctgacccacggagaccgccgcgccacggagtcccgtgacctcagcaagtacaactttgagaacaagtatggcacccgggccctgcactgtgtcctcaccaccatcctgagccagactgagaacaaagtgcctgtgccccagggataccctggaggggtccccaccttcttccgggacatgaagcagggcctgctgtctgtgggcattggtggccgggagtcccggaatggctgcctggacgtggagaaggactgttccatcaccaagttcctgaaccgcatcctggggctggaggtgcacaagcagaacgccctgttccagtacttctcagacaccttcgaccacctcatcgagatggacaagcgggagggcaaatacgacatgggcatcctggaccttgctcccggtatcgaggagatctacgaggagagccagcaggtgttcctggctcccgggcacccgcaggacgggcaggtggtcttctacaagatcagcgtggaccgcggcctgaagtgggaggacgcctttgccaagtcgctggcgctgacgggcccctatgacggcttctacctctcctacaaggtccgcggtaacaagcccagctgcctgctggcggagcagaaccgcggccagttcttcacggtgtacaagcccaacatcggccggcagagccagctggaggccctggacagcctccgccgcaagttccaccgggtcaccgcggaggaggccaaggagccctgggagagtggctacgctttgtcgctgacgcactgcagccacagcgcctggaaccggcactgccggctggcgcaggagggtaaggactgcctgcaggggctgcggctgcggcaccactacatgctgtgcggcgcgctgctgcgcgtgtggggccgcatcgccgccgtcatggccgacgtcagcagcagcagctacctgcagatcgtgcggctgaagaccaaggacaggaagaagcaagtgggcatcaagatccccgagggctgcgtgcgccgggtgctgcaggagctgcggctgatggatgcggacgtgaagcgcaggcaggcgcccgccctgggctgccccgccccgcccgccccgcgcccgctggcgctgccttgcggccccggagaggtgctggacctcacctacagccccccggccgaggccttcccgccgcccccgcacttctctttcccggcgccgctgtccctggacgccggccccggcgtcgtgccgctgggcacccccgacgcccaggccgaccctgcggccctcgcgcaccagggctgcgacatcaacttcaaggaggtgctggaggacatgctgcgctcgctgcacgcggggccgccctccgagggcgcgctgggggagggcgcgggggcggggggcgcggcgggcggtggtcccgagcggcagagcgtgatccagttcagcccacccttccccggcgcccaggctcctctctgacacgcctttaggcgaaacatgccccaagacacagggaccgtttctcccctaggagcagcggtggggagcagggccaaggtcccctgaccactgctcagaggagccctaggccctggccgcagtgccttcagcgcccgacccgggcccccacctggtcagccctggcggggcccactcaggacagctgggggccggggcgtggcagggccctctctgtgcctctcctcccaagtaggaaggggctccgggtggctgctctgggactgggcacccacaagggctcagtgggcccaaacccttgaaatccgtgaaaccgggtggtcccaagagctagaaactcaggaaaccccaggtgctcagggccccgcgtctcgggggctccgtggggcagacccctgctaatatatgcaattctccctcccccagcccttccctgacccctaagttattgcccgctcacctctcccaggccccaggccgcggagctggcagggtggcgcctgcggtttctatgtatttatagcaagttctgatgtacatatgtaaaggacttttttaaatatatgtgccttttgccta

SEQ ID NO: 187031 - DNA, 4811 bp, Homo sapiens
  Payload ID: 16825
  Gene Symbol: SBNO2
  Gene Name: strawberry notch homolog 2 (Drosophila)
  Uniprot ID: Q9Y2G9
  ENST ID: ENST00000631948
  CDS Start-End: 127-4227
atcatgatgctgccgccaccgccgccaccacggagcgagaagcccagatagacgccccggcggccccgggtcctggagtcccgccgcctgctgcccggccgaggaccccaccccgcctgccgcccgatgcttgcagtggggcccgccatggacagggattacccgcagcatgaacccccgccggcgggcagcctcctgtacagcccgccgcccctgcagagcgccatgctgcactgcccctactggaacaccttctcgctgccgccataccctgccttctccagcgacagccgcccgttcatgagctccgcctccttcctcggcagccagccctgcccagacaccagctatgcccccgtggccaccgcctccagcttgccaccaaagacctgcgactttgctcaggactcctcctattttgaggacttctccaacatctccatcttctcctcgtccgtggactccctgtcggacatcgtggacacgcccgacttcctgccggctgacagcctcaaccaggtgtccaccatctgggacgataaccctgccccctccacccacgataagctgttccagctcagcaggccgtttgcaggcttcgaggactttctgccctcccacagcaccccgcttctcgtcagctaccaggagcagagtgtgcagagccagccagaggaggaggacgaggctgaggaggaggaggcggaggagctggggcacacagagacctacgccgactacgtgccgtccaagtccaagatcgggaagcagcacccagaccgcgtggtggagaccagcacactgtccagcgtcccacccccagacatcacctacaccctggccctgccctcggacagcggggccctgtctgccctgcagctagaggccatcacctacgcctgccagcaacacgaggtcctgctccccagcgggcagcgcgcgggctttctcatcggcgatggggccggcgtgggcaaaggccggacggtggccggagtcatcctggagaaccacctgcgcggccggaagaaagcattgtggttcagcgtctccaacgacctcaagtacgatgcggagcgcgacctgcgggacatcgaagccacgggcatcgcggtgcacgcgctcagcaagatcaagtacggtgacaccactacctcagagggcgtcctcttcgccacctactccgccctgattggggagagccaggccggcggccagcaccgcactcgcctccggcagatcctggactggtgtggggaggccttcgagggcgtcatcgtgttcgacgagtgtcacaaagccaagaatgccggctccaccaagatgggcaaggctgtgctagacctgcagaacaagctgcccctggcccgcgtggtctacgccagcgccacaggtgcctctgagcctcggaacatgatctacatgagccgcttgggtatctggggcgagggcacacccttccggaactttgaggagttcctgcacgccatcgagaagaggggcgttggcgccatggagatcgtggccatggacatgaaggtcagcggcatgtacatcgcacgccagctcagcttctccggcgtcaccttccgcatcgaggagatcccgctggccccagccttcgagtgcgtctacaaccgcgcggccctgctgtgggccgaggccctgaacgtgttccagcaggcggccgactggatcggcctggagtcgcgcaagtccctgtggggccagttctggtcggcacaccagcgcttcttcaagtatctgtgcatcgcagccaaggtgcgccggctggtggagctggcccgagaggagctggcgcgagacaagtgcgtggtcatcgggctgcagtccacgggcgaggcgcgcacgcgggaggtgctgggggagaacgatgggcacctcaactgcttcgtctcggccgctgaaggcgtgttcctgtcgctaattcagaagcactttccgtccaccaagagaaagcgggacagaggagcgggcagcaagcggaaacggcgacctcggggacgcggggccaaagccccccggctggcgtgcgagacagcgggcgtcatccgcatcagtgacgacagcagcacggagtcggaccctggcctggacagcgacttcaactcctcccccgagtccctggtggatgacgacgttgtcatcgttgatgcagtcgggctccccagtgacgaccggggacccctgtgcctcctgcagagagacccgcatggccccggggtcctggagcgggtggagcggctgaagcaggatctgctggacaaagtgcggcggctgggccgggaactgccagtcaacaccctggacgagctcatcgaccagctgggcggcccccagcgggtggcggagatgaccggcaggaaaggccgcgtggtgtccaggcccgacgggacggtggccttcgagtcgcgggcagagcagggtctgtccatcgaccacgtgaacctcagggagaagcagcgcttcatgagcggcgagaagctcgtggccatcatctcggaggcctccagctcgggtgtctccctccaagccgaccgccgtgtccagaaccagcggcgccgcgtgcacatgaccttggagctgccgtggagcgccgaccgcgccatccagcagttcggccgcacccaccggtccaaccaggtctccgcgccagagtatgtcttcctcatctcggagctggccggggagcgccggttcgcctccatcgtggccaagcgcctggagagtctgggggccctgacccacggagaccgccgcgccacggagtcccgtgacctcagcaagtacaactttgagaacaagtatggcacccgggccctgcactgtgtcctcaccaccatcctgagccagactgagaacaaagtgcctgtgccccagggataccctggaggggtccccaccttcttccgggacatgaagcagggcctgctgtctgtgggcattggtggccgggagtcccggaatggctgcctggacgtggagaaggactgttccatcaccaagttcctgaaccgcatcctggggctggaggtgcacaagcagaacgccctgttccagtacttctcagacaccttcgaccacctcatcgagatggacaagcgggagggcaaatacgacatgggcatcctggaccttgctcccggtatcgaggagatctacgaggagagccagcaggtgttcctggctcccgggcacccgcaggacgggcaggtggtcttctacaagatcagcgtggaccgcggcctgaagtgggaggacgcctttgccaagtcgctggcgctgacgggcccctatgacggcttctacctctcctacaaggtccgcggtaacaagcccagctgcctgctggcggagcagaaccgcggccagttcttcacggtgtacaagcccaacatcggccggcagagccagctggaggccctggacagcctccgccgcaagttccaccgggtcaccgcggaggaggccaaggagccctgggagagtggctacgctttgtcgctgacgcactgcagccacagcgcctggaaccggcactgccggctggcgcaggagggtaaggactgcctgcaggggctgcggctgcggcaccactacatgctgtgcggcgcgctgctgcgcgtgtggggccgcatcgccgccgtcatggccgacgtcagcagcagcagctacctgcagatcgtgcggctgaagaccaaggacaggaagaagcaagtgggcatcaagatccccgagggctgcgtgcgccgggtgctgcaggagctgcggctgatggatgcggacgtgaagcgcaggcaggcgcccgccctgggctgccccgccccgcccgccccgcgcccgctggcgctgccttgcggccccggagaggtgctggacctcacctacagccccccggccgaggccttcccgccgcccccgcacttctctttcccggcgccgctgtccctggacgccggccccggcgtcgtgccgctgggcacccccgacgcccaggccgaccctgcggccctcgcgcaccagggctgcgacatcaacttcaaggaggtgctggaggacatgctgcgctcgctgcacgcggggccgccctccgagggcgcgctgggggagggcgcgggggcggggggcgcggcgggcggtggtcccgagcggcagagcgtgatccagttcagcccacccttccccggcgcccaggctcctctctgacacgcctttaggcgaaacatgccccaagacacagggaccgtttctcccctaggagcagcggtggggagcagggccaaggtcccctgaccactgctcagaggagccctaggccctggccgcagtgccttcagcgcccgacccgggcccccacctggtcagccctggcggggcccactcaggacagctgggggccggggcgtggcagggccctctctgtgcctctcctcccaagtaggaaggggctccgggtggctgctctgggactgggcacccacaagggctcagtgggcccaaacccttgaaatccgtgaaaccgggtggtcccaagagctagaaactcaggaaaccccaggtgctcagggccccgcgtctcgggggctccgtggggcagacccctgctaatatatgcaattctccctcccccagcccttccctgacccctaagttattgcccgctcacctctcccaggccccaggccgcggagctggcagggtggcgcctgcggtttctatgtatttatagcaagttctgatgtacatatgtaaaggacttttttaaatatatgtgccttttgcctacttcc

SEQ ID NO: 187032 - DNA, 562 bp, Homo sapiens; identical to SEQ ID NO: 187025
  Payload ID: 16825
  Gene Symbol: SBNO2
  Gene Name: strawberry notch homolog 2 (Drosophila)
  ENST ID: ENST00000632777
  CDS Start-End: 178-562

SEQ ID NO: 187033 - DNA, 3171 bp, Homo sapiens
  Payload ID: 16826
  Gene Symbol: SERP1
  Gene Name: stress-associated endoplasmic reticulum protein 1
  Uniprot ID: Q9Y6X1
  ENST ID: ENST00000239944
  CDS Start-End: 507-707
aaacgcgcacgcgcaaatctagggcgacgcttgacagagcttgggagggtgcgcctgctttcgccctccttctccagcgggaggggcgcgcacttccgcggggcggagtccgtctagtgctgacgttggcagccgaacccaaagtagatcgaggcggcgggctgcacattcccgttgttgcgttgcgtttccttcctctttcactccgcgctcacggcggcggccaaagcggcggcgacggcggcgcgagaacgacccggcggccagttctcttcctcctgcgcacctgccccgctcggtcagtcagtcggcggccggcgcccggcttgtgctcagacctcgcgcttgcggcgcccaggcccagcggccgtagctagcgtctggcctgagaacctcggcgctccggcggcgcgggcaccacgagccgagcctcgcagcggctccagaggaggcaggcgagtgagcgagtccgaggggtggccggggcaggtggtggcgccgcgaagatggtcgccaagcaaaggatccgtatggccaacgagaagcacagcaagaacatcacccagcgcggcaacgtcgccaagacctcgagaaatgcccccgaagagaaggcgtctgtaggaccctggttattggctctcttcatttttgttgtctgtggttctgcaattttccagattattcaaagtatcaggatgggcatgtgaagtgactgaccttaagatgtttccattctcctgtgaattttaacttgaactcattcctgatgtttgataccctggttgaaaacaattcagtaaagcatcctgcctcagaatgactttcctatcatgcttcatgtgtcattccaaggtttcttcatgagtcattccaagttttctagtccataccacagtgccttgcaaaaaacaccacatgaataaagcaataaaatttgattgttaagatacagtagtggaccctacttattcagtcaattaagagtaagtttttttatgtggttattaaaacagtatgaacaattagtctaactctgcatagacagggtctagattttgttaacccaaatgtataactgcagttagcttaaattacaatttgaagtcttgtggtttttatatagctaggcactttattactcttttgaactgaaagcacactcccttataggttcatgtaactgtcctgtaataaggtgcttataaatggaacaactacacagcctagttttgccacaacctttagcatctaaaaagttttaaaagcttctaaatgtctaatataaagggagatgcttatagccacaacatctattttaccaatattgtttccattacactaccttggattttgcatgagtgagtatagtaacccaagatgccataaaaaaaaaacttgatcgttttctgacttaatcagttactgtggtttcactaaaagctaccgtggtggagtgaagtcagtcagggaaggtttgtttatgttacatttatttcaccagaactattttaatatatcaaaggggtttactatgccaaacaaaattctagggaaaaatactgctaaaaatggatgcctcatcagaacatgctgttgagtccaatgtgccataagacattttagcatgttaaatagcacttttaatagcaaaaaaaggcacatcaactgcgaagttatccttagtttgcaaatgctttttctagattaatgatttttcaatcattagggtactagacacatcagcctaaagtggcatctggaattgaatggatttactgataatgatcagtctttagtcttccctttgttatatgactttataggttatgattgatcaaatttacgttttactaatggtaagggtgagggtcatagggcaggttttgggttttctagtactgttgaaaactgcaagtattggctatttgtatacttagccataacttggtgaaaaaaaacctgagcagtgtctatgtattaatgcgttggaaagaaagctgcttgtgtttgctttgttaattgcctcaggatatttcttttaaaataagctgttttaagaggaacagaagggaaatctgctacctagtctatacacagcgtgaacctcacagggggcttctgataccctcaaacatggagaacagtaagggagcagagtggttaaggactttcaggaacttaactattctggaataaggaatgaatcaactgaccttgggccagcaggtttttaactaaattgttacttgcctttctcacccagttaatcagtctctgtacttgtttccctttttgaaacaagtgtcttggttaactaattctgttttatggttgtgctaaattcatagcaggtgccttattctttgcttttagtcaaaccattccatatcagaattttccttggtttactatagatatttggctttaagttgttgtttgtgttttttaatgtacaatgttctgataaatttgactgttaaattgctatagctagcaatcattttacatatgtaaaattgcattccctttgtatttcatgtgtaattcaccaattaagtgcagtttatattcaggttggattatgcatgtttaggtaaacgaaagctgtgtcttacttgatttattctttaaaaataaagttccctgaatatttgatgcttttcttctaaacggaaatgattttacagttatctgagtgtaccttttatagttagtagaaaatgattttaaagaatgtttagtattgtacttaaatggtatgcagaggcacagatgtaaggtttataactggaaataggtggtaagaaaaatatatagaaagcacaatgatttgaatatttttccacttaggatttcctaatctccttgtcatccaattcaagctcaagatgaagcacaattctttgatctccctttgccagttgaattttatagatcatctaatgttgagcacagtatgagaataaatattggggttgtcaacattactcagttactctttgtggtttaactctaacatttcaacaagttgtcaattaattgtatctgttgggttgtatataatgttgctcaaaataattaagtggacttccaaaaataagatttccattgtaacaggatgcattgtgatgggctttgacttacattaaagaaatgtggatagtcaactgc

SEQ ID NO: 187034 - DNA, 830 bp, Homo sapiens
  Payload ID: 16826
  Gene Symbol: SERP1
  Gene Name: stress-associated endoplasmic reticulum protein 1
  ENST ID: ENST00000491660
  CDS Start-End: 365-601
agtagatcgaggcggcgggctgcacattcccgttgttgcgttgcgtttccttcctctttcactccgcgctcacggcggcggccaaagcggcggcgacggcggcgcgagaacgacccggcggccagttctcttcctcctgcgcacctgccccgctcggtcagtcagtcggcggccggcgcccggcttgtgctcagacctcgcgcttgcggcgcccaggcccagcggccgtagctagcgtctggcctgagaacctcggcgctccggcggcgcgggcaccacgagccgagcctcgcagcggctccagaggaggcaggcgagtgagcgagtccgaggggtggccggggcaggtggtggcgccgcgaagatggtcgccaagcaaaggatccgtatggccaacgagaagcacagcaagaacatcacccagcgcggcaacgtcgccaagacctcgagaaatgcccccgaagagaaggcgtctgtaggaccctggttattggctctcttcatttttgttgtctgtggttctggtaagtggcttgggggctcccatcaggtagagtcttgggttgaaaggatttgggatgacgtggtgaccggtcagtagtgagtcctacctgcgtagttctcaacccacctgccgaggactccacataattctgtttcgtctgaaccaaattacttgttccacatatgcacagagggtggtgctccagaaacttctcccagcttaatttgtactcacaggagatcaaaaaggaggtcaggtcttggtaatgatccagttggaataaatgttaagaccggacaaaacctaacgaaatgagaatttagaa

SEQ ID NO: 187035 - DNA, 657 bp, Homo sapiens
  Payload ID: 16826
  Gene Symbol: SERP1
  Gene Name: stress-associated endoplasmic reticulum protein 1
  ENST ID: ENST00000487153
  CDS Start-End: 367-534
aaagtagatcgaggcggcgggctgcacattcccgttgttgcgttgcgtttccttcctctttcactccgcgctcacggcggcggccaaagcggcggcgacggcggcgcgagaacgacccggcggccagttctcttcctcctgcgcacctgccccgctcggtcagtcagtcggcggccggcgcccggcttgtgctcagacctcgcgcttgcggcgcccaggcccagcggccgtagctagcgtctggcctgagaacctcggcgctccggcggcgcgggcaccacgagccgagcctcgcagcggctccagaggaggcaggcgagtgagcgagtccgaggggtggccggggcaggtggtggcgccgcgaagatggtcgccaagcaaaggatccgtatggccaacgagaagcacagcaagaacatcacccagcgcggcaacgtcgccaagacctcgcaattttccagattattcaaagtatcaggatgggcatgtgaagtgactgaccttaagatgtttccattctcctgtgaattttaacttgaactcattcctgatgtttgataccctggttgaaaacaattcagtaaagcatcctgcctcagaatgactttcctatcatgcttcatgtgtcattccaaggtttcttcatgagtcattcca

SEQ ID NO: 187036 - DNA, 3934 bp, Homo sapiens
  Payload ID: 16826
  Gene Symbol: SERP1
  Gene Name: stress-associated endoplasmic reticulum protein 1
  Uniprot ID: Q9Y6X1
  ENST ID: ENST00000479209
  CDS Start-End: 1274-1474
actcaccaccatcttggtagtgtgcaagactctgggacggcatgagaaaggcagaaagggagcaaaggagctggtggggtgtcacagggcctatgtatgaggcagatgtgagttctgcatccagttttgcaatttatccatttacctgcctgagacttggaaacacctactttatagtcctgattcaagtgttggcggatggaagggaggagactcctgaccctcagaatgacctaaatgacttcacaagggcccgtgtaacaccagtattgcagacccatgtgtcacaaattcaactagcacattgtttttctcccccttcttctatttctgtagaagatgaatccgcaggcaagaatgatggatgggtgaaagggagggggaatacgaaagcccagaggcggagacttcacttccgattgccacgctatatcaagaaagccaacagtctggcctttccgcaagccacaagaaaaggcagatcagactccccggctcctcgggtagttctcaaaggcaaagacaaaaataagaaactagtctgaagaaagagagtccctcgcttcttcagaactcacctgtcaagagcggcgtggacggcgccatgttgtcccggaaagagaaaccgctcgggtgagagttcaccagggccgaacccggcccctacacgtctcctcatgcgtggagacagcgaattggtgtttccggagccatcagcctcggggccaattcacttccggttacggagtgacgcggaaaaggcgcccaaacgcgcacgcgcaaatctagggcgacgcttgacagagcttgggagggtgcgcctgctttcgccctccttctccagcgggaggggcgcgcacttccgcggggcggagtccgtctagtgctgacgttggcagccgaacccaaagtagatcgaggcggcgggctgcacattcccgttgttgcgttgcgtttccttcctctttcactccgcgctcacggcggcggccaaagcggcggcgacggcggcgcgagaacgacccggcggccagttctcttcctcctgcgcacctgccccgctcggtcagtcagtcggcggccggcgcccggcttgtgctcagacctcgcgcttgcggcgcccaggcccagcggccgtagctagcgtctggcctgagaacctcggcgctccggcggcgcgggcaccacgagccgagcctcgcagcggctccagaggaggcaggcgagtgagcgagtccgaggggtggccggggcaggtggtggcgccgcgaagatggtcgccaagcaaaggatccgtatggccaacgagaagcacagcaagaacatcacccagcgcggcaacgtcgccaagacctcgagaaatgcccccgaagagaaggcgtctgtaggaccctggttattggctctcttcatttttgttgtctgtggttctgcaattttccagattattcaaagtatcaggatgggcatgtgaagtgactgaccttaagatgtttccattctcctgtgaattttaacttgaactcattcctgatgtttgataccctggttgaaaacaattcagtaaagcatcctgcctcagaatgactttcctatcatgcttcatgtgtcattccaaggtttcttcatgagtcattccaagttttctagtccataccacagtgccttgcaaaaaacaccacatgaataaagcaataaaatttgattgttaagatacagtagtggaccctacttattcagtcaattaagagtaagtttttttatgtggttattaaaacagtatgaacaattagtctaactctgcatagacagggtctagattttgttaacccaaatgtataactgcagttagcttaaattacaatttgaagtcttgtggtttttatatagctaggcactttattactcttttgaactgaaagcacactcccttataggttcatgtaactgtcctgtaataaggtgcttataaatggaacaactacacagcctagttttgccacaacctttagcatctaaaaagttttaaaagcttctaaatgtctaatataaagggagatgcttatagccacaacatctattttaccaatattgtttccattacactaccttggattttgcatgagtgagtatagtaacccaagatgccataaaaaaaaaacttgatcgttttctgacttaatcagttactgtggtttcactaaaagctaccgtggtggagtgaagtcagtcagggaaggtttgtttatgttacatttatttcaccagaactattttaatatatcaaaggggtttactatgccaaacaaaattctagggaaaaatactgctaaaaatggatgcctcatcagaacatgctgttgagtccaatgtgccataagacattttagcatgttaaatagcacttttaatagcaaaaaaaggcacatcaactgcgaagttatccttagtttgcaaatgctttttctagattaatgatttttcaatcattagggtactagacacatcagcctaaagtggcatctggaattgaatggatttactgataatgatcagtctttagtcttccctttgttatatgactttataggttatgattgatcaaatttacgttttactaatggtaagggtgagggtcatagggcaggttttgggttttctagtactgttgaaaactgcaagtattggctatttgtatacttagccataacttggtgaaaaaaaacctgagcagtgtctatgtattaatgcgttggaaagaaagctgcttgtgtttgctttgttaattgcctcaggatatttcttttaaaataagctgttttaagaggaacagaagggaaatctgctacctagtctatacacagcgtgaacctcacagggggcttctgataccctcaaacatggagaacagtaagggagcagagtggttaaggactttcaggaacttaactattctggaataaggaatgaatcaactgaccttgggccagcaggtttttaactaaattgttacttgcctttctcacccagttaatcagtctctgtacttgtttccctttttgaaacaagtgtcttggttaactaattctgttttatggttgtgctaaattcatagcaggtgccttattctttgcttttagtcaaaccattccatatcagaattttccttggtttactatagatatttggctttaagttgttgtttgtgttttttaatgtacaatgttctgataaatttgactgttaaattgctatagctagcaatcattttacatatgtaaaattgcattccctttgtatttcatgtgtaattcaccaattaagtgcagtttatattcaggttggattatgcatgtttaggtaaacgaaagctgtgtcttacttgatttattctttaaaaataaagttccctgaatatttgatgcttttcttctaaacggaaatgattttacagttatctgagtgtaccttttatagttagtagaaaatgattttaaagaatgtttagtattgtacttaaatggtatgcagaggcacagatgtaaggtttataactggaaataggtggtaagaaaaatatatagaaagcacaatgatttgaatatttttccacttaggatttcctaatctccttgtcatccaattcaagctcaagatgaagcacaattctttgatctccctttgccagttgaattttatagatcatctaatgttgagcacagtatgagaataaatattggggttgtcaacattactcagttactctttgtggtttaactctaacatttcaacaagttgtcaattaattgtatctgttgggttgtatataatgttgctcaaaataattaagtggacttccaaaaataagatttccattgtaacaggatgcattgtgatgggctttgacttacattaaagaaatgtggatagtcaa

SEQ ID NO: 187037 - DNA, 784 bp, Homo sapiens
  Payload ID: 16827
  Gene Symbol: SERP2
  Gene Name: stress-associated endoplasmic reticulum protein family member 2
  Uniprot ID: Q8N6R1
  ENST ID: ENST00000379179
  CDS Start-End: 185-382
gcctctctctggagtcggctagccggggctcggggagcggggtgcgcagggctcggggccacgccttgccacctgcagcgcccgggtgggccgcgggggcctcggcgggacgcgctcggccctgtcgcaggagctaacgcagggggaatccttgcaggtgggagcatttcagagcgcacaagccatggtggccaaacagcggatccggatggctaacgagaagcacagcaaaaacatcacccagagggggaacgtagccaaaaccctgaggccgcaagaggagaaatatcctgtgggaccatggctgttggcactgtttgtttttgttgtctgtggctcagctatctttcagatcattcagagcataaggatgggcatgtgagaaagccagggatttgacaccacctccctcccactggaggcgggaggacaacggaagcggtcagccagtttctgcgggaaacaagcaggccacacggaatagaaaaaaacgctcccccacttgttccctgatcacttcatcgtggatgtcagaccaaattgccttctcacaggacatcttggtgcatccgcgttctcaagcggaaaggacattttgcttttctgttggcaggattagtagccacgcgggtcgtccgcagcagtgctgtttttttggtttttcccttggtttcactaatgcgtgcatgtggccctctgaacgatcactggtttactttctatggatacaatctctcctccattgagaattgattttacaaataaatgtcttcgttcaacctta

SEQ ID NO: 187038 - DNA, 747 bp, Homo sapiens
  Payload ID: 16827
  Gene Symbol: SERP2
  Gene Name: stress-associated endoplasmic reticulum protein family member 2
  ENST ID: ENST00000474333
  CDS Start-End: 121-360
cgcgacactgcagggccccggctctgcgcgctgcgctccggccgctcggcgcgggaggacgtgcggtcgcgcctgcctcggtggccgcgcggggtgggagcatttcagagcgcacaagccatggtggccaaacagcggatccggatggctaacgagaagcacagcaaaaacatcacccagagggggaacgtagccaaaaccctgaggccgcaagaggagaaatatcctgtgggaccatggctgttggcactgtttgtttttgttgtctgtggctcagtttctgttttcagcttagtctacggcaacaaaataatagtacaggacccactgcagattggtgtagtaatacaagagatgtgaccagagatgagaagaaagagacccaaaaaatgatcagaagcagaaatgggagcccagaagtgcagctgaccagaagcatttcagtgtcagatcacacgcagcctcctctgtaatgagatcacagcacgtctcatcagttactggttttcattatggtgacactgaacactcatgaaaagttagcattgaaatatgttggtatctccaatttagaaagctatctttcagatcattcagagcataaggatgggcatgtgagaaagccagggatttgacaccacctccctcccactggaggcgggaggacaacggaagcggtcagccagtttctgcgggaaacaagcaggccacacggaatagaaaaaaacgctcccccacttgttccct

SEQ ID NO: 187039 - DNA, 962 bp, Homo sapiens
  Payload ID: 16827
  Gene Symbol: SERP2
  Gene Name: stress-associated endoplasmic reticulum protein family member 2
  ENST ID: ENST00000493476
  CDS Start-End: 145-399
ggtgcgcagggctcggggccacgccttgccacctgcagcgcccgggtgggccgcgggggcctcggcgggacgcgctcggccctgtcgcaggagctaacgcagggggaatccttgcaggtgggagcatttcagagcgcacaagccatggtggccaaacagcggatccggatggctaacgagaagcacagcaaaaacatcacccagagggggaacgtagccaaaaccctgaggccgcaagaggagaaatatcctgtgggaccatggctgttggcactgtttgtttttgttgtctgtggctcaggtcaaccacataaattggcctctcctggagactgccagaactttctcaaagttgtaacatccagagggagtcaccccacccccaagaccggcaactgagatgtttaaaggaactggctggccctgaaggaaagactgaggccattcatctgctctggagttcatcctcgggatctgagatgcacagcctgaagacatctcatcagccatcagctcccttaagctatctttcagatcattcagagcataaggatgggcatgtgagaaagccagggatttgacaccacctccctcccactggaggcgggaggacaacggaagcggtcagccagtttctgcgggaaacaagcaggccacacggaatagaaaaaaacgctcccccacttgttccctgatcacttcatcgtggatgtcagaccaaattgccttctcacaggacatcttggtgcatccgcgttctcaagcggaaaggacattttgcttttctgttggcaggattagtagccacgcgggtcgtccgcagcagtgctgtttttttggtttttcccttggtttcactaatgcgtgcatgtggccctctgaacgatcactggtttactttctatggatacaatctctcctccattgagaattgattttacaaataaatgtcttcgttcaac

SEQ ID NO: 187040 - DNA, 778 bp, Homo sapiens
  Payload ID: 16827
  Gene Symbol: SERP2
  Gene Name: stress-associated endoplasmic reticulum protein family member 2
  ENST ID: ENST00000616650
  CDS Start-End: 1-126
ctgtttgtttttgttgtctgtggctcaggtcaaccacataaattggcctctcctggagactgccagaactttctcaaagttgtaacatccagagggagtcaccccacccccaagaccggcaactgagatgtttaaaggaactggctggccctgaaggaaagactgaggccattcatctgctctggagttcatcctcgggatctgagatgcacagcctgaagacatctcatcagccatcagctcccttaaggtgacctgcagcctcctttgtgccctgggggcatttgggattgtgtagaggctctctctcagaagcatctttctgttattttaatgcggatagaaagctttacattctttgctaataacatctgggttttaatagcgcctccttgccctgcctgtctccggcatctctcttttttccctcttctccatctctagagaagccaccagaaaatggcatcttgcttttgactttctttgtgctgattcttttagagaacttagtgatccactttgcaatgtctcgtctcctaacatttcagcttgtttctcagagggcctgtactttgctttctaccagctctttcatcattttcattttctttaatgaaaaataagcaaaactgtatgatttctaggttgtcttcttctcctaaaggatattcttcttccggcctctcttaatctctcttctcagcaactcccttgatctcttttatcatcaatttattgtcaataaaagtggctttaggaagcctcctgttacctggca

SEQ ID NO: 187041 - DNA, 2196 bp, Homo sapiens
  Payload ID: 16828
  Gene Symbol: STIP1
  Gene Name: stress-induced phosphoprotein 1
  Uniprot ID: P31948
  ENST ID: ENST00000305218
  CDS Start-End: 148-1779
ctagaagaactcgaccagtgagcaggcgaggaaggggcgggagccggggtcccggtagcttctagtaggttccagaaggcggcgcgtgcggttgggaacgcggagcggacggattcgattcaacggggttccggaccgcgctgcgctatggagcaggtcaatgagctgaaggagaaaggcaacaaggccctgagcgtgggtaacatcgatgatgccttacagtgctactccgaagctattaagctggatccccacaaccacgtgctgtacagcaaccgttctgctgcctatgccaagaaaggagactaccagaaggcttatgaggatggctgcaagactgtcgacctaaagcctgactggggcaagggctattcacgaaaagcagcagctctagagttcttaaaccgctttgaagaagccaagcgaacctatgaggagggcttaaaacacgaggcaaataaccctcaactgaaagagggtttacagaatatggaggccaggttggcagagagaaaattcatgaaccctttcaacatgcctaatctgtatcagaagttggagagtgatcccaggacaaggacactactcagtgatcctacctaccgggagctgatagagcagctacgaaacaagccttctgacctgggcacgaaactacaagatccccggatcatgaccactctcagcgtcctccttggggtcgatctgggcagtatggatgaggaggaagagattgcaacacctccaccaccaccccctcccaaaaaggagaccaagccagagccaatggaagaagatcttccagagaataagaagcaggcactgaaagaaaaagagctggggaacgatgcctacaagaagaaagactttgacacagccttgaagcattacgacaaagccaaggagctggaccccactaacatgacttacattaccaatcaagcagcggtatactttgaaaagggcgactacaataagtgccgggagctttgtgagaaggccattgaagtggggagagaaaaccgagaagactatcgacagattgccaaagcatatgctcgaattggcaactcctacttcaaagaagaaaagtacaaggatgccatccatttctataacaagtctctggcagagcaccgaaccccagatgtgctcaagaaatgccagcaggcagagaaaatcctgaaggagcaagagcggctggcctacataaaccccgacctggctttggaggagaagaacaaaggcaacgagtgttttcagaaaggggactatccccaggccatgaagcattatacagaagccatcaaaaggaacccgaaagatgccaaattatacagcaatcgagctgcctgctacaccaaactcctggagttccagctggcactcaaggactgtgaggaatgtatccagctggagccgaccttcatcaagggttatacacggaaagccgctgcgctggaagcgatgaaggactacaccaaagccatggatgtgtaccagaaggcgctagacctggactccagctgtaaggaggcggcagacggctaccagcgctgtatgatggcgcagtacaaccggcacgacagccccgaagatgtgaagcgacgagccatggccgaccctgaggtgcagcagatcatgagtgacccagccatgcgccttatcctggaacagatgcagaaggacccccaggcactcagcgaacacttaaagaatcctgtaatagcacagaagatccagaagctgatggatgtgggtctgattgcaattcggtgatgacttgttcatccccccttcccttcgccctcatgtggaaagaggagctgggaccgcggcgagcagcacggagcggaagggagagcaggggagagaaggcctcatctctctatatttatacataaccccggggaagacacagagactcgtacctgcgctgtttgtgccgccgctgcctctgggccctcccagcacacgcatggtctcttcaccgctgccctcgagttccatgtctctttcccctgcccctagttgctgtctcggctgctctcccatagttggttttttttttatttggggcagtgggcatgttatggggaggggagggggttcttccagcctcaggtcccagctgtctcacgttgtttattctgcgtccccttctccaataaaacaagccagttgggcgtggttata

SEQ ID NO: 187042 - DNA, 2743 bp, Homo sapiens
  Payload ID: 16828
  Gene Symbol: STIP1
  Gene Name: stress-induced phosphoprotein 1
  Uniprot ID: P31948
  ENST ID: ENST00000358794
  CDS Start-End: 554-2326
gaattcccctcggccctacaggaccaaacgaccggcgcgctgagaaagggtgtgcggttccactgaggacgcccaagcgggacagccgggcccgccgcggtgagatccccggcctgtccagcccaagcccaagcgccctcgcggtcacgtggcatttccggaacattcagaacctaacagccaggaggcaggagggccgggccgaggccggagcgctggacaacgcgggtagctggcgctcgagggacaggcagctcccaccggctaggacccccatcccgatgcgcgggcgaagggctggggccctgtgccgctggcgatcccggggaccgcctggaactcgcggcactcgggagcgagagggaaagcaacccagaggccccgcagccgccggcgacacagctacagaccccgactgcagccggtactcccatatatcaggggcggggcgaaacccggccttttgaagggcagcgatttaaaccaatcagcgcaaagagttggcaaccctccgcccaattggaatcgctctcattctgaaggcggttccgacatggagtccggcagcccaatgggagaggtggaaatttccagaacgatcagaaccaatgggcgcggccagcgcggctacgattggcagtgcaaaagaccaatccgtgtcgcagaagttcgctcctccctccattcgtggagcctgagatgggtcaatgagctgaaggagaaaggcaacaaggccctgagcgtgggtaacatcgatgatgccttacagtgctactccgaagctattaagctggatccccacaaccacgtgctgtacagcaaccgttctgctgcctatgccaagaaaggagactaccagaaggcttatgaggatggctgcaagactgtcgacctaaagcctgactggggcaagggctattcacgaaaagcagcagctctagagttcttaaaccgctttgaagaagccaagcgaacctatgaggagggcttaaaacacgaggcaaataaccctcaactgaaagagggtttacagaatatggaggccaggttggcagagagaaaattcatgaaccctttcaacatgcctaatctgtatcagaagttggagagtgatcccaggacaaggacactactcagtgatcctacctaccgggagctgatagagcagctacgaaacaagccttctgacctgggcacgaaactacaagatccccggatcatgaccactctcagcgtcctccttggggtcgatctgggcagtatggatgaggaggaagagattgcaacacctccaccaccaccccctcccaaaaaggagaccaagccagagccaatggaagaagatcttccagagaataagaagcaggcactgaaagaaaaagagctggggaacgatgcctacaagaagaaagactttgacacagccttgaagcattacgacaaagccaaggagctggaccccactaacatgacttacattaccaatcaagcagcggtatactttgaaaagggcgactacaataagtgccgggagctttgtgagaaggccattgaagtggggagagaaaaccgagaagactatcgacagattgccaaagcatatgctcgaattggcaactcctacttcaaagaagaaaagtacaaggatgccatccatttctataacaagtctctggcagagcaccgaaccccagatgtgctcaagaaatgccagcaggcagagaaaatcctgaaggagcaagagcggctggcctacataaaccccgacctggctttggaggagaagaacaaaggcaacgagtgttttcagaaaggggactatccccaggccatgaagcattatacagaagccatcaaaaggaacccgaaagatgccaaattatacagcaatcgagctgcctgctacaccaaactcctggagttccagctggcactcaaggactgtgaggaatgtatccagctggagccgaccttcatcaagggttatacacggaaagccgctgcgctggaagcgatgaaggactacaccaaagccatggatgtgtaccagaaggcgctagacctggactccagctgtaaggaggcggcagacggctaccagcgctgtatgatggcgcagtacaaccggcacgacagccccgaagatgtgaagcgacgagccatggccgaccctgaggtgcagcagatcatgagtgacccagccatgcgccttatcctggaacagatgcagaaggacccccaggcactcagcgaacacttaaagaatcctgtaatagcacagaagatccagaagctgatggatgtgggtctgattgcaattcggtgatgacttgttcatccccccttcccttcgccctcatgtggaaagaggagctgggaccgcggcgagcagcacggagcggaagggagagcaggggagagaaggcctcatctctctatatttatacataaccccggggaagacacagagactcgtacctgcgctgtttgtgccgccgctgcctctgggccctcccagcacacgcatggtctcttcaccgctgccctcgagttccatgtctctttcccctgcccctagttgctgtctcggctgctctcccatagttggttttttttttatttggggcagtgggcatgttatggggaggggagggggttcttccagcctcaggtcccagctgtctcacgttgtttattctgcgtccccttctccaataaaacaagccagttgggcgtggttata

SEQ ID NO: 187043 - DNA, 738 bp, Homo sapiens
  Payload ID: 16828
  Gene Symbol: STIP1
  Gene Name: stress-induced phosphoprotein 1
  ENST ID: ENST00000536973
  CDS Start-End: 78-494
tccagaaggcggcgcgtgcggttgggaacgcggagcggacggattcgattcaacggggttccggaccgcgctgcgctatggagcaggtcaatgagctgaaggagaaaggcaacaaggccctgagcgtgggtaacatcgatgatgccttacagtgctactccgaagctattaagctggatccccacaaccacgtgctgtacagcaaccgttctgctgcctatgccaagaaaggagactaccagaaggcttatgaggatggctgcaagactgtcgacctaaagcctgactggggcaagggctattcacgaaaagcagcagctctagagttcttaaaccgctttgaagaagccaagcgaacctatgaggagggcttaaaacacgaggcaaataaccctcaactgaaagagggtttacagaatatggaggccaggttggcagtacaaccggcacgacagccccgaagatgtgaagcgacgagccatggccgaccctgaggtgcagcagatcatgagtgacccagccatgcgccttatcctggaacagatgcagaaggacccccaggcactcagcgaacacttaaagaatcctgtaatagcacagaagatccagaagctgatggatgtgggtctgattgcaattcggtgatgacttgttcatccccccttcccttcgccctcatgtggaaagaggagctgggaccgcggcgagcagcacggagcggaagggagagcaggggag

SEQ ID NO: 187044 - DNA, 772 bp, Homo sapiens
  Payload ID: 16828
  Gene Symbol: STIP1
  Gene Name: stress-induced phosphoprotein 1
  ENST ID: ENST00000543847
  CDS Start-End: 38-748
ggattcgattcaacggggttccggaccgcgctgcgctatggagcaggtcaatgagctgaaggagaaaggcaacaaggccctgagcgtgggtaacatcgatgatgccttacagtgctactccgaagctattaagctggatccccacaaccacgtgctgtacagcaaccgttctgctgcctatgccaagaaaggagactaccagaaggcttatgaggatggctgcaagactgtcgacctaaagcctgactggggcaagggctattcacgaaaagcagcagctctagagttcttaaaccgctttgaagaagccaagcgaacctatgaggagggcttaaaacacgaggcaaataaccctcaactgaaagagggtttacagaatatggaggccaggttggcagagagaaaattcatgaaccctttcaacatgcctaatctgtatcagaagttggagagtgatcccaggacaaggacactactcagtgatcctacctaccgggagctgatagagcagctacgaaacaagccttctgacctgggcacgaaactacaagatccccggatcatgaccactctcagcgtcctccttggggtcgatctgggcagtatggatgaggaggaagagattgcaacacctccaccaccaccccctcccaaaaaggagaccaagccagagccaatggaagaagatcttccagagaataagaagcaggtcttgtttttttctctcctcactgtcacctatctataaacaactagaaatctttatgttgaa

SEQ ID NO: 187045 - DNA, 877 bp, Homo sapiens
  Payload ID: 16828
  Gene Symbol: STIP1
  Gene Name: stress-induced phosphoprotein 1
  ENST ID: ENST00000540887
  CDS Start-End: 1-414
gcctgctacaccaaactcctggagttccagctggcactcaaggactgtgaggaatgtatccagctggagccgaccttcatcaagggttatacacggaaagccgctgcgctggaagcgatgaaggactacaccaaagccatggatgtgtaccagaaggcgctagacctggactccagctgtaaggaggcggcagacggctaccagcgctgtatgatggcgcagtacaaccggcacgacagccccgaagatgtgaagcgacgagccatggccgaccctgaggtgcagcagatcatgagtgacccagccatgcgccttatcctggaacagatgcagaaggacccccaggcactcagcgagtacgtagagtcagagaggcggccttgctggaaatggagaacaaaagcaggcagatgagtgcacgcggctggggggtggtatgctcagtctgcgaggaagaggaattctgtcattcttcctaaacttaaggagattggcagtgggtggcgagctggaagggctttgttagtcgtgatagcttaagcagtcatttggaaaggcccatttagctgggagaaaggtcttgactggaagctgtgtcgtgggctcaagagtaggactggcaagttctgcgaagtggagcaggcctctgcagctcggcgccccgggcctcgccaggacccctccctgccggggccttctgtagagggggttgaattggggcttgctctgagagcaagtaagactttaaaggttgtctcatttcaagtaactgcgtcttcctctgtagacacttaaagaatcctgtaatagcacagaagatccagaagctgatggatgtgggtctgattgcaattcggtgatgacttgttcatccccc

SEQ ID NO: 187046 - DNA, 1900 bp, Homo sapiens
  Payload ID: 16828
  Gene Symbol: STIP1
  Gene Name: stress-induced phosphoprotein 1
  Uniprot ID: P31948
  ENST ID: ENST00000538945
  CDS Start-End: 59-1618
ggttgggaacgcggagcggacggattcgattcaacggggttccggaccgcgctgcgctatggagcaggtcaatgagctgaaggagaaaggcaacaaggccctgagcgtgggtaacatcgatgatgccttacagtgctactccgaagctattaagctggatccccacaaccacgtgctgtacagcaaccgttctgctgcctatgccaagaaaggagactaccagaaggcttatgaggatggctgcaagactgtcgacctaaagcctgactggggcaagggcttaaaacacgaggcaaataaccctcaactgaaagagggtttacagaatatggaggccaggttggcagagagaaaattcatgaaccctttcaacatgcctaatctgtatcagaagttggagagtgatcccaggacaaggacactactcagtgatcctacctaccgggagctgatagagcagctacgaaacaagccttctgacctgggcacgaaactacaagatccccggatcatgaccactctcagcgtcctccttggggtcgatctgggcagtatggatgaggaggaagagattgcaacacctccaccaccaccccctcccaaaaaggagaccaagccagagccaatggaagaagatcttccagagaataagaagcaggcactgaaagaaaaagagctggggaacgatgcctacaagaagaaagactttgacacagccttgaagcattacgacaaagccaaggagctggaccccactaacatgacttacattaccaatcaagcagcggtatactttgaaaagggcgactacaataagtgccgggagctttgtgagaaggccattgaagtggggagagaaaaccgagaagactatcgacagattgccaaagcatatgctcgaattggcaactcctacttcaaagaagaaaagtacaaggatgccatccatttctataacaagtctctggcagagcaccgaaccccagatgtgctcaagaaatgccagcaggcagagaaaatcctgaaggagcaagagcggctggcctacataaaccccgacctggctttggaggagaagaacaaaggcaacgagtgttttcagaaaggggactatccccaggccatgaagcattatacagaagccatcaaaaggaacccgaaagatgccaaattatacagcaatcgagctgcctgctacaccaaactcctggagttccagctggcactcaaggactgtgaggaatgtatccagctggagccgaccttcatcaagggttatacacggaaagccgctgcgctggaagcgatgaaggactacaccaaagccatggatgtgtaccagaaggcgctagacctggactccagctgtaaggaggcggcagacggctaccagcgctgtatgatggcgcagtacaaccggcacgacagccccgaagatgtgaagcgacgagccatggccgaccctgaggtgcagcagatcatgagtgacccagccatgcgccttatcctggaacagatgcagaaggacccccaggcactcagcgaacacttaaagaatcctgtaatagcacagaagatccagaagctgatggatgtgggtctgattgcaattcggtgatgacttgttcatccccccttcccttcgccctcatgtggaaagaggagctgggaccgcggcgagcagcacggagcggaagggagagcaggggagagaaggcctcatctctctatatttatacataaccccggggaagacacagagactcgtacctgcgctgtttgtgccgccgctgcctctgggccctcccagcacacgcatggtctcttcaccgctgccctcgagttccatgtctctttcccctgcccctagttgctgtctcggctgctctcccatagttgg

SEQ ID NO: 187047 - DNA, 3265 bp, Homo sapiens
  Payload ID: 16829
  Gene Symbol: STRIP1
  Gene Name: striatin interacting protein 1
  Uniprot ID: Q5VSL9
  ENST ID: ENST00000369795
  CDS Start-End: 23-2536
ctgggggtgtggagcagccaagatggagccggcagtcggcggtccgggcccactgatcgtgaacaacaaacagccccagcccccgccacctccgccgccggcagccgcacagccaccacccggggcaccgcgggccgccgcgggcctcctgcctgggggcaaagcccgcgagttcaaccgcaaccagcgcaaagactcagagggctattcggagtcaccagacctggagtttgagtatgctgacacagacaagtgggctgcagagctctcggagctttacagctacacggaagggccagaattcctgatgaatcgaaaatgctttgaggaggacttccggatccatgtgacagacaagaagtggactgagctggataccaaccagcaccggacccatgccatgaggctcctggatggcttggaagtcactgccagggagaagagactcaaggtggctcgagcaattctctatgttgctcaaggcacgtttggggagtgcagctcggaggcagaggtgcagtcctggatgcgctacaacatctttctcctcctggaggtgggcacgttcaatgctttggtggagcttctgaacatggaaatagacaacagtgccgcctgcagcagtgctgtgaggaagcctgccatctccctggctgacagcacagacctcagggtcctgctcaacatcatgtacctgatagtggagaccgttcatcaggagtgtgagggtgacaaggctgagtggaggaccatgcggcagaccttcagagccgagctgggctccccgctgtacaacaatgagccatttgccatcatgctgtttgggatggtgaccaaattttgcagtggtcacgcccctcactttcccatgaagaaagttctcttgctgctctggaagacagtattgtgcacgctaggcggctttgaggagctgcagagcatgaaggctgagaagcgcagcatcctgggcctccccccgcttcctgaggacagcatcaaagtgattcgcaacatgagagcagcctctccaccagcatctgcttcagacttgattgagcagcagcagaaacggggccgccgagagcacaaggctctgataaagcaggacaacctagatgccttcaacgagcgggatccctacaaggctgatgactctcgagaagaggaagaggagaatgatgatgacaacagtctggagggggagacgtttcccctggaacgggatgaagtgatgcctcccccgctacagcacccacagactgacaggctgacttgccccaaagggctcccgtgggctcccaaggtcagagagaaagacattgagatgttccttgagtccagccgcagcaaatttataggttacactctaggcagtgacacgaacacagtggtggggctgcccaggccaatccacgaaagcatcaagactctgaaacagcacaagtacacgtcgattgcagaggtccaggcacagatggaggaggaatacctccgctcccctctctcagggggagaagaagaagttgagcaagtccctgcagaaaccctctaccaaggcttgctccccagcctgcctcagtatatgattgccctcctgaagatcctgttggctgcagcacccacctcaaaagccaaaacagactcaatcaacatcctagcggacgtcttgcctgaggagatgcccaccacagtgttgcagagcatgaagctgggggtggatgtaaaccgccacaaagaggtcattgttaaggccatttctgctgtcctgctgctgctgctcaagcactttaagttgaaccatgtctaccagtttgaatacatggcccagcacctggtgtttgccaactgcattcctttgatcctaaagttcttcaatcaaaacatcatgtcctacatcactgccaagaacagcatttctgtcctggattaccctcactgcgtggtgcatgagctgccagagctgacggcggagagtttggaagcaggtgacagtaaccaattttgctggaggaacctcttttcttgtatcaatctgcttcggatcttgaacaagctgacaaagtggaagcattcaaggacaatgatgctggtggtgttcaagtcagcccccatcttgaagcgggccctaaaggtgaaacaagccatgatgcagctctatgtgctgaagctgctcaaggtacagaccaaatacttggggcggcagtggcgaaagagcaacatgaagaccatgtctgccatctaccagaaggtgcggcatcggctgaacgacgactgggcatacggcaatgatcttgatgcccggccttgggacttccaggcagaggagtgtgcccttcgtgccaacattgaacgcttcaacgcccggcgctatgaccgggcccacagcaaccctgacttcctgccagtggacaactgcctgcagagtgtcctgggccaacgggtggacctccctgaggactttcagatgaactatgacctctggttagaaagggaggtcttctccaagcccatttcctgggaagagctgctgcagtgaggctgttggttaggggactgaaatggagagaaaagatgatctgaaggtacctgtgggactgtcctagttcattgctgcagtgctcccatcccccaccaggtggcagcacagccccactgtgtcttccgcagtctgtcctgggcttgggtgagcccagcttgacctccccttggttcccagggtcctgctccgaagcagtcatctctgcctgagatccattcttcctttacttcccccaccctcctctcttggatatggttggttttggctcatttcacaatcagcccaaggctgggaaagctggaatgggatgggaacccctccgccgtgcatctgaatttcaggggtcatgctgatgcctctcgagacatacaaatccttgctttgtcagcttgcaaaggaggagagtttaggattagggccagggccagaaagtcggtatcttggttgtgctctggggtgggggtggggtgtttctgatgttattccagcctcctgctacattatatccagaagtaattgcggaggctccttcagctgcctcagcactttgattttggacagggacaaggtaggaagagaagcttcccttaaccagaggggccatttttccttttggctttcgagggcctgtaaatatctatatataattctgtgtgtattctgtgtcatgttggggtttttaatgtgattgtgtattctgtttacattaaaaagaagcaaaaataa

SEQ ID NO: 187048 - DNA, 3125 bp, Homo sapiens
  Payload ID: 16829
  Gene Symbol: STRIP1
  Gene Name: striatin interacting protein 1
  Uniprot ID: Q5VSL9
  ENST ID: ENST00000369796
  CDS Start-End: 170-2398
attttacccagcccctgttcaagatggagttgctgtggttcacacatctctgacaaaaatacagggctattcggagtcaccagacctggagtttgagtatgctgacacagacaagtgggctgcagagctctcggagctttacagctacacggaagggccagaattcctgatgaatcgaaaatgctttgaggaggacttccggatccatgtgacagacaagaagtggactgagctggataccaaccagcaccggacccatgccatgaggctcctggatggcttggaagtcactgccagggagaagagactcaaggtggctcgagcaattctctatgttgctcaaggcacgtttggggagtgcagctcggaggcagaggtgcagtcctggatgcgctacaacatctttctcctcctggaggtgggcacgttcaatgctttggtggagcttctgaacatggaaatagacaacagtgccgcctgcagcagtgctgtgaggaagcctgccatctccctggctgacagcacagacctcagggtcctgctcaacatcatgtacctgatagtggagaccgttcatcaggagtgtgagggtgacaaggctgagtggaggaccatgcggcagaccttcagagccgagctgggctccccgctgtacaacaatgagccatttgccatcatgctgtttgggatggtgaccaaattttgcagtggtcacgcccctcactttcccatgaagaaagttctcttgctgctctggaagacagtattgtgcacgctaggcggctttgaggagctgcagagcatgaaggctgagaagcgcagcatcctgggcctccccccgcttcctgaggacagcatcaaagtgattcgcaacatgagagcagcctctccaccagcatctgcttcagacttgattgagcagcagcagaaacggggccgccgagagcacaaggctctgataaagcaggacaacctagatgccttcaacgagcgggatccctacaaggctgatgactctcgagaagaggaagaggagaatgatgatgacaacagtctggagggggagacgtttcccctggaacgggatgaagtgatgcctcccccgctacagcacccacagactgacaggctgacttgccccaaagggctcccgtgggctcccaaggtcagagagaaagacattgagatgttccttgagtccagccgcagcaaatttataggttacactctaggcagtgacacgaacacagtggtggggctgcccaggccaatccacgaaagcatcaagactctgaaacagcacaagtacacgtcgattgcagaggtccaggcacagatggaggaggaatacctccgctcccctctctcagggggagaagaagaagttgagcaagtccctgcagaaaccctctaccaaggcttgctccccagcctgcctcagtatatgattgccctcctgaagatcctgttggctgcagcacccacctcaaaagccaaaacagactcaatcaacatcctagcggacgtcttgcctgaggagatgcccaccacagtgttgcagagcatgaagctgggggtggatgtaaaccgccacaaagaggtcattgttaaggccatttctgctgtcctgctgctgctgctcaagcactttaagttgaaccatgtctaccagtttgaatacatggcccagcacctggtgtttgccaactgcattcctttgatcctaaagttcttcaatcaaaacatcatgtcctacatcactgccaagaacagcatttctgtcctggattaccctcactgcgtggtgcatgagctgccagagctgacggcggagagtttggaagcaggtgacagtaaccaattttgctggaggaacctcttttcttgtatcaatctgcttcggatcttgaacaagctgacaaagtggaagcattcaaggacaatgatgctggtggtgttcaagtcagcccccatcttgaagcgggccctaaaggtgaaacaagccatgatgcagctctatgtgctgaagctgctcaaggtacagaccaaatacttggggcggcagtggcgaaagagcaacatgaagaccatgtctgccatctaccagaaggtgcggcatcggctgaacgacgactgggcatacggcaatgatcttgatgcccggccttgggacttccaggcagaggagtgtgcccttcgtgccaacattgaacgcttcaacgcccggcgctatgaccgggcccacagcaaccctgacttcctgccagtggacaactgcctgcagagtgtcctgggccaacgggtggacctccctgaggactttcagatgaactatgacctctggttagaaagggaggtcttctccaagcccatttcctgggaagagctgctgcagtgaggctgttggttaggggactgaaatggagagaaaagatgatctgaaggtacctgtgggactgtcctagttcattgctgcagtgctcccatcccccaccaggtggcagcacagccccactgtgtcttccgcagtctgtcctgggcttgggtgagcccagcttgacctccccttggttcccagggtcctgctccgaagcagtcatctctgcctgagatccattcttcctttacttcccccaccctcctctcttggatatggttggttttggctcatttcacaatcagcccaaggctgggaaagctggaatgggatgggaacccctccgccgtgcatctgaatttcaggggtcatgctgatgcctctcgagacatacaaatccttgctttgtcagcttgcaaaggaggagagtttaggattagggccagggccagaaagtcggtatcttggttgtgctctggggtgggggtggggtgtttctgatgttattccagcctcctgctacattatatccagaagtaattgcggaggctccttcagctgcctcagcactttgattttggacagggacaaggtaggaagagaagcttcccttaaccagaggggccatttttccttttggctttcgagggcctgtaaatatctatatataattctgtgtgtattctgtgtcatgttggggtttttaatgtgattgtgtattctgtttacattaaaaagaagcaaaaat

SEQ ID NO: 187049 - DNA, 3363 bp, Homo sapiens
  Payload ID: 16829
  Gene Symbol: STRIP1
  Gene Name: striatin interacting protein 1
  Uniprot ID: Q5VSL9
  ENST ID: ENST00000485775
  CDS Start-End: 7-645
gccaagatggagccggcagtcggcggtccgggcccactgatcgtgaacaacaaacagccccagcccccgccacctccgccgccggcagccgcacagccaccacccggggcaccgcgggccgccgcgggcctcctgcctgggggcaaagcccgcgagttcaaccgcaaccagcgcaaagactcagagggctattcggagtcaccagacctggagtttgagtatgctgacacagacaagtgggctgcagagctctcggagctttacagctacacggaagggccagaattcctgatgaatcgaaaatgctttgaggaggacttccggatccatgtgacagacaagaagtggactgagctggataccaaccagcaccggacccatgccatgaggctcctggatggcttggaagtcactgccagggagaagagactcaaggtggctcgagcaattctctatgttgctcaaggcacgtttggggagtgcagctcggaggcagaggtgcagtcctggatgcgctacaacatctttctcctcctggaggtgggcacgttcaatgctttggtggagcttctgaacatggaaatagaacactgctgtgttcgccctgcagtttccgccttggcaggaggccaggcacaagactgacatatgggctcaaccagtgcctggccttgcctgtgtcacctttgtccagtggacagcaacagtgccgcctgcagcagtgctgtgaggaagcctgccatctccctggctgacagcacagacctcagggtcctgctcaacatcatgtacctgatagtggagaccgttcatcaggagtgtgagggtgacaaggctgagtggaggaccatgcggcagaccttcagagccgagctgggctccccgctgtacaacaatgagccatttgccatcatgctgtttgggatggtgaccaaattttgcagtggtcacgcccctcactttcccatgaagaaagttctcttgctgctctggaagacagtattgtgcacgctaggcggctttgaggagctgcagagcatgaaggctgagaagcgcagcatcctgggcctccccccgcttcctgaggacagcatcaaagtgattcgcaacatgagagcagcctctccaccagcatctgcttcagacttgattgagcagcagcagaaacggggccgccgagagcacaaggctctgataaagcaggacaacctagatgccttcaacgagcgggatccctacaaggctgatgactctcgagaagaggaagaggagaatgatgatgacaacagtctggagggggagacgtttcccctggaacgggatgaagtgatgcctcccccgctacagcacccacagactgacaggctgacttgccccaaagggctcccgtgggctcccaaggtcagagagaaagacattgagatgttccttgagtccagccgcagcaaatttataggttacactctaggcagtgacacgaacacagtggtggggctgcccaggccaatccacgaaagcatcaagactctgaaacagcacaagtacacgtcgattgcagaggtccaggcacagatggaggaggaatacctccgctcccctctctcagggggagaagaagaagttgagcaagtccctgcagaaaccctctaccaaggcttgctccccagcctgcctcagtatatgattgccctcctgaagatcctgttggctgcagcacccacctcaaaagccaaaacagactcaatcaacatcctagcggacgtcttgcctgaggagatgcccaccacagtgttgcagagcatgaagctgggggtggatgtaaaccgccacaaagaggtcattgttaaggccatttctgctgtcctgctgctgctgctcaagcactttaagttgaaccatgtctaccagtttgaatacatggcccagcacctggtgtttgccaactgcattcctttgatcctaaagttcttcaatcaaaacatcatgtcctacatcactgccaagaacagcatttctgtcctggattaccctcactgcgtggtgcatgagctgccagagctgacggcggagagtttggaagcaggtgacagtaaccaattttgctggaggaacctcttttcttgtatcaatctgcttcggatcttgaacaagctgacaaagtggaagcattcaaggacaatgatgctggtggtgttcaagtcagcccccatcttgaagcgggccctaaaggtgaaacaagccatgatgcagctctatgtgctgaagctgctcaaggtacagaccaaatacttggggcggcagtggcgaaagagcaacatgaagaccatgtctgccatctaccagaaggtgcggcatcggctgaacgacgactgggcatacggcaatgatcttgatgcccggccttgggacttccaggcagaggagtgtgcccttcgtgccaacattgaacgcttcaacgcccggcgctatgaccgggcccacagcaaccctgacttcctgccagtggacaactgcctgcagagtgtcctgggccaacgggtggacctccctgaggactttcagatgaactatgacctctggttagaaagggaggtcttctccaagcccatttcctgggaagagctgctgcagtgaggctgttggttaggggactgaaatggagagaaaagatgatctgaaggtacctgtgggactgtcctagttcattgctgcagtgctcccatcccccaccaggtggcagcacagccccactgtgtcttccgcagtctgtcctgggcttgggtgagcccagcttgacctccccttggttcccagggtcctgctccgaagcagtcatctctgcctgagatccattcttcctttacttcccccaccctcctctcttggatatggttggttttggctcatttcacaatcagcccaaggctgggaaagctggaatgggatgggaacccctccgccgtgcatctgaatttcaggggtcatgctgatgcctctcgagacatacaaatccttgctttgtcagcttgcaaaggaggagagtttaggattagggccagggccagaaagtcggtatcttggttgtgctctggggtgggggtggggtgtttctgatgttattccagcctcctgctacattatatccagaagtaattgcggaggctccttcagctgcctcagcactttgattttggacagggacaaggtaggaagagaagcttcccttaaccagaggggccatttttccttttggctttcgagggcctgtaaatatctatatataattctgtgtgtattctgtgtcatgttggggtttttaatgtgattgtgtattctgtttacattaaaaagaagcaaaaataa

SEQ ID NO: 187050 - DNA, 5115 bp, Homo sapiens
  Payload ID: 16830
  Gene Symbol: STRIP2
  Gene Name: striatin interacting protein 2
  Uniprot ID: Q9ULQ0
  ENST ID: ENST00000249344
  CDS Start-End: 41-2545
aaagcgagctgaaccctgaggggagccgctgaccagcagcatggaggaccccgccgcgcctgggaccgggggcccgcccgcaaatggcaatggcaacggcggcggcaaagggaagcaggcggcgcccaagggccgcgaagcgttccgaagccagcggcgggagtcagagggctctgtggactgtcccactctggagtttgagtatggagatgcagatgggcatgcagccgagttgtcagaattgtatagttacactgagaacctggaattcaccaataacaggaggtgctttgaagaagatttcaagactcaagtgcagggcaaggaatggctggagttggaagaagatgcccaaaaggcctatataatgggactcttggaccggctagaggtggtcagtagggaacggcggctgaaggtggcccgggctgttctctacctggcccaaggtacttttggggaatgtgattcagaggtcgatgtgctacactggtccaggtacaactgcttcctgctgtatcagatggggaccttctccaccttcctggagctactccacatggaaattgacaacagccaggcctgtagcagtgcccttcggaaaccagctgtctccatagctgatagcacagagctcagggtgctgctgagtgttatgtacctaatggtggaaaatattcgcctggagcgagagacagacccctgtgggtggagaacagcccgggagaccttccgcactgaattaagcttctccatgcataatgaggagccttttgcccttttactcttctccatggttaccaagttctgcagtggcctggctcctcacttccccataaagaaggtcctgctcctgctctggaaggtggtcatgtttaccctcggtggatttgagcatctgcagactctcaaagtacagaagcgggcagaattgggcctgcctccactggctgaagacagtatccaggtggtgaagagcatgcgtgctgcctccccgccctcttacactcttgacctgggagagtctcagctggcacccccaccctccaagctgcgaggccgccgtggctctcgaaggcaactcctcactaagcaggacagcctggacatctacaatgaaagggatctcttcaagactgaggagcccgccacagaggaggaagaggagtctgctggtgatggagaacgaaccttggatggagagctagacctgctagagcaggaccctctggtgccacctccaccctcacaggcacccctctctgctgagcgggtggcttttcccaagggcctgccctgggccccaaaggtcagacagaaggacattgagcacttcttggagatgagcaggaacaagttcatcggattcaccctggggcaggacacagatacattggttggattacccaggcccatccatgagagtgtgaagaccctaaagcagcacaagtatatctccatcgcagatgtgcagatcaagaatgaagaggagctggagaagtgccctatgtctttgggggaagaggtggtaccagagacgccatgtgaaatcctctaccagggaatgctgtacagccttccgcagtatatgatcgctctgcttaagattctgctggctgcagctcccacctctaaggctaagacagactctatcaatatcctggcagatgtcctacctgaggagatgcccatcactgttctccagagcatgaagctgggcatcgatgtgaacaggcacaaggagattattgtaaagagtatctctaccctgcttctgctactcctcaaacacttcaaactcaaccatatctaccagtttgaatatgtatcgcaacatttggtatttgccaactgcatccccttgatcctgaagttcttcaatcaaaatatcttgtcatacatcactgccaaaaacagcatctcagtcctggattatccttgctgtaccatccaggatttgccggagcttactactgaaagtctggaagctggagacaacagccagttctgctggaggaacctcttttcctgcatcaacctcctgaggctgctcaataaactgaccaaatggaaacattcccggaccatgatgctggtagtgtttaaatcggcaccaatcttaaagcgggccctcaaggtcaaacaggccatgctgcaactttatgtcctaaagctactaaagttacagaccaagtacctggggcgccaatggaggaaaagcaacatgaaaaccatgtcagccatttaccagaaagtgcgtcaccgcatgaacgatgactgggcttacgggaatgacatcgatgccagaccatgggacttccaagcagaagaatgtaccttgagggccaacattgaggcttttaacagccgtcgctatgacagaccccaggactctgagttttcacctgtggataactgcttgcagagcgtactggggcagaggttggatctgcctgaagatttccactattcatatgagctctggctcgagagagaggtgttttcacagcccatctgttgggaggagctgctccagaatcactgactaagttcttgtcaacaagcatcaatagatagaggtcagctccaataaactgtgctctgcctaccctgtccatacaggcgctgttaccagttcagggctcttctgggggctcttgggcctaaagatggtgcaagggtgggatcctgaatcacaataaaatgatcaacttgccctggggtcagttgggtgcccagttggccttggaaatcttttggtggatcaattctagacaagctctttggtaggaccttttcctgctttagtcttggctacaaccaggctagactttgctggctctaaaagaggaaatttgttatggcatttgacccatggcattcatcacagatagtgggaggtacaagtcataaaatagggagaaagttttcttcttgctcacactggattcctaggacttatcagagatttggaaaaaccaactttgaaattaagtttgcattttaaatttcaaatttggaagcctctttctgaaatcattagctctaagattattttagagcacctgcaccttctttgtgaaggatgatgatttactattccctcaatactgcatgttatcgaaaagtgtgttgtgtaaagtgtttttttcctcattctgtaagagatctatattcaatgtgaaaattatttccttgtgtactctgtatagggcatggaatgctctgccatttttaaagagccacaaccaatatgaaataattaggtcctctctaaggatgtttcatgtttttcttaaatgactccagtcttcaaatggctgagcatactgcagaaaattatccttttcatctaattcattttttaaatgacaagttaactacaggaggctttatttattcagatggtatgtccacttgtggtcgtgatcaatatatttttctaattgaaaagtaaaagcatcacagcttaccatttttctttttctgcagtgttgattaatgatttttttcccgtttattgctagcagtttcaaagtgtcatgtggagatttagcaatactgtctctacttaaaagtattgcacatttcattgaaaatgtgagagttgatataccagcctctttatatttctcttttacagcagaatcacatacttctcaagataaacaaggtttttaaaaaagtttctgatttagttaggatcatatgcttttttttttttttttttttttttttttttttttgagacagagtttcgctcttgttgcccaagctggagtgcaatggcacgatctcggctcactgcaacctccgcctcccgggttcaagcgattctcctgcctcagcctcccaaggagctgggattacaggcacgcaccaccatgcctggctaattttttgtatttttagtagaaacagggtttcaccatgttagccaggctgacctcaaactcctgacctcaggtgatccgcccgcctccacctcccagggtgctgggattacaggtgtgagccaccatgcccagcctcttcaagcttttttactatacatgttgcccctctcccccaacttaggcactactgaattttttatgatggcaccaggtcactttatgctgggtgatatagtcaaaatttgcttatttactctgcccctcgtcaaccacagtatcatttcaaggacatgaataaaatacttgacagtatccaaaggagctataccaaaatctaacaagtaaattttggattttgcctctttgtgctttaaagtaccaggatttctgtctctatggataggtcttggagaatgttaagtaatggatgaaactttttaaaataatttgtaaattttacctaagtaggacagtagtccttactgcaatcaaaataatttactgagcacaactcctgtaaattaatctacagtcaggctagtatgattttaatatgatttgagtaaaaagataattttcaaggaaagagtaatcatccatcaatttattataaagccagatagtattcaatttatgtcaagaacaaagaaattgcccttttaaaagcatgtacgtgaatgctttttgaggcacagaagtatgctaagctttaacattttgtatttatttacaacccttttctaagggaaggttacttctcagtgcagatggagaaactgaagcactaaggataaatgattagtttccaatcacatcatttttttccacagacttgctgggactagctttcaggtattgacagccagccccatatattaaggtaaccaggttgaatcttccaatttgagaacccatgtatgggttgcagtgagccgagatcatgccactgcactccatcctgggcaacaagaacgaaactccgtctcaaaaacaaagaaggatataataaagttaatatataaaccatgtatgtggttaggaataaattcaaattcaccagtctccaatggtgattacttttactacatagaaaaacattttagtgacttacagaggatttttatttgtgaatatttcagtaaagtttgtgttgattgttgataacactgttcatctactgaagcactttaataaaaataaaatgagctggaattagaaa

SEQ ID NO: 187051 - DNA, 2866 bp, Homo sapiens
  Payload ID: 16830
  Gene Symbol: STRIP2
  Gene Name: striatin interacting protein 2
  Uniprot ID: Q9ULQ0
  ENST ID: ENST00000435494
  CDS Start-End: 28-2304
ccctgaggggagccgctgaccagcagcatggaggaccccgccgcgcctgggaccgggggcccgcccgcaaatggcaatggcaacggcggcggcaaagggaagcaggcggcgcccaagggccgcgaagcgttccgaagccagcggcgggagtcagagggctctgtggactgtcccactctggagtttgagtatggagatgcagatgggcatgcagccgagttgtcagaattgtatagttacactgagaacctggaattcaccaataacaggaggtgctttgaagaagatttcaagactcaagtgcagggcaaggaatggctggagttggaagaagatgcccaaaaggcctatataatgggactcttggaccggctagaggtggtcagtagggaacggcggctgaaggtggcccgggctgttctctacctggcccaaggtacttttggggaatgtgattcagaggtcgatgtgctacactggtccaggtacaactgcttcctgctgtatcagatggggaccttctccaccttcctggagctactccacatggaaattgacaacagccaggcctgtagcagtgcccttcggaaaccagctgtctccatagctgatagcacagagctcagggtgctgctgagtgttatgtacctaatggtggaaaatattcgcctggagcgagagacagacccctgtgggtggagaacagcccgggagaccttccgcactgaattaagcttctccatgcataatgaggagccttttgcccttttactcttctccatggttaccaagttctgcagtggcctggctcctcacttccccataaagaaggtcctgctcctgctctggaaggtggtcatgtttaccctcggtggatttgagcatctgcagactctcaaagtacagaagcgggcagaattgggcctgcctccactggctgaagacagtatccaggtggtgaagagcatgcgtgctgcctccccgccctcttacactcttgacctgggagagtctcagctggcacccccaccctccaagctgcgaggccgccgtggctctcgaaggcaactcctcactaagcaggacagcctggacatctacaatgaaagggatctcttcaagactgaggagcccgccacagaggaggaagaggagtctgctggtgatggagaacgaaccttggatggagagctagacctgctagagcaggaccctctggtgccacctccaccctcacaggcacccctctctgctgagcgggtggcttttcccaagggcctgccctgggccccaaaggtcagacagaaggacattgagcacttcttggagatgagcaggaacaagttcatcggattcaccctggggcaggacacagatacattggttggattacccaggcccatccatgagagtgtgaagaccctaaagcagcacaagtatatctccatcgcagatgtgcagatcaagaatgaagaggagctggagaagtgccctatgtctttgggggaagaggtggtaccagagacgccatgtgaaatcctctaccagggaatgctgtacagccttccgcagtatatgatcgctctgcttaagattctgctggctgcagctcccacctctaaggctaagacagactctatcaatatcctggcagatgtcctacctgaggagatgcccatcactgttctccagagcatgaagctgggcatcgatgtgaacaggcacaaggagattattgtaaagagtatctctaccctgcttctgctactcctcaaacacttcaaactcaaccatatctaccagtttgaatatgtatcgcaacatttggtatttgccaactgcatccccttgatcctgaagttcttcaatcaaaatatcttgtcatacatcactgccaaaaacagcatctcagtcctggattatccttgctgtaccatccaggatttgccggagcttactactgaaagtctggaagctggagacaacagccagttctgctggaggaacctcttttcctgcatcaacctcctgaggctgctcaataaactgaccaaatggaaacattcccggaccatgatgctggtagtgtttaaatcggcaccaatcttaaagcgggccctcaaggtcaaacaggccatgctgcaactttatgtcctaaagctactaaagttacagaccaagtacctggggcgccaatggaggaaaagcaacatgaaaaccatgtcagccatttaccagaaagtgcgtcaccgcatgaacgatgactgggcttacgggaatggtgagtcttcccaaagctcttgacttcctggagtttcctggggtttagacaaaactaaataaatatttatcactcctcttttggcatgaattgttacatattttagatgaaaaaatatgtgattataggtcaggcgctgatacaccaaactttaaggttatgcctcaaattctagtatgtacccttgtcctatgtaaactatgaaaatccgttttataaaacaagtaaattgagagataattaattgcctttccaaaacattcttttaaatgacagctttctccaaaagatttaaattaaaacaactttttattattacaaagcagttagaaaaaaagatagaaaatacaagtaaacaaacattttactatattatatttatgccatatttgtactatgcagaaattgccaccattaacatcttattgtatattcctccagatctttttctatgcatatacatgcatattttatcaaaatgaaagcaagttatgtatgctattttgtaattttctcttttaacattatctctaccttttcatgtcagtacattttcatttcatctaataaagttcatattcacaa

SEQ ID NO: 187052 - DNA, 8168 bp, Homo sapiens
  Payload ID: 16831
  Gene Symbol: STRN
  Gene Name: striatin, calmodulin binding protein
  Uniprot ID: O43815
  ENST ID: ENST00000263918
  CDS Start-End: 10-2352
gcggccgccatggacgagcaggcgggtcccggcgtcttcttcagcaacaaccacccgggcgccggcggtgccaaggggctcgggcctctggcggaggctgccgcggccggcgacggggcggctgcggcgggggcggcccgagcccagtacagtctcccggggatcctgcacttcctgcagcacgagtgggcccgcttcgaggtggagagagcccagtgggaggtggagcgggcggagctgcaggcccagattgccttcctgcagggagaaaggaagggccaagaaaatttgaagaaggatcttgtgaggaggatcaaaatgttggagtatgctcttaaacaggaaagagccaaataccacaagttgaaatacgggacagaattgaatcagggagatatgaagcctccaagctatgattctgatgaaggtaatgaaacagaagtgcagccacaacaaaacagccagttaatgtggaaacaaggtcgacaactactcagacagtatctacaggaggtgggttatacagatactattctagatgtgaaatctaaacgagtgcgagctttgttgggcttttcaagtgatgtcacggacagggaagatgacaaaaatcaggactcagttgtaaatggcacagaggctgaagttaaagagacagcaatgattgcaaaatctgagttaacagattctgcctccgtgctggataatttcaaattccttgaaagtgcagctgcagatttcagtgatgaagatgaagatgatgatgttgatggaagagagaaaagcgtcattgatacttcaacaattgttaggaaaaaagcattgcctgacagcggtgaagatcgagatacaaaagaagctctaaaggagtttgacttcttggttacatcagaggaaggagacaatgaatctagaagtgcaggcgatggaacagactgggaaaaggaagaccagtgtctcatgcctgaagcctggaatgtggaccagggagtaattaccaaactcaaggaacaatacaaaaaggagagaaaggggaaaaagggggtgaagaggcccaataggtcaaaactacaagatatgcttgctaatttgagagatgttgatgaacttccttcattgcagccatctgtgggttcaccttccagacccagcagctccaggcttcctgaacatgaaattaatagggcagatgaagtggaagcattgacatttcctccttcttctggaaagtcattcatcatgggagcagatgaagcccttgaaagtgaactgggacttggagaactagcaggccttacggtggccaatgaagcagactcactaacttatgatatagcaaacaataaagatgcattgaggaagacatggaaccctaagtttacattgagaagtcactttgatggcatccgagcccttgctttccatcccattgagcctgttttgataacagcatcagaggatcacacattaaaaatgtggaatttacagaaaacagccccagccaaaaagagcacttctcttgatgtagaacctatctatacattcagagcccataaaggtccagtgctttgtgtggtaatgagcagcaatggtgagcagtgttacagtggtggtactgatggactgatccagggctggaataccactaatcccaacatcgacccctatgattcttatgatccttctgttttacgaggccctctgctaggccacacggatgcagtctggggtttggcttatagtgcagcacatcagcgtttgttgtcctgttcagcagatggcactctgcgtttatggaatacaactgaggttgctccagcactaagtgtatttaatgatactaaagaactgggaatccctgcctctgtggatctagtgagcagtgacccgagccatatggtagcatcattcagcaagggatatacaagcatttttaacatggaaacacaacaacgcattctcactttagaatccaatgtagatacaacagccaactcttcctgccaaataaatagagtcatcagtcatcctactcttccgatcagcatcactgctcatgaagacaggcacatcaaattctatgataacaatacaggcaaactgatccactcgatggtagcccacctagaagctgttacaagtttagcagttgatcccaatggcctttacttgatgtctggcagtcatgactgttcaatacgtttatggaatctagaaagtaagacgtgtatccaagaattcacagctcatcgaaaaaagtttgaagaatcgattcatgatgtagctttccacccatccaaatgctatatagccagtgctggagctgacgcactggctaaagtctttgtatgacgcaatgcatcatcttcaccttctagctgtttataagtaatcaactgcacacaagagatacagaagacgagggcaagaatcatctcgtcctgcccttttgttctgctgaaggagcacagagaacatttgttgaagtatagttttgcaattcatatactgttttctaaaactaaggtttgttcaggttgctgcaagctcagctgaatctgtgagcctgaggtctgtttcaaatttctccccaataggcgcctttatttctgaggtggttctaattcgctaggcaggcctgagcgaatacaagtttagcttgtccctgttgagtaagtagggcatgctacaatggataatttaaaagcttgatagctgggactgaatagaagaaaacgggaaacttagaccaagttctcccctgagaaatcttgttaaaacacattaagtagtcaaaatagtaatctttatcatatctgccatattaacccctttgtgtataatgaccaggcagtgttaaactgagtttttaatttgactctcctttcagctgttcacataaagcacctggcaaagcattttacctgttagggggagaaaaatgcaataatatgttaaatatattattattcagaaatgctagacaaatagtttgcaagcagatttctatattgtattacagttttgaaaacagatttggtatcattctaaagtttagctatcaagcactcaccattgtgaagaatagttgatcgactctgcttttactaacagatttaacttattcaggtttgaaattctgtttatttttaagggtaaacagggcatatctctttaataatttctattttaaaattcactttattcatgtgacatttatagtaccagagtgattatttcataccaatgaaatcttacttttcagtgactgaaaagatagaatttatttgctaataatcatttatcaacacccacctaatcatgcttcagatgatctgtgctctttcttctttgtcacgttcaagttatctgacatctaccaagaacagttcataattattaatagcccaaagagtatggttaacttcacgcagctgcttttgcagaagcactaataaaaacaaatattttgtaccctagaagtcctctattaatccctgtaagaatctcctggaaacctggatgaaagagtttaatgccaaatattggctaaaaagttctgtctttctctctccctattcctcccccattgtttaattgagatatacatgttttaatgggcagtggatcagtattgtttctggggaaatccacaccttaaaaggccaggcttccccagcccaacttacctgtgacccacctacatgtgttcaccttttgggattctgaagaccctgctatctagacctagtctcctgtcataaagacattatttctatagtggtttatgtctctcttactctttgtcccaaatgacagagaccaatctagaaattggaaataaattattaacgtccaactttccaccaaaaaacatataaataggctcttagattttaaaaatattaaatctatagatattttaaccaattaaaacaatttctacatattccattccccacattttccatcgtcataacaatgatgcttctcatgatacgtacatctactccttgaaaaagtattctggtggtggtgtggctaatgattgacaaatatttctgtaaaatttctgcctgtttgcctctagaattctgcattatacaggcaaattttctttaaagctagagacttgtgctaaatttgcctgattttcatacagatatgctgtagtaatacagctaccttttcatttcatctttgtgctttggttaacaagcaggctcaagagactgctttgtgtaattaaatgaattgacctaaacatgagctgtcaggtgaatacttaatatttccatgcagatacagaattccatattgtgttcagtaaatttcttttggttcttcacagtgaagaaagaatgtttctaacctaacatttgtagaaggatactggaaaattccttccaggaaggaaggaaggaagatgccattacttggtgtatttatgatggatgaccacaaagctattgttctaccagttattaattaccttctaagatcttcagttactgctttattaatgtcactgaaattctaaaaaccaggacattcttcccccgttcattttatgcttcatggttgaaatttttctgtcagtgagtggaaaataaccatgagatacatagactgtagcgcaaatggaactgttgaaagttccttagaaagccagtgctgtggcattggagactacggagagagtcttctctaccagcactgcatgatctcagcctagaaatgagccaaagctgtcttccaaccagagtagcatatacatgtgtctgacttttcccctagcctgttgaacattcaatgaaaattcacagaatgaacaaattcaatgtttaaacagccattgaaatgctttcatagtgcttcatttgtaaatattttgtttgaaatgtattggaatagtatgaaaattagcgggaggtttggatccctgccttattttcatatgctgtggatacatctctgggagcttgcagcacccttctcaaaactcaactgtcatatggagctcatttgctactcaaaccatagacagattatttaacaaaagtgatataatgaccttcagtatttttctattgaacaagtttaacaacttttgccattaaacaaatacttagttatgcaaaatatttcgcttttataatcattttagttatgactaaaacgggggaaattgagctgcatcactgatgatgaactttgtgagaaattttttttttaatctgactttcattccttcagtattcttgctataaatttcttttggagataatgatgaagatttatttgaaaatgtctaaaatgtatgtatattttataaatatatattatatatattgtaagaatatatataatatataaactatatatatatatatatatatatatatatatatatatatataaaccataggtgcattttactgttttgtattttcatttttggaggtagtatacacagcagataatgatgagtatgatgagtgttgtgctgtttgcttttgcagtataatatatagttctaagtgtttaaattactgtatatacaatattcattataggctagcatgcttgttttaaagactgtcattctagtgtattaaaatctgaatgtaagaaaacctggctattcaaatgtgaattgaaaaatattttattctcagtactgaactatttccattgaacattcagactttttaacaaaaacaaatatcatcaagaaggcaatagctagaaaatgagaggtgcctttaaaaaaaaaaatgcagccttacagtgaggatgaagattgagtttggggagggggtgggagggggggcacagagagagagagagagttagtgtgtgtgtgtgtgtgtgtgtgtgtgtgtgtgtgtgcatgcatgcgtgtgtgtgtgtgtgtgtgtgtttaccaatctgtgaaggtcctgatttgtgaccatcaatgtctttttaatgtatctgctcaacttctaggacttcaggggacatttcatgcgctttgtgctcttctgagcaccatatatactttccaagaattttgaatgtgaattcctagaaatttcagtagagaaaacaatagctattctttaattatagtaaagttcaggtagaaggagaaattatttgttcaccaaaattatgggatctcattaatgttggctaagtaaatgtaattttttaaaggctcactttttaatacttcatatatttccctcttacaaaacagcatgtcatgaagttcttatgtggtaaagattcaactagtaaatatttttaggttaaatacctgaactagttaaaattccacctaagaatagtcttaaaatatttaaaaagcatctctcatatctacctctttgtcattgctgccattttaactgaagcaaatctttatgacatctgaaatgatggttggatgcaattaaaaaaaaatctatgttggtgcttttctcaggctttgtcatttaagttatattgtattaagatgtcacaaatcagactgaaaggcttagaattaattttgtttttctttgaaagaattgcttaaaattaaccatcaatgtttttagcgagtggagataatgaatctttggttggtgtctgtctgtgtgatgttttcaaccaatagccaaataattattgaacttacatgaaaaagagtgctaagtataattttatttagattactttattctttgaaagtgactacaaggctattaagtacataatcattcattttatttactcagaagttgcctctccattactgttaacttgtttagtaatttatataattgcagtacttttaagtgttggacactgggattcaggttgtatacaaagtagtagctgacgaaaaatatgtatatttttgtgaaatgtatcaagccctaaagttcattttagagaaaggcccagaaaaacgtatctgtgtttaaaaacaaaggacaggtcattcgtcaatttgaatcatttttacttttgccactacaaactttttaattggcaatatccatcatccaactggatcttcatgtcagtgtcagggatgccaggttgacaaagtatttaacagatcctttcagtttttgttttgtttttttaattctaaaaaaaacaaatgttaggccaaacagatccctagatcccactcattgattctggcggtattcctaaagtggtgcttagggggtcagaattttctggatctttgctaatccaagctttagatttaatttaaccaggaccacatgcttgtcatctctctgatgcaaattttcaaaatcattttaatttagattctaatgtctgcctgggtttttaacaggctgtgaaccagtgagtgccttgttaatgtagaatgatttttcccccctgggtgggtgttagttagctcctctctgaaaatgtctcagagaatggtattttaattgacttgtagagagctgctaaatttgttattatcagcaatcagaaagtctttggtctaccacacatctccctccctactatctcttcattgtttggctgaagtttgcctcttgtgagaaaacaatacaactccccttctccacacactttttttccagcccagattaataggtatcccctaccctaatcccaactctatgatctaataccttttttaggaggaaccacttctttttaatattgaaatctgctggttactttatgttttctcaagttcagttgactagagctgaccacagggtgtcatcaattcagattcctaaataaccctttctctccacacccagtcctccagctggtgagccctgggccagattgtttgatcttcaggtattttaaattttagttacatcaattaatgtaaattaatccaaatgctaatttttgtggtgcaagaagtttcttatgtaaattcagggtatggataagctaattaagatatccatctttggtggctctaagtgtattatttgtttttaaataaagtgtacaaatatagataacatgctataggtgtctcatgaattggaatatttgtcagatttgggatctagctgtggctttacagtaatcagttaaattaacatagtctgatttggggcttttgggggaggagttgtagaggggtgcagagaaataaaaggatattagacaaagta

SEQ ID NO: 187053 - DNA, 2254 bp, Homo sapiens
  Payload ID: 16831
  Gene Symbol: STRN
  Gene Name: striatin, calmodulin binding protein
  Uniprot ID: O43815
  ENST ID: ENST00000379213
  CDS Start-End: 9-2204
cggccgccatggacgagcaggcgggtcccggcgtcttcttcagcaacaaccacccgggcgccggcggtgccaaggggctcgggcctctggcgggggcggcccgagcccagtacagtctcccggggatcctgcacttcctgcagcacgagtgggcccgcttcgaggtggagagagcccagtgggaggtggagcgggcggagctgcaggcccagattgccttcctgcagggagaaaggaagggccaagaaaatttgaagaaggatcttgtgaggaggatcaaaatgttggagtatgctcttaaacaggaaagagccaaataccacaagttgaaatacgggacagaattgaatcagggagatatgaagcctccaagctatgattctgatgaaggtaatgaaacagaagtgcagccacaacaaaacagccagttaatgtggaaacaaggtcgacaactactcagacagtatctacaggaggtgggttatacagatactattctagatgtgaaatctaaacgagtgcgagctttgttgggcttttcaagtgatgtcacggacagggaagatgacaaaaatcaggactcagttgtaaatggcacagaggctgaagttaaagagacagcaatgattgcaaaatctgagttaacagattctgcctccgtgctggataatttcaaattccttgaaagtgcagctgcagatttcagtgatgaagatgaagatgatgatgttgatggaagagagaaaagcgtcattgatacttcaacaattgttaggaaaaaagcattgcctgacagcggtgaagatcgagatacaaaagaagctctaaaggagtttgacttcttggttacatcagaggaaggagacaatgaatctagaagtgcaggcgatggaacagactgggggcccaataggtcaaaactacaagatatgcttgctaatttgagagatgttgatgaacttccttcattgcagccatctgtgggttcaccttccagacccagcagctccaggcttcctgaacatgaaattaatagggcagatgaagtggaagcattgacatttcctccttcttctggaaagtcattcatcatgggagcagatgaagcccttgaaagtgaactgggacttggagaactagcaggccttacggtggccaatgaagcagactcactaacttatgatatagcaaacaataaagatgcattgaggaagacatggaaccctaagtttacattgagaagtcactttgatggcatccgagcccttgctttccatcccattgagcctgttttgataacagcatcagaggatcacacattaaaaatgtggaatttacagaaaacagccccagccaaaaagagcacttctcttgatgtagaacctatctatacattcagagcccataaaggtccagtgctttgtgtggtaatgagcagcaatggtgagcagtgttacagtggtggtactgatggactgatccagggctggaataccactaatcccaacatcgacccctatgattcttatgatccttctgttttacgaggccctctgctaggccacacggatgcagtctggggtttggcttatagtgcagcacatcagcgtttgttgtcctgttcagcagatggcactctgcgtttatggaatacaactgaggttgctccagcactaagtgtatttaatgatactaaagaactgggaatccctgcctctgtggatctagtgagcagtgacccgagccatatggtagcatcattcagcaagggatatacaagcatttttaacatggaaacacaacaacgcattctcactttagaatccaatgtagatacaacagccaactcttcctgccaaataaatagagtcatcagtcatcctactcttccgatcagcatcactgctcatgaagacaggcacatcaaattctatgataacaatacaggcaaactgatccactcgatggtagcccacctagaagctgttacaagtttagcagttgatcccaatggcctttacttgatgtctggcagtcatgactgttcaatacgtttatggaatctagaaagtaagacgtgtatccaagaattcacagctcatcgaaaaaagtttgaagaatcgattcatgatgtagctttccacccatccaaatgctatatagccagtgctggagctgacgcactggctaaagtctttgtatgacgcaatgcatcatcttcaccttctagctgtttataagtaatcaactgcac

SEQ ID NO: 187054 - DNA, 3970 bp, Homo sapiens
  Payload ID: 16832
  Gene Symbol: STRN3
  Gene Name: striatin, calmodulin binding protein 3
  Uniprot ID: Q13033
  ENST ID: ENST00000355683
  CDS Start-End: 217-2358
aaagtgagtgagtgagacgggcagatggaggagggattgtaatggcggcagccggcagctccctgctctgacccacggcaggcacacagcaacgaccccttccccgcccctctcccggccggcctccgccccgcagccagcgcggggccaccctctccggcccttcccccagctgtcggcgtctcgccctgcgccccggccggggccccacacacaatggacgagcttgccggaggcggtggtggcggcccggggatggcggcccctccccggcagcagcagggacctggggggaacctgggcctttcgcccggggggaacggagcggcgggcggcgggggtcctccggcctccgagggagcgggtcccgcggcaggccccgagctgtcccggccgcagcagtacactatcccggggatactgcactacatccagcacgagtgggctcggttcgagatggagcgggcgcactgggaggtggaacgggccgaactgcaggcccggattgcatttctacaaggcgaaagaaaaggtcaagagaacctgaagaaggacttagtaagaagaataaagatgttagagtatgcattaaaacaagaaagggcaaaatatcacaaattaaaatatggcacggaactgaaccaaggtgacttgaaaatgccaacctttgagtcagaagaaaccaaagacacagaggctcccacagcacctcagaatagccagttaacgtggaagcaaggcagacagcttttaagacagtatcttcaggaagtaggttatacagatacaatattagatgtacggtctcagcgggtaaggtcattacttggactatctaattcagaaccaaatggatcagtagaaacaaagaatttagaacagatcctgaatggaggtgaatctcctaagcaaaagggacaagaaataaaaaggtcctctggtgatgttcttgagacgttcaatttcttagaaaatgccgatgacagtgatgaagatgaggaaaatgacatgatcgaaggcatcccagaaggaaaagacaaacatcggatgaataaacataaaataggtaatgaaggtttagctgctgacctaactgacgatcctgatactgaggaagcactgaaagaatttgattttttagtgactgctgaagatggtgaaggagctggagaagcacggagttcgggggatggcacagaatgggctgaaccaataacgtttccatctggaggaggcaagtcatttattatgggttctgatgatgttttgttaagtgtactgggccttggagaccttgcagacttgacggtaacaaatgatgcagactatagttatgatttgcctgctaataaagatgcctttcgaaagacatggaatcccaagtatacactacgtagccattttgatggagtacgggcattagcttttcatcctgtagaacctgtgctggttactgcttctgaggaccataccctgaaactttggaacctgcaaaaaacagttcctgccaaaaagagtgcctctttagatgtagagcctatctacacatttagggcccacatcggccctgttctgtcattagctattagttctaatggagaacagtgttttagtggtggtattgatgcaaccatccagtggtggaatatgccgagtcccagtgtagatccatatgatacatatgagccaaatgttctagctggcactttagttggtcatacagatgcagtttggggtcttgcttatagtggcataaaaaatcaattactgtcttgttcagcagatggcactgttaggttatggaatccacaagaaaaattgccatgtatttgcacttacaatggagataaaaagcatggaatacctacatcagttgactttataggctgtgatccagctcatatggtaacctctttcaacactggtagtgcagtaatttatgatttagaaacatcacagtcattggtgatactttcatcacaggtagattctggtttacaatctaataatcatatcaacagagtagtaagtcatcccacacttcctgttacaataactgctcatgaagatagacacatcaaattttttgacaataaaacgggtaaaatgatccattctatggtagctcacttggatgctgttacaagtctagcagtagatcctaatggaatctatttgatgtctggaagccatgactgttccatcagattatggaatttagacagcaagacatgtgtgcaagaaataacagctcacagaaagaaattggatgaatcaatttatgatgttgctttccactcgtcaaaagcatatatagctagtgcaggagctgatgctcttgccaaagtatttgtatgaatcaacaaaaacttgcatcgtaacaagatttgcttggacagaaagagggtctgcatcactgccatcagaaaggttactgatatgacactacatgtgatctgcctggtgaaggctatctggggcaggcacaaattggtggaaatcacatcttaatgtcaagctcattaagttaactgtaattactgtattttgtgggacaaagaaaaaaggactccagtatttgtggcctgtactggatgtgaactgagcgtatatctgtttttaggtgtctttaagccaatgtggagtctgatctttcaaaaaagtttttttttttctcttcttcttcttcttttttttttttttttttttttttttggactctgtgtgctgccttaggggttaggaatgtggtgctcttgttgggggaagtgagctccaagagtagctttttttcatctcttagtgatcttctgtttatcggttgaatgccacagattcccttttaaacttattttgctttaaaaaaaaaaaaaaagaaaaagaaaatttaacttaaaatattttagcattagttgcacaaaatgtttggataaaattctagtttttataagtctttttatatatttagcctgtcacaacagtgctcaagattgtattgaagtttttctgcattatacaaccctaaaacacagagatctcactgacccgttgccctgtaaccactttctttccttcttttgcctaatacagctcagctaagtccttccataaagatgctaaataactttcatcatcacataaatgtcttcataaaccaaggactattaagtgtattaaaatgaaacagtggggtttagtactccaaatgaactcttaaagaaaaaaactaatcttggcatcctatcactatgtgatattttgtacatcttactgtatttacaagtttatttatcaaggattatccatcttgctaatggcctattatttatttcactttttgttggtctttatatccttttattaatgtgctaaaggaacctgtatatctattttggaactctttgaatagtctaaaatagactaaaaatggagtattttatagtttaaattacaaaccaaggtggttccccctaagatatatatcttggtttaccatgattccaaacaaaactaacttgtttaaaaatatttggagtaaagttttatttgcattacaaataggatacaaaaatagttgaatcaggatacagaaatctgctgtgttttgactagttatccctgttttatttttttagatgtgcttaattttatggtgtaactaaagattttgtttgtgtaatgcatgattaagacaataaagtattttttctagtcttccgagaaacttttctgatcagtttgcgagttttgatgagttttgtaaggtttttgttttacaaactatgaatcagcaaatttttaagattgtaccacatagcaaacatacagctgttgaaaaataatgtatataaaatgcatataataaatattaaattgtgtacctgtatgttactgttggctacatcattttgtgttgaataataaagtgcaatactttattctccataattaaactaggaaatggagattt

SEQ ID NO: 187055 - DNA, 2799 bp, Homo sapiens
  Payload ID: 16832
  Gene Symbol: STRN3
  Gene Name: striatin, calmodulin binding protein 3
  Uniprot ID: Q13033
  ENST ID: ENST00000357479
  CDS Start-End: 198-2591
ggcagatggaggagggattgtaatggcggcagccggcagctccctgctctgacccacggcaggcacacagcaacgaccccttccccgcccctctcccggccggcctccgccccgcagccagcgcggggccaccctctccggcccttcccccagctgtcggcgtctcgccctgcgccccggccggggccccacacacaatggacgagcttgccggaggcggtggtggcggcccggggatggcggcccctccccggcagcagcagggacctggggggaacctgggcctttcgcccggggggaacggagcggcgggcggcgggggtcctccggcctccgagggagcgggtcccgcggcaggccccgagctgtcccggccgcagcagtacactatcccggggatactgcactacatccagcacgagtgggctcggttcgagatggagcgggcgcactgggaggtggaacgggccgaactgcaggcccggattgcatttctacaaggcgaaagaaaaggtcaagagaacctgaagaaggacttagtaagaagaataaagatgttagagtatgcattaaaacaagaaagggcaaaatatcacaaattaaaatatggcacggaactgaaccaaggtgacttgaaaatgccaacctttgagtcagaagaaaccaaagacacagaggctcccacagcacctcagaatagccagttaacgtggaagcaaggcagacagcttttaagacagtatcttcaggaagtaggttatacagatacaatattagatgtacggtctcagcgggtaaggtcattacttggactatctaattcagaaccaaatggatcagtagaaacaaagaatttagaacagatcctgaatggaggtgaatctcctaagcaaaagggacaagaaataaaaaggtcctctggtgatgttcttgagacgttcaatttcttagaaaatgccgatgacagtgatgaagatgaggaaaatgacatgatcgaaggcatcccagaaggaaaagacaaacatcggatgaataaacataaaataggtaatgaaggtttagctgctgacctaactgacgatcctgatactgaggaagcactgaaagaatttgattttttagtgactgctgaagatggtgaaggagctggagaagcacggagttcgggggatggcacagaatgggataaagatgacctctccccaactgctgaggtttgggatgtagaccagggactaataagtaaactgaaggaacagtacaagaaggaacgaaaggggaagaaaggggtgaagagggccaacaggacaaaactctacgacatgatagctgatctgggagatgatgagctgccccacatcccttcaggaatcattaatcagtctaggtcagcctctactagaatgactgatcatgaaggtgcaagagcagaggaagctgaaccaataacgtttccatctggaggaggcaagtcatttattatgggttctgatgatgttttgttaagtgtactgggccttggagaccttgcagacttgacggtaacaaatgatgcagactatagttatgatttgcctgctaataaagatgcctttcgaaagacatggaatcccaagtatacactacgtagccattttgatggagtacgggcattagcttttcatcctgtagaacctgtgctggttactgcttctgaggaccataccctgaaactttggaacctgcaaaaaacagttcctgccaaaaagagtgcctctttagatgtagagcctatctacacatttagggcccacatcggccctgttctgtcattagctattagttctaatggagaacagtgttttagtggtggtattgatgcaaccatccagtggtggaatatgccgagtcccagtgtagatccatatgatacatatgagccaaatgttctagctggcactttagttggtcatacagatgcagtttggggtcttgcttatagtggcataaaaaatcaattactgtcttgttcagcagatggcactgttaggttatggaatccacaagaaaaattgccatgtatttgcacttacaatggagataaaaagcatggaatacctacatcagttgactttataggctgtgatccagctcatatggtaacctctttcaacactggtagtgcagtaatttatgatttagaaacatcacagtcattggtgatactttcatcacaggtagattctggtttacaatctaataatcatatcaacagagtagtaagtcatcccacacttcctgttacaataactgctcatgaagatagacacatcaaattttttgacaataaaacgggtaaaatgatccattctatggtagctcacttggatgctgttacaagtctagcagtagatcctaatggaatctatttgatgtctggaagccatgactgttccatcagattatggaatttagacagcaagacatgtgtgcaagaaataacagctcacagaaagaaattggatgaatcaatttatgatgttgctttccactcgtcaaaagcatatatagctagtgcaggagctgatgctcttgccaaagtatttgtatgaatcaacaaaaacttgcatcgtaacaagatttgcttggacagaaagagggtctgcatcactgccatcagaaaggttactgatatgacactacatgtgatctgcctggtgaaggctatctggggcaggcacaaattggtggaaatcacatcttaatgtcaagctcattaagttaactgtaattactgtattttgtgggacaaagaaaaaa

SEQ ID NO: 187056 - DNA, 2208 bp, Homo sapiens
  Payload ID: 16832
  Gene Symbol: STRN3
  Gene Name: striatin, calmodulin binding protein 3
  ENST ID: ENST00000555358
  CDS Start-End: 135-1133
cacacagcaacgaccccttccccgcccctctcccggccggcctccgccccgcagccagcgcggggccaccctctccggcccttcccccagctgtcggcgtctcgccctgcgccccggccggggccccacacacaatggacgagcttgccggaggcggtggtggcggcccggggatggcggcccctccccggcagcagcagggacctggggggaacctgggcctttcgcccggggggaacggagcggcgggcggcgggggtcctccggcctccgagggagcgggtcccgcggcaggccccgagctgtcccggccgcagcagtacactatcccggggatactgcactacatccagcacgagtgggctcggttcgagatggagcgggcgcactgggaggtggaacgggccgaactgcaggcccggattgcatttctacaaggcgaaagaaaaggtcaagagaacctgaagaaggacttagtaagaagaataaagatgttagagtatgcattaaaacaagaaagggcaaaatatcacaaattaaaatatggcacggaactgaaccaaggtgacttgaaaatgccaacctttgagtcagaagaaaccaaagacacagaggctcccacagcacctcagaatagccagttaacgtggaagcaaggcagacagcttttaagacagtatcttcaggaagtaggttatacagatacaatattagatgtacggtctcagcgggtaaggtcattacttggactatctaattcagaaccaaatggatcagtagaaacaaagaatttagaacagatcctgaatggaggtgaatctcctaagcaaaagggacaagaaataaaaaggtcctctggtgatgttcttgagacgttcaatttcttagaaaatgccgatgacagtgatgaagatgaggaaaatgacatgatcgaaggcatcccagaaggaaaagacaaacatcggatgaataaacataaaataggtaatgaaggtttagctgctgacctaactgacgatcctgatactgaggaagcactgaaagaatttgattttttagtgactgctgaagatggtgaaggagctggagaagcacggagttcgggggatggcacagaatgggttgcctgctaataaagatgcctttcgaaagacatggaatcccaagtatacactacgtagccattttgatggagtacgggcattagcttttcatcctgtagaacctgtgctggttactgcttctgaggaccataccctgaaactttggaacctgcaaaaaacagttcctgccaaaaagagtgcctctttagatgtagagcctatctacacatttagggcccacatcggccctgttctgtcattagctattagttctaatggagaacagtgttttagtggtggtattgatgcaaccatccagtggtggaatatgccgagtcccagtgtagatccatatgatacatatgagccaaatgttctagctggcactttagttggtcatacagatgcagtttggggtcttgcttatagtggcataaaaaatcaattactgtcttgttcagcagatggcactgttaggttatggaatccacaagaaaaattgccatgtatttgcacttacaatggagataaaaagcatggaatacctacatcagttgactttataggctgtgatccagctcatatggtaacctctttcaacactggtagtgcagtaatttatgatttagaaacatcacagtcattggtgatactttcatcacaggtagattctggtttacaatctaataatcatatcaacagagtagtaagtcatcccacacttcctgttacaataactgctcatgaagatagacacatcaaattttttgacaataaaacgggtaaaatgatccattctatggtagctcacttggatgctgttacaagtctagcagtagatcctaatggaatctatttgatgtctggaagccatgactgttccatcagattatggaatttagacagcaagacatgtgtgcaagaaataacagctcacagaaagaaattggatgaatcaatttatgatgttgctttccactcgtcaaaagcatatatagctagtgcaggagctgatgctcttgccaaagtatttgtatgaatcaacaaaaacttgcatcgtaacaagatttgcttggacagaaagagggtctgcatcactgccatc

SEQ ID NO: 187057 - DNA, 567 bp, Homo sapiens
  Payload ID: 16832
  Gene Symbol: STRN3
  Gene Name: striatin, calmodulin binding protein 3
  ENST ID: ENST00000555152
  CDS Start-End: 231-567
attttaatatttctcctgttcttcaatttgtatatccactgcaacaattgctgcaaaacctgctattccaatgggggacaaatggtgcctctttagctttttggatatgtttggatccctgatcatcatatgaagaaagagaaacatctgtgttggcccggattgcatttctacaaggcgaaagaaaaggtcaagagaacctgaagaaggacttagtaagaagaataaagatgttagagtatgcattaaaacaagaaagggcaaaatatcacaaattaaaatatggcacggaactgaaccaaggtgacttgaaaatgccaacctttgagtcagaagaaaccaaagacacagaggctcccacagcacctcagaatagccagttaacgtggaagcaaggcagacagcttttaagacagtatcttcaggaagtaggttatacagatacaatattagatgtacggtctcagcgggtaaggtcattacttggactatctaattcagaaccaaatggatcagtagaaacaaagaatttagaacagatcctgaatggaggtgaatctcctaagc

SEQ ID NO: 187058 - DNA, 514 bp, Homo sapiens
  Payload ID: 16832
  Gene Symbol: STRN3
  Gene Name: striatin, calmodulin binding protein 3
  ENST ID: ENST00000556577
  CDS Start-End: 1-514
ctctggtgatgttcttgagacgttcaatttcttagaaaatgccgatgacagtgatgaagatgaggaaaatgacatgatcgaaggcatcccagaaggaaaagacaaacatcggatgaataaacataaaataggtaatgaaggtttagctgctgacctaactgacgatcctgatactgaggaagcactgaaagaatttgattttttagtgactgctgaagatggtgaaggagctggagaagcacggagttcgggggatggcacagaatgggataaagatgacctctccccaactgctgaggtttgggatgtagaccagggactaataagtaaactgaaggaacagtacaagaaggaacgaaaggggaagaaaggggtgaagactgaaccaataacgtttccatctggaggaggcaagtcatttattatgggttctgatgatgttttgttaagtgtactgggccttggagaccttgcagacttgacggtaacaaatgatgcagactatagttatgat

SEQ ID NO: 187059 - DNA, 417 bp, Homo sapiens
  Payload ID: 16832
  Gene Symbol: STRN3
  Gene Name: striatin, calmodulin binding protein 3
  ENST ID: ENST00000554991
  CDS Start-End: 1-417
ataggtaatgaaggtttagctgctgacctaactgacgatcctgatactgaggaagcactgaaagaatttgattttttagtgactgctgaagatggtgaaggagctggagaagcacggagttcgggggatggcacagaatggggggccaacaggacaaaactctacgacatgatagctgatctgggagatgatgagctgccccacatcccttcaggaatcattaatcagtctaggtcagcctctactagaatgactgatcatgaaggtgcaagagcagaggaagctgaaccaataacgtttccatctggaggaggcaagtcatttattatgggttctgatgatgttttgttaagtgtactgggccttggagaccttgcagacttgacggtaacaaatgatgcagactatagttatgat

SEQ ID NO: 187060 - DNA, 3210 bp, Homo sapiens
  Payload ID: 16833
  Gene Symbol: STRN4
  Gene Name: striatin, calmodulin binding protein 4
  Uniprot ID: Q9NRL3
  ENST ID: ENST00000263280
  CDS Start-End: 51-2312
gcgcaggcgcgcgaggcacagcgggcgcgcaggccggccccggggcctccatgatggaggagcgagcggccgccgcggtcgccgccgccgcctcctcctgccgtccgctcggctcaggcgcgggccctggccccactggggcggccccggtctccgcccctgcccccgggccgggcccggcaggtaagggaggcggcggcggaggcagccccgggcccacggcgggcccggagcccctgagcctgccggggatcctgcactttatccagcacgagtgggcgcgcttcgaagccgagaaagcccgctgggaggccgagcgcgccgagttacaggctcaggtggccttccttcagggagagaggaaagggcaggagaatctaaagacggacctggtgcggcggatcaagatgctagagtatgcgctgaagcaggaaagggccaaatatcataaactgaagtttgggacagacctgaaccagggggagaagaaagcagatgtgtcagaacaagtctccaatggccccgtggaatcggtcaccctggagaacagcccgttggtgtggaaggaggggcggcagcttctccgacagtacctggaagaggtgggctacacagacaccatcctcgacatgcggtccaagcgcgtccgttccctgctgggccgctcgctggagctcaacggggcagtggagccgagtgaaggggcccccagggctccaccaggccctgcagggctcagtggtggggagtcgctgctggtgaaacagatcgaggagcagataaagaggaacgcggcaggcaaagatggcaaagagcgcttgggcggctcagtgctggggcagatccccttcctgcagaactgcgaggacgaagacagcgacgaggacgatgagctggacagcgtgcagcacaagaagcagcgtgtgaagctcccatccaaggctctggtgcccgaaatggaagacgaggatgaggaagacgactctgaggatgctatcaatgagtttgatttcctgggctcaggagaggatggggaaggggctccagaccctcggcggtgcactgtggatgggagcccccatgagctggaaagccgtcgggtcaaactccaaggcattctggctgacctgcgggatgtggatgggctgcccccaaaagtgactggcccgcctcctggcacaccccagccccggccacatgaagacgtcttcatcatggacactatcgggggcggggaggtgagcctgggggacttggcagatctcaccgtcaccaacgacaacgacctcagctgcgatctgtctgacagcaaagatgcttttaagaagacgtggaaccccaagttcaccctgcgctcgcactacgacggcattcgttccctggccttccaccacagccagtcggctctgctcaccgcctccgaggacggcacgctcaagctctggaacctgcagaaggcggtcacggccaagaagaatgcggcgctagatgtggaacctatacatgctttccgggctcacaggggcccagtgttggctgtggctatgggcagcaacagtgaatactgctacagtggcggggcagatgcctgcatccatagttggaagattccagacctcagcatggatccctatgatggctacgacccaagcgtgctgagccacgtcctggagggccacggggacgccgtgtggggcctggccttcagtcccacctcccagcgcctggcctcctgttctgctgatggcaccgtccgcatctgggaccccagcagcagcagcccggcctgcctctgcaccttccccacagccagcgagcacggggtccccacctcagtggccttcaccagcaccgagcctgcccacatcgtggcctccttccgctctggcgacaccgtcttgtatgacatggaggttggcagtgccctcctcacgctggagtcccggggcagcagcggtccaacccagatcaaccaagtggtgagtcatccaaaccagcctctcaccatcaccgcccacgacgacaggggcatccgcttcctggacaatcggacaggtaagccggtgcactccatggttgcacacctggacgcagtcacctgcctagccgtggaccccaacggcgcattcctgatgtcaggaagccatgactgctccctgcgtctctggagcctggacaacaaaacgtgcgtgcaggagatcacggcccaccgcaagaagcacgaggaggccatccacgctgttgcctgccaccccagcaaggccctcattgccagtgctggcgctgatgccctggccaaggtcttcgtatgatgcccacctggccctgccctggccgccacgctggctggggtgtagggccgggcaggtggggctgaggggactcccagcctcgctggaggtgcagaggcctggcctctgtctgtttgccatggagcctggtggtgctaacggccctttccccaggaatccctccccaacggctgccttccccaagcatccagcctggggatgggcccctttcaggaatcacccccgaggatggcctcggggtttccccctgtgccctgacagccgctcctggtatcagagctgctttccagagggcagcacagccagggccgggtgtctttagggatcagtttttccaagactccagaaggtgccaggttctccccttgagctcctgctcccccatcccccatcctcccagacctgggcaggagctgtgctgggagaaagggtggcagccgggagcctcagagctgagccccggcctggctgcccctcccctccggccctctccactgctttccagacactaaccaaggcttccaggccagggattgcccaacactcctagggcagccctcccagcgccccatggggtcgcccatgggtagagacggctttcttgtgcccctccctggggcatggagggtggagtgggcctcgggtccccctgaactccctgtatatctgtataaataacgggattttcatggcgccgccccacccgcattatcactgtgtgatggtctcagtcagtctcctccctgtctccactctttccctctatttatttcactctcttgtttggttctaccctgcaccctcggtccccttccaggttcctgtttataagccccaacccctctgtccccatcttgtatgtgaaaacttgtctcaataaaccctttggagtaagatg

SEQ ID NO: 187061 - DNA, 3628 bp, Homo sapiens
  Payload ID: 16833
  Gene Symbol: STRN4
  Gene Name: striatin, calmodulin binding protein 4
  Uniprot ID: Q9NRL3
  ENST ID: ENST00000391910
  CDS Start-End: 452-2734
agggttaccatgacaaccaacctggccggcaatcagagaggatggggccactgctggtcgccctttctctcagagtaaaagtaattgtccaggagagtggtgtttgggtgtggaaggggtaaggctctttctctggggcgaagtgggaggaggggggcagaaagcggccccttcctcagtctcactccagcgagggggaccgtcgcgcggggcctgggtctccctcgccctcctcggggcgcgatctcccacccgccggcccccgcgcgggcacgctacccttcggtgtagacccgggtgggcgaggctcgcgctcgccgccggccccccttcctactgtcccccgccgggcgcgcgcgcggtggttgcggcgggggaggggggggggtgttggcgcggccgcgcaggcgcgcgaggcacagcgggcgcgcaggccggccccggggcctccatgatggaggagcgagcggccgccgcggtcgccgccgccgcctcctcctgccgtccgctcggctcaggcgcgggccctggccccactggggcggccccggtctccgcccctgcccccgggccgggcccggcaggtaagggaggcggcggcggaggcagccccgggcccacggcgggcccggagcccctgagcctgccggggatcctgcactttatccagcacgagtgggcgcgcttcgaagccgagaaagcccgctgggaggccgagcgcgccgagttacaggctcaggtggccttccttcagggagagaggaaagggcaggagaatctaaagacggacctggtgcggcggatcaagatgctagagtatgcgctgaagcaggaaagggccaaatatcataaactgaagtttgggacagacctgaaccagggggagaagaaagcagatgtgtcagaacaagtctccaatggccccgtggaatcggtcaccctggagaacagcccgttggtgtggaaggaggggcggcagcttctccgacagtacctggaagaggtgggctacacagacaccatcctcgacatgcggtccaagcgcgtccgttccctgctgggccgctcgctggagctcaacggggcagtggagccgagtgaaggggcccccagggctccaccaggccctgcagggctcagtggtggggagtcgctgctggtgaaacagatcgaggagcagataaagaggaacgcggcaggcaaagatggcaaagagcgcttgggcggctcagtgctggggcagatccccttcctgcagaactgcgaggacgaagacagcgacgaggacgatgagctggacagcgtgcagcacaagaagcagcgtgtgaagctcccatccaaggctctggtgcccgaaatggaagacgaggatgaggaagacgactctgaggatgctatcaatgagtttgatttcctgggctcaggagaggatggggaaggggctccagaccctcggcggtgcactgtggatgggagcccccatgagctggaaagccgtcgggtcaaactccaaggcattctggctgacctgcgggatgtggatgggctgcccccaaaagtgactggcccgcctcctggcacaccccagccccggccacatgaaggttcctttggcttctcctcagacgtcttcatcatggacactatcgggggcggggaggtgagcctgggggacttggcagatctcaccgtcaccaacgacaacgacctcagctgcgatctgtctgacagcaaagatgcttttaagaagacgtggaaccccaagttcaccctgcgctcgcactacgacggcattcgttccctggccttccaccacagccagtcggctctgctcaccgcctccgaggacggcacgctcaagctctggaacctgcagaaggcggtcacggccaagaagaatgcggcgctagatgtggaacctatacatgctttccgggctcacaggggcccagtgttggctgtggctatgggcagcaacagtgaatactgctacagtggcggggcagatgcctgcatccatagttggaagattccagacctcagcatggatccctatgatggctacgacccaagcgtgctgagccacgtcctggagggccacggggacgccgtgtggggcctggccttcagtcccacctcccagcgcctggcctcctgttctgctgatggcaccgtccgcatctgggaccccagcagcagcagcccggcctgcctctgcaccttccccacagccagcgagcacggggtccccacctcagtggccttcaccagcaccgagcctgcccacatcgtggcctccttccgctctggcgacaccgtcttgtatgacatggaggttggcagtgccctcctcacgctggagtcccggggcagcagcggtccaacccagatcaaccaagtggtgagtcatccaaaccagcctctcaccatcaccgcccacgacgacaggggcatccgcttcctggacaatcggacaggtaagccggtgcactccatggttgcacacctggacgcagtcacctgcctagccgtggaccccaacggcgcattcctgatgtcaggaagccatgactgctccctgcgtctctggagcctggacaacaaaacgtgcgtgcaggagatcacggcccaccgcaagaagcacgaggaggccatccacgctgttgcctgccaccccagcaaggccctcattgccagtgctggcgctgatgccctggccaaggtcttcgtatgatgcccacctggccctgccctggccgccacgctggctggggtgtagggccgggcaggtggggctgaggggactcccagcctcgctggaggtgcagaggcctggcctctgtctgtttgccatggagcctggtggtgctaacggccctttccccaggaatccctccccaacggctgccttccccaagcatccagcctggggatgggcccctttcaggaatcacccccgaggatggcctcggggtttccccctgtgccctgacagccgctcctggtatcagagctgctttccagagggcagcacagccagggccgggtgtctttagggatcagtttttccaagactccagaaggtgccaggttctccccttgagctcctgctcccccatcccccatcctcccagacctgggcaggagctgtgctgggagaaagggtggcagccgggagcctcagagctgagccccggcctggctgcccctcccctccggccctctccactgctttccagacactaaccaaggcttccaggccagggattgcccaacactcctagggcagccctcccagcgccccatggggtcgcccatgggtagagacggctttcttgtgcccctccctggggcatggagggtggagtgggcctcgggtccccctgaactccctgtatatctgtataaataacgggattttcatggcgccgccccacccgcattatcactgtgtgatggtctcagtcagtctcctccctgtctccactctttccctctatttatttcactctcttgtttggttctaccctgcaccctcggtccccttccaggttcctgtttataagccccaacccctctgtccccatcttgtatgtgaaaacttgtctcaataaaccctttggagtaa

SEQ ID NO: 187062 - DNA, 2608 bp, Homo sapiens
  Payload ID: 16833
  Gene Symbol: STRN4
  Gene Name: striatin, calmodulin binding protein 4
  ENST ID: ENST00000539396
  CDS Start-End: 370-2274
accttagcaaccttctcctggtgcagagtcctaagaggtttggggctccataaccacaaaggtggaagcgaggggaaggctgctccccaccacctcgcccccaccgctggggaagggttaccatgacaaccaacctggccggcaatcagagaggatggggccactgctggtcgccctttctctcagagtaaaagtaattgtccaggagagtggtgtttgggtgtggaagggcacgagtgggcgcgcttcgaagccgagaaagcccgctgggaggccgagcgcgccgagttacaggctcaggtggccttccttcagggagagaggaaagggcaggagaatctaaagacggacctggtgcggcggatcaagatgctagagtatgcgctgaagcaggaaagggccaaatatcataaactgaagtttgggacagacctgaaccagggggagaagaaagcagatgtgtcagaacaagtctccaatggccccgtggaatcggtcaccctggagaacagcccgttggtgtggaaggaggggcggcagcttctccgacagtacctggaagaggtgggctacacagacaccatcctcgacatgcggtccaagcgcgtccgttccctgctgggccgctcgctggagctcaacggggcagtggagccgagtgaaggggcccccagggctccaccaggccctgcagggctcagtggtggggagtcgctgctggtgaaacagatcgaggagcagataaagaggaacgcggcaggcaaagatggcaaagagcgcttgggcggctcagtgctggggcagatccccttcctgcagaactgcgaggacgaagacagcgacgaggacgatgagctggacagcgtgcagcacaagaagcagcgtgtgaagctcccatccaaggctctggtgcccgaaatggaagacgaggatgaggaagacgactctgaggatgctatcaatgagtttgatttcctgggctcaggagaggatggggaaggggctccagaccctcggcggtgcactgtggatgggagcccccatgagctggaaagccgtcgggtcaaactccaaggcattctggctgacctgcgggatgtggatgggctgcccccaaaagtgactggcccgcctcctggcacaccccagccccggccacatgaagacgtcttcatcatggacactatcgggggcggggaggtgagcctgggggacttggcagatctcaccgtcaccaacgacaacgacctcagctgcgatctgtctgacagcaaagatgcttttaagaagacgtggaaccccaagttcaccctgcgctcgcactacgacggcattcgttccctggccttccaccacagccagtcggctctgctcaccgcctccgaggacggcacgctcaagctctggaacctgcagaaggcggtcacggccaagaagaatgcggcgctagatgtggaacctatacatgctttccgggctcacaggggcccagtgttggctgtggctatgggcagcaacagtgaatactgctacagtggcggggcagatgcctgcatccatagttggaagattccagacctcagcatggatccctatgatggctacgacccaagcgtgctgagccacgtcctggagggccacggggacgccgtgtggggcctggccttcagtcccacctcccagcgcctggcctcctgttctgctgatggcaccgtccgcatctgggaccccagcagcagcagcccggcctgcctctgcaccttccccacagccagcgagcacggggtccccacctcagtggccttcaccagcaccgagcctgcccacatcgtggcctccttccgctctggcgacaccgtcttgtatgacatggaggttggcagtgccctcctcacgctggagtcccggggcagcagcggtccaacccagatcaaccaagtggtgagtcatccaaaccagcctctcaccatcaccgcccacgacgacaggggcatccgcttcctggacaatcggacaggtaagccggtgcactccatggttgcacacctggacgcagtcacctgcctagccgtggaccccaacggcgcattcctgatgtcaggaagccatgactgctccctgcgtctctggagcctggacaacaaaacgtgcgtgcaggagatcacggcccaccgcaagaagcacgaggaggccatccacgctgttgcctgccaccccagcaaggccctcattgccagtgctggcgctgatgccctggccaaggtcttcgtatgatgcccacctggccctgccctggccgccacgctggctggggtgtagggccgggcaggtggggctgaggggactcccagcctcgctggaggtgcagaggcctggcctctgtctgtttgccatggagcctggtggtgctaacggccctttccccaggaatccctccccaacggctgccttccccaagcatccagcctggggatgggcccctttcaggaatcacccccgaggatggcctcggggtttccccctgtgccctgacagccgctcctggtatcagagctgctttccagagggcagcacagccagggccgggtgtctttagggatcagttttt

SEQ ID NO: 187063 - DNA, 560 bp, Homo sapiens
  Payload ID: 16833
  Gene Symbol: STRN4
  Gene Name: striatin, calmodulin binding protein 4
  ENST ID: ENST00000596012
  CDS Start-End: 342-560
ataaccacaaaggtggaagcgaggggaaggctgctccccaccacctcgcccccaccgctggggaagggttaccatgacaaccaacctggccggcaatcagagaggatggggccactgctggtcgccctttctctcagagtaaaaacgaagtctggctctgtcgcccaggctggagtgcagtggcacgatcttggcccactgcaatctccacttcccaggttcaagcgattctcctgcctcagcctcccgagtagctgggactacaggctcaggtggccttccttcagggagagaggaaagggcaggagaatctaaagacggacctggtgcggcggatcaagatgctagagtatgcgctgaagcaggaaagggccaaatatcataaactgaagtttgggacagacctgaaccagggggagaagaaagcagatgtgtcagaacaagtctccaatggccccgtggaatcggtcaccctggagaacagcccgttggtgtggaaggaggggcggcagcttctccgacagtacctggaagaggtgggctacacagacaccatcctc

SEQ ID NO: 187064 - DNA, 570 bp, Homo sapiens
  Payload ID: 16833
  Gene Symbol: STRN4
  Gene Name: striatin, calmodulin binding protein 4
  ENST ID: ENST00000597063
  CDS Start-End: 227-570
agcacgctggccgcggggctcctgagagaggcgactcgagccctggaggggaggctaagagaactcgggaaagggagccgagccgagccacccactcttgtccctaagctccagaagtagcttcccacgcctcccagagacagatgctctggctcaggtggccttccttcagggagagaggaaagggcaggagaatctaaagacggacctggtgcggcggatcaagatgctagagtatgcgctgaagcaggaaagggccaaatatcataaactgaagtttgggacagacctgaaccagggggagaagaaagcagatgtgtcagaacaagtctccaatggccccgtggaatcggtcaccctggagaacagcccgttggtgtggaaggaggggcggcagcttctccgacagtacctggaagaggtgggctacacagacaccatcctcgacatgcggtccaagcgcgtccgttccctgctgggccgctcgctggagctcaacggggcagtggagccgagtgaaggggcccccagggctccaccaggccctgcagggctcagtggtggggagtc

SEQ ID NO: 187065 - DNA, 951 bp, Homo sapiens
  Payload ID: 16833
  Gene Symbol: STRN4
  Gene Name: striatin, calmodulin binding protein 4
  ENST ID: ENST00000594287
  CDS Start-End: 1-951
tggatgggctgcccccaaaagtgactggcccgcctcctggcacaccccagccccggccacatgaagctgtgattcttcatcttgtcctctccccgtctctctctcttgctctttatctctttctctgcctctctctgtcattctctctctccctggccctctctgcccctccctcccctccccctaccaggttcctttggcttctcctcagacgtcttcatcatggacactatcgggggcggggaggtgagcctgggggacttggcagatctcaccgtcaccaacgacaacgacctcagctgcgatatgcttttaagaagacgtggaaccccaagttcaccctgcgctcgcactacgacggcattcgttccctggccttccaccacagccagtcggctctgctcaccgcctccgaggacggcacgctcaagctctggaacctgcagaaggcggtcacggccaagaagaatgcggcgctagatgtggaacctatacatgctttccgggctcacaggggcccagtgttggctgtggctatgggcagcaacagtgaatactgctacagtggcggggcagatgcctgcatccatagttggaagattccagacctcagcatggatccctatgatggctacgacccaagcgtgctgagccacgtcctggagggccacggggacgccgtgtggggcctggccttcagtcccacctcccagcgcctggcctcctgttctgctgatggcaccgtccgcatctgggaccccagcagcagcagcccggcctgcctctgcaccttccccacagccagcgagcacggggtccccacctcagtggccttcaccagcaccgagcctgcccacatcgtggcctccttccgctctggcgacaccgtcttgtatgacatggaggttggcagtgccctcctcacgctggagtcccggggcagcagcggtc

SEQ ID NO: 187066 - DNA, 675 bp, Homo sapiens
  Payload ID: 16833
  Gene Symbol: STRN4
  Gene Name: striatin, calmodulin binding protein 4
  ENST ID: ENST00000593979
  CDS Start-End: 258-675
ataaccacaaaggtggaagcgaggggaaggctgctccccaccacctcgcccccaccgctggggaagggttaccatgacaaccaacctggccggcaatcagagaggatggggccactgctggtcgccctttctctcagagtaaaagtaattgtccaggagagtggtgtttgggtgtggaaggggctcaggtggccttccttcagggagagaggaaagggcaggagaatctaaagacggacctggtgcggcggatcaagatgctagagtatgcgctgaagcaggaaagggccaaatatcataaactgaagtttgggacagacctgaaccagggggagaagaaagcagatgtgtcagaacaagtctccaatggccccgtggaatcggtcaccctggagaacagcccgttggtgtggaaggaggggcggcagcttctccgacagtacctggaagaggtgggctacacagacaccatcctcgacatgcggtccaagcgcgtccgttccctgctgggccgctcgctggagctcaacggggcagtggagccgagtgaaggggcccccagggctccaccaggccctgcagggctcagtggtggggagtcgctgctggtgaaacagatcgaggagcagataaagaggaacgcggcaggcaaagatggcaaagagcgcttgggcg

SEQ ID NO: 187067 - DNA, 913 bp, Homo sapiens
  Payload ID: 16833
  Gene Symbol: STRN4
  Gene Name: striatin, calmodulin binding protein 4
  ENST ID: ENST00000594704
  CDS Start-End: 1-542
cggtcgccgccgccgcctcctcctgccgtccgctcggctcaggcgcgggccctggccccactggggcggccccggtctccgcccctgcccccgggccgggcccggcaggtaagggaggcggcggcggaggcagccccgggcccacggcgggcccggagcccctgagcctgccggggatcctgcactttatccagcacgagtgggcgcgcttcgaagccgagaaagcccgctgggaggccgagcgcgccgagttacaggctcaggtggccttccttcagggagagaggaaagggcaggagaatctaaagacggacctggtgcggcggatcaagatgctagagtatgcgctgaagcaggaaagggccaaatatcataaactgaagtttgggacagacctgaaccagggggagaagaaagcagatgtgtcagaacaagtctccaatggccccgtggaatcggtcaccctggagaacagcccgttggtgtggaaggaggggcggcagcttctccgacatccagtcccagctggcttcagtttttaaattgcagaagtaataagtgctcatttgtagaagtacctggaagaggtgggctacacagacaccatcctcgacatgcggtccaagcgcgtccgttccctgctgggccgctcgctggagctcaacggggcagtggagccgagtgaaggggcccccagggctccaccaggccctgcagggctcagtggtggggagtcgctgctggtgaaacagatcgaggagcagataaagaggaacgcggcaggcaaagatggcaaagagcgcttgggcggctcagtgctggggcagatccccttcctgcagaactgcgaggacgaagacagcgacgaggacgatgagctggacagcgtgcagcacaagaagcagcgtgtgaa

SEQ ID NO: 187068 - DNA, 582 bp, Homo sapiens
  Payload ID: 16833
  Gene Symbol: STRN4
  Gene Name: striatin, calmodulin binding protein 4
  ENST ID: ENST00000597021
  CDS Start-End: 274-582
gtgcttggcaggaacccggggtcgtgtctgtggcacatttctctcacaccctgggcggaatgcagtgggacggctggtccccacagcgggcttggcttgtaaagcttttctattggagcaggagccgagccgagccacccactcttgtccctaagctccagaagtagcttcccacgcctcccagagacagatgctctggctcaggtggccttccttcagggagagaggaaagggcaggagaatctaaagacggacctggtgcggcggatcaagatgctagagtatgcgctgaagcaggaaagggccaaatatcataaactgaagtttgggacagacctgaaccagggggagaagaaagcagatgtgtcagaacaagtctccaatggccccgtggaatcggtcaccctggagaacagcccgttggtgtggaaggaggggcggcagcttctccgacagtacctggaagaggtgggctacacagacaccatcctcgacatgcggtccaagcgcgtccgttccctgctgggccgctcgctggagctcaacggggcagtggagccgagtgaaggggcccccagggct

SEQ ID NO: 187069 - DNA, 788 bp, Homo sapiens
  Payload ID: 16833
  Gene Symbol: STRN4
  Gene Name: striatin, calmodulin binding protein 4
  ENST ID: ENST00000600615
  CDS Start-End: 1-595
ccagcgcctggcctcctgttctgctgatggcaccgtccgcatctgggaccccagcagcagcagcccggcctgcctctgcaccttccccacagccagcgagcacggggtccccacctcagtggccttcaccagcaccgagcctgcccacatcgtggcctccttccgctctggcgacaccgtcttgtatgacatggaggttggcagtgccctcctcacgctggagtcccggggcagcagcggtccaacccagatcaaccaagtggtgagtcatccaaaccagcctctcaccatcaccgcccacgacgacaggggcatccgcttcctggacaatcggacaggtaagccggtgcactccatggttgcacacctggacgcagtcacctgcctagccgtggaccccaacggcgcattcctgatgtcaggaagccatgactgctccctgcgtctctggagcctggacaacaaaacgtgcgtgcaggagatcacggcccaccgcaagaagcacgaggaggccatccacgctgttgcctgccaccccagcaaggccctcattgccagtgctggcgctgatgccctggccaaggtcttcgtatgatgcccacctggccctgccctggccgccacgctggctggggtgtagggccgggcaggtggggctgaggtgagggcagaaaccccgcattctgagtctctgcacgcccatgcctagtactgccaggtgtgctgagccccgcagtccagtcaggggcgtcctgtgagaatcactgggggagccctgggcatgcagg

SEQ ID NO: 187070 - DNA, 1267 bp, Homo sapiens
  Payload ID: 16833
  Gene Symbol: STRN4
  Gene Name: striatin, calmodulin binding protein 4
  ENST ID: ENST00000600358
  CDS Start-End: 1-950
cagaacaagtctccaatggccccgtggaatcggtcaccctggagaacagcccgttggtgtggaaggaggggcggcagcttctccgacagtacctggaagaggtgggctacacagacaccatcctcgacatgcggtccaagcgcgtccgttccctgctgggccgctcgctggagctcaacggggcagtggagccgagtgaaggggcccccagggctccaccaggccctgcagggctcagtggtggggagtcgctgctggtgaaacagatcgaggagcagataaagaggaacgcggcaggcaaagatggcaaagagcgcttgggcggctcagtgctggggcagatccccttcctgcagaactgcgaggacgaagacagcgacgaggacgatgagctggacagcgtgcagcacaagaagcagcgtgtgaagctcccatccaaggctctggtgcccgaaatggaagacgaggatgaggaagacgactctgaggatgctatcaatgagtttgatttcctgggctcaggagaggatggggaaggggctccagaccctcggcggtgcactgtggatgggagcccccatgagctggaaagccgtcgggtcaaactccaaggcattctggctgacctgcgggatgtggatgggctgcccccaaaagtgactggcccgcctcctggcacaccccagccccggccacatgaagctgtgattcttcatcttgtcctctccccgtctctctctcttgctctttatctctttctctgcctctctctgtcattctctctctccctggccctctctgcccctccctcccctccccctaccaggttcctttggcttctcctcagacgtcttcatcatggacactatcgggggcggggaggtgagcctgggggacttggcagatctcaccgtcaccaacgacaacgacctcagctgcgatctgtctgacagcaaagatgcttttaagaagacgtggaaccccaagttcaccctgcgctcgcactacgacggcattcgttccctggccttccaccacagccagtcggctctgctcaccgcctccgaggacggcacgctcaagctctggaacctgcagaaggcggtcacggccaagaagaatgcggcgctagatgtggaacctatacatgctttccgggctcacaggggcccagtgttggctgtggctatgggcagcaacagtgaatactgctacagtggcggggcagatgcctgcatccatagttggaagattccagacctcagca

SEQ ID NO: 187071 - DNA, 1551 bp, Homo sapiens
  Payload ID: 16833
  Gene Symbol: STRN4
  Gene Name: striatin, calmodulin binding protein 4
  Uniprot ID: Q9NRL3
  ENST ID: ENST00000435164
  CDS Start-End: 298-1071
aacctggccggcaatcagagaggatggggccactgctggtcgccctttctctcagagtaaaagtaattgtccaggagagtggtgtttgggtgtggaagggacgaagtctggctctgtcgcccaggctggagtgcagtggcacgatcttggcccactgcaatctccacttcccaggttcaagcgattctcctgcctcagcctcccgagtagctgggactacaggctcaggtggccttccttcagggagagaggaaagggcaggagaatctaaagacggacctggtgcggcggatcaagatgctagagtatgcgctgaagcaggaaagggccaaatatcataaactgaagtttgggacagacctgaaccagggggagaagaaagcagatgtgtcagaacaagtctccaatggccccgtggaatcggtcaccctggagaacagcccgttggtgtggaaggaggggcggcagcttctccgacagtacctggaagaggtgggctacacagacaccatcctcgacatgcggtccaagcgcgtccgttccctgctgggccgctcgctggagctcaacggggcagtggagccgagtgaaggggcccccagggctccaccaggccctgcagggctcagtggtggggagtcgctgctggtgaaacagatcgaggagcagataaagaggaacgcggcaggcaaagatggcaaagagcgcttgggcggctcagtgctggggcagatccccttcctgcagaactgcgaggacgaagacagcgacgaggacgatgagctggacagcgtgcagcacaagaagcagcgtgtgaagctcccatccaaggctctggtgcccgaaatggaagacgaggatgaggaagacgactctgaggatgctatcaatgagtttgatttcctgggctcaggagaggatggggaaggggctccagaccctcggcggtgcactgtggatgggagcccccatgagctggggccagagcttcacagccccacagagtggcagggggccctcagtgtggggaaggcgtcacctatgccagactgggttggaactgctgggtgactccggccctatgcctcgaccctgcagaaagccgtcgggtcaaactccaaggcattctggctgacctgcgggatgtggatgggctgcccccaaaagtgactggcccgcctcctggcacaccccagccccggccacatgaaggttcctttggcttctcctcagacgtcttcatcatggacactatcgggggcggggaggtgagcctgggggacttggcagatctcaccgtcaccaacgacaacgacctcagctgcgatctgtctgacagcaaagatgcttttaagaagacgtggaaccccaagttcaccctgcgctcgcactacgacggcattcgttccctggccttccaccacagccagtcggctctgctcaccgcctccgaggacggcacgctcaagctctggaacctgcagaaggcggtcacggccaagaagaatgcggcgctagatgtggaacctatacatgctttccgggctcaca

SEQ ID NO: 187072 - DNA, 5951 bp, Homo sapiens
  Payload ID: 16834
  Gene Symbol: STAG1
  Gene Name: stromal antigen 1
  Uniprot ID: Q8WVM7
  ENST ID: ENST00000236698
  CDS Start-End: 268-3933
attggcgtgtggaaaatgccaccagatggcgggttaggattgcagctccgttgaaggcgcggcccccgctcccgaacccccggcgaccaccccgtaacaacccccccacatcgggaataacacaccggagacttttggggggaaactaggtcgatggtcggcggcgcccggatgggcagctgaggattgcctttgaggttattttaaaagttttgagttgtacagcacttgattattttgctgcattgtgaaaggacctctccagcaatgattacttcagaattaccagtgttacaggattcaactaatgaaactactgcccattccgatgctggcagcgagcttgaagaaacagaggtcaaaggaaaaagaaaaaggggtcgtcctggccggcctccatctacaaataagaaacctcgaaaatctccaggtgagaagagcagaattgaagctggaattagaggagcaggccgtggaagagctaatggacaccctcaacagaatggggaaggggagcctgtcacattatttgaggtggtgaaactggggaaaagtgcaatgcagtccgtggtggatgactggattgaatcatataaacaagacagggacatcgcacttctggatttaatcaacttttttatccagtgttcaggatgtcgaggtactgtgagaatagagatgtttcgaaatatgcagaatgcagaaatcatcagaaaaatgactgaagaatttgatgaggacagtggtgattatcctcttaccatgcctggacctcagtggaaaaaatttcgttcaaacttttgtgaatttattggagtcctgattcgacagtgtcagtatagcataatttatgatgagtatatgatggacacagtaatctcccttttgacgggtttgtcagactcccaggtcagagcttttaggcatacaagtaccctggctgccatgaagctcatgactgctctggtgaatgttgccttaaacctcagtattcatcaggataatacccagagacaatatgaagccgagagaaataaaatgattgggaagagagccaatgaaaggttggagttactacttcagaaacgcaaagagctgcaagaaaatcaggatgaaatcgaaaatatgatgaactctatttttaagggtatatttgttcatagataccgtgatgctattgctgagattagagccatttgtattgaagaaattggagtatggatgaaaatgtatagtgatgccttcctaaatgacagttacctaaaatatgttggctggactcttcatgacaggcaaggggaagtcaggctgaagtgtttgaaagctctgcagagtctatataccaatagagaattattccccaaattggaactattcactaaccgattcaaggatcgcattgtatcaatgacacttgataaagaatatgatgttgctgtggaagctattcgattggttactctgatacttcatggaagtgaagaagctctttccaatgaagactgtgaaaatgtttaccacttggtgtactcggcacatcgccctgttgctgtggcagctggagagttccttcacaaaaagctatttagcagacatgacccacaagcagaagaagcattagcaaagaggaggggaagaaacagcccgaatggaaacctcattaggatgctggttcttttctttcttgaaagtgagttacatgaacatgcagcctacttggtggacagtttatgggagagctctcaagaactgttgaaagactgggaatgtatgacagagttgctattagaagaacctgttcaaggagaggaagcaatgtctgatcgtcaagagagtgctcttatagagctaatggtttgtacaattcgtcaagctgctgaggcacatcctccagtgggaaggggtaccggcaagagagtgctaactgccaaagaaaggaaaactcaaattgatgatagaaacaaattgactgaacattttattattacacttcctatgttactgtcaaagtattctgcagatgcagagaaggtagcaaacttgctacaaatcccacagtattttgatttagaaatctacagcacaggtagaatggaaaagcatctggatgctttattaaaacagattaagtttgttgtggagaaacacgtagaatcagatgttctagaagcctgcagtaaaacctatagtatcttatgcagtgaagaatataccatccagaacagagttgacatagctcgaagccagctgattgatgagtttgtagatcgattcaatcattctgtggaagacctattgcaagagggagaagaagctgatgatgatgacatttacaatgttctttctacattaaagcggttaacttcttttcacaatgcacatgatctcacaaaatgggatctctttggtaattgctacagattattgaagactggaattgaacatggagccatgccagaacagatagtcgtgcaagcactgcagtgttcccattattcgattctttggcagttggtgaaaattactgatggctctccttccaaagaggatttgttggtattgaggaaaacggtgaaatcctttttggctgtttgccagcagtgcctgtctaatgttaatactccagtgaaagaacaggctttcatgttactctgtgatcttctgatgattttcagccaccaattaatgacaggtggcagagagggccttcagcctttggtgttcaatccagatactggactccaatctgaactcctcagttttgtgatggatcacgtttttattgaccaagacgaggagaaccagagcatggagggtgatgaagaagatgaagctaataaaattgaggccttacataaaagaaggaatctacttgctgctttcagcaaacttatcatttatgacattgttgacatgcatgcagctgcagacatcttcaaacactacatgaagtattacaatgactatggtgatattattaaggaaacactgagtaaaaccaggcagattgataaaattcagtgtgccaagactctcattctcagtttgcaacagttatttaatgaacttgttcaagagcaaggtcccaacctagataggacatctgcccatgtcagtggcattaaagaactggcacgtcgctttgcccttacatttggattggaccagattaagacacgagaagcagttgccacacttcacaaggatggcatagagtttgcatttaaataccaaaatcagaaaggacaagagtatccacctcctaatctggcttttcttgaagtactaagtgaattttcttctaaacttcttcgacaggacaaaaagacagttcattcatacctagagaaattccttaccgagcagatgatggaaaggagggaggatgtatggcttccactcatctcctatagaaattcattagtcactgggggtgaagatgatagaatgtctgtgaacagtggaagtagcagcagcaaaacctcatcagtaaggaataagaaaggacgacctccacttcataaaaaacgagtagaagatgagagtctggataacacatggctaaacaggactgacaccatgattcagactcctggccccctgccagcaccacaactcacatccactgtactgcgggagaacagtcggcccatgggagaccagattcaagaacctgagtctgaacatggttctgaaccagactttttacacaatcggggtctaatggaggaagatgctgagcccatctttgaagatgtgatgatgtcatcccgaagccagttagaagatatgaatgaagaatttgaggacaccatggttattgatctgcctccatcaagaaatcggcgagagagagctgagctaaggccagacttctttgactctgcagctatcatagaagatgattcaggatttggaatgcctatgttctgaagtctgaagaaaatttacaaatctggaactctattatttagagctagaggcctatatactgtgatagcttgtatggggaaaaacacttttgatgtgatctgatttgttttttaatcaaatgattaaggtcaatccctttttgcagtgacagaagaggagcatgtaaattacccaagggaatgttggtgaatgtcaactcagaaagactgacctgaaaatcatttgtgtcctactattggacttatcccaatacagatgtgtgtgtttttctggagggaggaagaaattttaaatttttaaaacagctgtcaagataaacactgttatacacctgttttatgaaaactcaacattgagtaaaaaaaaacatatttttaactttattttcctgttgtacaatttaaaaaccgttttaacattttgcctttttatgttttaaaagctaaccatttttattaaacctatgagtaagcagctcatcctaattgcgaagagtgttttggagttcactggatttggttgacctttgtggaacacaaataatgaaggagcagaacattgacaagctaagatgaaattctgacatagtacatctctgccaaaaaccacacaccctctgtggatatggatatgaattcccagattttatatactcttgaataaaaggtttatttttatttataagtgggcataaaataagaaatgtccatgcagccatttttccaacagatgctgtacaccgttcattttatatagactagggagattcaaatacagtgcattttctattggtatttgttctgtgcatttttagcaacttctaccagcaaataaagtattctcagtaaaacgaaaatgattctcaagttatcagtttgctgtttttaccacttatttcatgccctgccaaattcaagttacacagacttccattttcttaagataatcaatcatgaagaaatcctttatcaatcattcaaaagtaattttaagtgtaacataactgtgtttacttcccatgcacttaatacccttatgcgctaattttgtgaattaagtttactgattatagaagtatgtgctgcatagaagtctgtgcttagagggtgaagttcctaagcttaccttgaattacagctacatttcagtgttaaatgtgcatattaagaataattcttttggggaaagaaattatgaatcttcaggacagtctacaatggtttagagttacattctgcctagacttttatgacttgctgctattgttttaaaaaccccacttagtctctctcttcctttctgatttctaaagtaagcctcagaatttccaaaccaattcatccacagctgtttctgggctggtttttaaagtagctgcaacagaatcatgaggctttccctttttatcaaatacgaaaaacattttttaaaattctgcacacccagtgatcatcttttgtgcgggaaagcaagatgatgatggatgattttattcatccttttagtaaagacacaaaacatttttctcaacatttgtacagttctgaaaaaaacctggtcaccaaaaatatcttctctgctaattcagcaattcttgggctccagttaggggagctggggcctcactttctcccagaattgtgggcttcactggaagtgaaggtgcaggaatgactggactgtccaccccagccctgcctgcctgtggttttggccagggagcaagccatgaggtgccctggcacatgcacaaattgatcctttgcgtgacagtcttgtatggaaaacagatgctgacagaattgtagactaccatgccacacaaaaaggctaaatatctactccaatgggtttccagttcagtttgaagtcaatcaaatttttgtattttcggtgtctccttgattggttttgctagtaattctgtaaattgtacatttgcaatatgaggttttttttccttttgtacaatttgaaactgatgcttcacctttcctttaataaactattcaaaatca

SEQ ID NO: 187073 - DNA, 6055 bp, Homo sapiens
  Payload ID: 16834
  Gene Symbol: STAG1
  Gene Name: stromal antigen 1
  Uniprot ID: Q8WVM7
  ENST ID: ENST00000383202
  CDS Start-End: 258-4034
ggaaaatgccaccagatggcgggttaggattgcagctccgttgaaggcgcggcccccgctcccgaacccccggcgaccaccccgtaacaacccccccacatcgggaataacacaccggagacttttggggggaaactaggtcgatggtcggcggcgcccggatgggcagctgaggattgcctttgaggttattttaaaagttttgagttgtacagcacttgattattttgctgcattgtgaaaggacctctccagcaatgattacttcagaattaccagtgttacaggattcaactaatgaaactactgcccattccgatgctggcagcgagcttgaagaaacagaggtcaaaggaaaaagaaaaaggggtcgtcctggccggcctccatctacaaataagaaacctcgaaaatctccaggtgagaagagcagaattgaagctggaattagaggagcaggccgtggaagagctaatggacaccctcaacagaatggggaaggggagcctgtcacattatttgaggtggtgaaactggggaaaagtgcaatgcagtccgtggtggatgactggattgaatcatataaacaagacagggacatcgcacttctggatttaatcaacttttttatccagtgttcaggatgtcgaggtactgtgagaatagagatgtttcgaaatatgcagaatgcagaaatcatcagaaaaatgactgaagaatttgatgaggacagtggtgattatcctcttaccatgcctggacctcagtggaaaaaatttcgttcaaacttttgtgaatttattggagtcctgattcgacagtgtcagtatagcataatttatgatgagtatatgatggacacagtaatctcccttttgacgggtttgtcagactcccaggtcagagcttttaggcatacaagtaccctggctgccatgaagctcatgactgctctggtgaatgttgccttaaacctcagtattcatcaggataatacccagagacaatatgaagccgagagaaataaaatgattgggaagagagccaatgaaaggttggagttactacttcagaaacgcaaagagctgcaagaaaatcaggatgaaatcgaaaatatgatgaactctatttttaagggtatatttgttcatagataccgtgatgctattgctgagattagagccatttgtattgaagaaattggagtatggatgaaaatgtatagtgatgccttcctaaatgacagttacctaaaatatgttggctggactcttcatgacaggcaaggggaagtcaggctgaagtgtttgaaagctctgcagagtctatataccaatagagaattattccccaaattggaactattcactaaccgattcaaggatcgcattgtatcaatgacacttgataaagaatatgatgttgctgtggaagctattcgattggttactctgatacttcatggaagtgaagaagctctttccaatgaagactgtgaaaatgtttaccacttggtgtactcggcacatcgccctgttgctgtggcagctggagagttccttcacaaaaagctatttagcagacatgacccacaagcagaagaagcattagcaaagaggaggggaagaaacagcccgaatggaaacctcattaggatgctggttcttttctttcttgaaagtgagttacatgaacatgcagcctacttggtggacagtttatgggagagctctcaagaactgttgaaagactgggaatgtatgacagagttgctattagaagaacctgttcaaggagaggaagcaatgtctgatcgtcaagagagtgctcttatagagctaatggtttgtacaattcgtcaagctgctgaggcacatcctccagtgggaaggggtaccggcaagagagtgctaactgccaaagaaaggaaaactcaaattgatgatagaaacaaattgactgaacattttattattacacttcctatgttactgtcaaagtattctgcagatgcagagaaggtagcaaacttgctacaaatcccacagtattttgatttagaaatctacagcacaggtagaatggaaaagcatctggatgctttattaaaacagattaagtttgttgtggagaaacacgtagaatcagatgttctagaagcctgcagtaaaacctatagtatcttatgcagtgaagaatataccatccagaacagagttgacatagctcgaagccagctgattgatgagtttgtagatcgattcaatcattctgtggaagacctattgcaagagggagaagaagctgatgatgatgacatttacaatgttctttctacattaaagcggttaacttcttttcacaatgcacatgatctcacaaaatgggatctctttggtaattgctacagattattgaagactggaattgaacatggagccatgccagaacagatagtcgtgcaagcactgcagtgttcccattattcgattctttggcagttggtgaaaattactgatggctctccttccaaagaggatttgttggtattgaggaaaacggtgaaatcctttttggctgtttgccagcagtgcctgtctaatgttaatactccagtgaaagaacaggctttcatgttactctgtgatcttctgatgattttcagccaccaattaatgacaggtggcagagagggccttcagcctttggtgttcaatccagatactggactccaatctgaactcctcagttttgtgatggatcacgtttttattgaccaagacgaggagaaccagagcatggagggtgatgaagaagatgaagctaataaaattgaggccttacataaaagaaggaatctacttgctgctttcagcaaacttatcatttatgacattgttgacatgcatgcagctgcagacatcttcaaacactacatgaagtattacaatgactatggtgatattattaaggaaacactgagtaaaaccaggcagattgataaaattcagtgtgccaagactctcattctcagtttgcaacagttatttaatgaacttgttcaagagcaaggtcccaacctagataggacatctgcccatgtcagtggcattaaagaactggcacgtcgctttgcccttacatttggattggaccagattaagacacgagaagcagttgccacacttcacaaggatggcatagagtttgcatttaaataccaaaatcagaaaggacaagagtatccacctcctaatctggcttttcttgaagtactaagtgaattttcttctaaacttcttcgacaggacaaaaagacagttcattcatacctagagaaattccttaccgagcagatgatggaaaggagggaggatgtatggcttccactcatctcctatagaaattcattagtcactgggggtgaagatgatagaatgtctgtgaacagtggaagtagcagcagcaaaacctcatcagtaaggaataagaaaggacgacctccacttcataaaaaacgagtagaagatgagagtctggataacacatggctaaacaggactgacaccatgattcagactcctggccccctgccagcaccacaactcacatccactgtactgcgggagaacagtcggcccatgggagaccagattcaagaacctgagtctgaacatggttctgaaccagactttttacacaatcctcagatgcagatctcttggttaggccagccgaagttagaagacttaaatcggaaggacagaacaggaatgaactacatgaaagtgagaactggagtgaggcatgctgttcggggtctaatggaggaagatgctgagcccatctttgaagatgtgatgatgtcatcccgaagccagttagaagatatgaatgaagaatttgaggacaccatggttattgatctgcctccatcaagaaatcggcgagagagagctgagctaaggccagacttctttgactctgcagctatcatagaagatgattcaggatttggaatgcctatgttctgaagtctgaagaaaatttacaaatctggaactctattatttagagctagaggcctatatactgtgatagcttgtatggggaaaaacacttttgatgtgatctgatttgttttttaatcaaatgattaaggtcaatccctttttgcagtgacagaagaggagcatgtaaattacccaagggaatgttggtgaatgtcaactcagaaagactgacctgaaaatcatttgtgtcctactattggacttatcccaatacagatgtgtgtgtttttctggagggaggaagaaattttaaatttttaaaacagctgtcaagataaacactgttatacacctgttttatgaaaactcaacattgagtaaaaaaaaacatatttttaactttattttcctgttgtacaatttaaaaaccgttttaacattttgcctttttatgttttaaaagctaaccatttttattaaacctatgagtaagcagctcatcctaattgcgaagagtgttttggagttcactggatttggttgacctttgtggaacacaaataatgaaggagcagaacattgacaagctaagatgaaattctgacatagtacatctctgccaaaaaccacacaccctctgtggatatggatatgaattcccagattttatatactcttgaataaaaggtttatttttatttataagtgggcataaaataagaaatgtccatgcagccatttttccaacagatgctgtacaccgttcattttatatagactagggagattcaaatacagtgcattttctattggtatttgttctgtgcatttttagcaacttctaccagcaaataaagtattctcagtaaaacgaaaatgattctcaagttatcagtttgctgtttttaccacttatttcatgccctgccaaattcaagttacacagacttccattttcttaagataatcaatcatgaagaaatcctttatcaatcattcaaaagtaattttaagtgtaacataactgtgtttacttcccatgcacttaatacccttatgcgctaattttgtgaattaagtttactgattatagaagtatgtgctgcatagaagtctgtgcttagagggtgaagttcctaagcttaccttgaattacagctacatttcagtgttaaatgtgcatattaagaataattcttttggggaaagaaattatgaatcttcaggacagtctacaatggtttagagttacattctgcctagacttttatgacttgctgctattgttttaaaaaccccacttagtctctctcttcctttctgatttctaaagtaagcctcagaatttccaaaccaattcatccacagctgtttctgggctggtttttaaagtagctgcaacagaatcatgaggctttccctttttatcaaatacgaaaaacattttttaaaattctgcacacccagtgatcatcttttgtgcgggaaagcaagatgatgatggatgattttattcatccttttagtaaagacacaaaacatttttctcaacatttgtacagttctgaaaaaaacctggtcaccaaaaatatcttctctgctaattcagcaattcttgggctccagttaggggagctggggcctcactttctcccagaattgtgggcttcactggaagtgaaggtgcaggaatgactggactgtccaccccagccctgcctgcctgtggttttggccagggagcaagccatgaggtgccctggcacatgcacaaattgatcctttgcgtgacagtcttgtatggaaaacagatgctgacagaattgtagactaccatgccacacaaaaaggctaaatatctactccaatgggtttccagttcagtttgaagtcaatcaaatttttgtattttcggtgtctccttgattggttttgctagtaattctgtaaattgtacatttgcaatatgaggttttttttccttttgtacaatttgaaactgatgcttcacctttcctttaataaactattcaaaatcaggc

SEQ ID NO: 187074 - DNA, 5064 bp, Homo sapiens
  Payload ID: 16834
  Gene Symbol: STAG1
  Gene Name: stromal antigen 1
  ENST ID: ENST00000434713
  CDS Start-End: 971-3967
ccggacccaagtctgcagcggcgccattggcgtgtggaaaatgccaccagatggcgggttaggattgcagctccgttgaaggcgcggcccccgctcccgaacccccggcgaccaccccgtaacaacccccccacatcgggaataacacaccggagacttttggggggaaactaggtcgatggtcggcggcgcccggatgggcagctgaggattgcctttgaggttattttaaaagttttgagttgtacagcacttgattattttgctgcattgtgaaaggacctctccagcaatgattacttcagaattaccagtgttacaggattcaactaatgaaactactgcccattccgatgctggcagcgagcttgaagaaacagaggtcaaaggaaaaagaaaaaggggtcgtcctggccggcctccatctacaaataagaaacctcgaaaatctccaggtgagaagagcagaattgaagctggaattagaggagcaggccgtggaagagctaatggacaccctcaacagaatggggaaggggagcctgtcacattatttgaggtggtgaaactggggaaaagtgcaatgcagtccgtggtggatgactggattgaatcatataaacaagacagggacatcgcacttctggatttaatcaacttttttatccagtgttcaggatgtcgaggtactgtgagaatagagatgtttcgaaatatgcagaatgcagaaatcatcagaaaaatgactgaagaatttgatgaggacagtggtgattatcctcttaccatgcctggacctcagtggaaaaaatttcgttcaaacttttgtgaatttattggagtcctgattcgacagtgtcagtatagcataatttatgatgagtatatgatggacacagtaatctcccttttgacgggtttgtcagactcccaggtcagagcttttaggcatacaagtaccctggctgccatgaagctcatgactgctctggtgaatgttgccttaaacctcagtattcatcaggataatacccagagacaatatgaagccgagagaaataaaatgattgggaagagagccaatgaaaggttggagttactacttcagaaacgcaaagagctgcaagaaaatcaggatgaaatcgaaaatatgatgaactctatttttaagggtatatttgttcatagataccgtgatgctattgctgagattagagccatttgtattgaagaaattggagtatggatgaaaatgtatagtgatgccttcctaaatgacagttacctaaaatatgttggctggactcttcatgacaggcaaggggaagtcaggctgaagtgtttgaaagctctgcagagtctatataccaatagagaattattccccaaattggaactattcactaaccgattcaaggatcgcattgtatcaatgacacttgataaagaatatgatgttgctgtggaagctattcgattggttactctgatacttcatggaagtgaagaagctctttccaatgaagactgtgaaaatgtttaccacttggtgtactcggcacatcgccctgttgctgtggcagctggagagttccttcacaaaaagctatttagcagacatgacccacaagcagaagaagcattagcaaagaggaggggaagaaacagcccgaatggaaacctcattaggatgctggttcttttctttcttgaaagtgagttacatgaacatgcagcctacttggtggacagtttatgggagagctctcaagaactgttgaaagactgggaatgtatgacagagttgctattagaagaacctgttcaaggagaggaagcaatgtctgatcgtcaagagagtgctcttatagagctaatggtttgtacaattcgtcaagctgctgaggcacatcctccagtgggaaggggtaccggcaagagagtgctaactgccaaagaaaggaaaactcaaattgatgatagaaacaaattgactgaacattttattattacacttcctatgttactgtcaaagtattctgcagatgcagagaaggtagcaaacttgctacaaatcccacagtattttgatttagaaatctacagcacaggtagaatggaaaagcatctggatgctttattaaaacagattaagtttgttgtggagaaacacgtagaatcagatgttctagaagcctgcagtaaaacctatagtatcttatgcagtgaagaatataccatccagaacagagttgacatagctcgaagccagctgattgatgagtttgtagatcgattcaatcattctgtggaagacctattgcaagagggagaagaagctgatgatgatgacatttacaatgttctttctacattaaagcggttaacttcttttcacaatgcacatgatctcacaaaatgggatctctttggtaattgctacagattattgaagactggaattgaacatggagccatgccagaacagatagtcgtgcaagcactgcagtgttcccattattcgattctttggcagttggtgaaaattactgatggctctccttccaaagaggatttgttggtattgaggaaaacggtgaaatcctttttggctgtttgccagcagtgcctgtctaatgttaatactccagtgaaagaacaggctttcatgttactctgtgatcttctgatgattttcagccaccaattaatgacaggtggcagagagggccttcagcctttggtgttcaatccagatactggactccaatctgaactcctcagttttgtgatggatcacgtttttattgaccaagacgaggagaaccagagcatggagggtgatgaagaagatgaagctaataaaattgaggccttacataaaagaaggaatctacttgctgctttcagcaaacttatcatttatgacattgttgacatgcatgcagctgcagacatcttcaaacactacatgaagttatttaatgaacttgttcaagagcaaggtcccaacctagataggacatctgcccatgtcagtggcattaaagaactggcacgtcgctttgcccttacatttggattggaccagattaagacacgagaagcagttgccacacttcacaaggatggcatagagtttgcatttaaataccaaaatcagaaaggacaagagtatccacctcctaatctggcttttcttgaagtactaagtgaattttcttctaaacttcttcgacaggacaaaaagacagttcattcatacctagagaaattccttaccgagcagatgatggaaaggagggaggatgtatggcttccactcatctcctatagaaattcattagtcactgggggtgaagatgatagaatgtctgtgaacagtggaagtagcagcagcaaaacctcatcagtaaggaataagaaaggacgacctccacttcataaaaaacgagtagaagatgagagtctggataacacatggctaaacaggactgacaccatgattcagactcctggccccctgccagcaccacaactcacatccactgtactgcgggagaacagtcggcccatgggagaccagattcaagaacctgagtctgaacatggttctgaaccagactttttacacaatcctcagatgcagatctcttggttaggccagccgaagttagaagacttaaatcggaaggacagaacaggaatgaactacatgaaagtgagaactggagtgaggcatgctgttcggggtctaatggaggaagatgctgagcccatctttgaagatgtgatgatgtcatcccgaagccagttagaagatatgaatgaagaatttgaggacaccatggttattgatctgcctccatcaagaaatcggcgagagagagctgagctaaggccagacttctttgactctgcagctatcatagaagatgattcaggatttggaatgcctatgttctgaagtctgaagaaaatttacaaatctggaactctattatttagagctagaggcctatatactgtgatagcttgtatggggaaaaacacttttgatgtgatctgatttgttttttaatcaaatgattaaggtcaatccctttttgcagtgacagaagaggagcatgtaaattacccaagggaatgttggtgaatgtcaactcagaaagactgacctgaaaatcatttgtgtcctactattggacttatcccaatacagatgtgtgtgtttttctggagggaggaagaaattttaaatttttaaaacagctgtcaagataaacactgttatacacctgttttatgaaaactcaacattgagtaaaaaaaaacatatttttaactttattttcctgttgtacaatttaaaaaccgttttaacattttgcctttttatgttttaaaagctaaccatttttattaaacctatgagtaagcagctcatcctaattgcgaagagtgttttggagttcactggatttggttgacctttgtggaacacaaataatgaaggagcagaacattgacaagctaagatgaaattctgacatagtacatctctgccaaaaaccacacaccctctgtggatatggatatgaattcccagattttatatactcttgaataaaaggtttatttttatttataagtgggcataaaataagaaatgtccatgcagccatttttccaacagatgctgtacaccgttcattttatatagactagggagattcaaatacagtgcattttctattggtatttgttctgtgcatttttagcaacttctaccagcaaataaagtattctcagtaaaacgaaaatgattctcaagttatcagtttgctgtttttaccacttatttcatgccctgccaaattcaagttacacagacttccattttcttaagataatcaatcatgaagaaatcctttatcaatcattcaaaagtaattttaagtgtaacataactgtgtttacttcccatgcacttaatacccttatgcgctaattttgtgaattaagtttactgattatagaagtatgtgctgcatagaagtctgt

SEQ ID NO: 187075 - DNA, 2914 bp, Homo sapiens
  Payload ID: 16834
  Gene Symbol: STAG1
  Gene Name: stromal antigen 1
  ENST ID: ENST00000487065
  CDS Start-End: 267-752
ttggcgtgtggaaaatgccaccagatggcgggttaggattgcagctccgttgaaggcgcggcccccgctcccgaacccccggcgaccaccccgtaacaacccccccacatcgggaataacacaccggagacttttggggggaaactaggtcgatggtcggcggcgcccggatgggcagctgaggattgcctttgaggttattttaaaagttttgagttgtacagcacttgattattttgctgcattgtgaaaggacctctccagcaatgattacttcagaattaccagtgttacaggattcaactaatgaaactactgcccattccgatgctggcagcgagcttgaagaaacagaggtcaaaggaaaaagaaaaaggggtcgtcctggccggcctccatctacaaataagaaacctcgaaaatctccaggtgagaagagcagaattgaagctggaattagaggagcaggccgtggaagagctaatggacaccctcaacagaatggggaaggggagcctgtcacattatttgaggtggtgaaactggggaaaagtgcaatgcagagccttcatgttgtttgcattcacttggttggaaggggagagagaaagagaagcagtgtctacttcttagaagcctttggcccctctatttacattccattgatgggaacttaccacatactcagtccgtggtggatgactggattgaatcatataaacaagacagggacatcgcacttctggatttaatcaacttttttatccagtgttcaggatgtcgaggtactgtgagaatagagatgtttcgaaatatgcagaatgcagaaatcatcagaaaaatgactgaagaatttgatgaggacagtggtgattatcctcttaccatgcctggacctcagtggaaaaaatttcgttcaaacttttgtgaatttattggagtcctgattcgacagtgtcagtatagcataatttatgatgagtatatgatggacacagtaatctcccttttgacgggtttgtcagactcccaggtcagagcttttaggcatacaagtaccctggctgccatgaagctcatgactgctctggtgaatgttgccttaaacctcagtattcatcaggataatacccagagacaatatgaagccgagagaaataaaatgattgggaagagagccaatgaaaggttggagttactacttcagaaacgcaaagagctgcaagaaaatcaggatgaaatcgaaaatatgatgaactctatttttaagggtatatttgttcatagataccgtgatgctattgctgagattagagccatttgtattgaagaaattggagtatggatgaaaatgtatagtgatgccttcctaaatgacagttacctaaaatatgttggctggactcttcatgacaggcaaggggaagtcaggctgaagtgtttgaaagctctgcagagtctatataccaatagagaattattccccaaattggaactattcactaaccgattcaaggatcgcattgtatcaatgacacttgataaagaatatgatgttgctgtggaagctattcgattggttactctgatacttcatggaagtgaagaagctctttccaatgaagactgtgaaaatgtttaccacttggtgtactcggcacatcgccctgttgctgtggcagctggagagttccttcacaaaaagctatttagcagacatgacccacaagcagaagaagcattagcaaagaggaggggaagaaacagcccgaatggaaacctcattaggatgctggttcttttctttcttgaaagtgagttacatgaacatgcagcctacttggtggacagtttatgggagagctctcaagaactgttgaaagactgggaatgtatgacagagttgctattagaagaacctgttcaaggagaggaagcaatgtctgatcgtcaagagagtgctcttatagagctaatggtttgtacaattcgtcaagctgctgaggcacatcctccagtgggaaggggtaccggcaagagagtgctaactgccaaagaaaggaaaactcaaattgatgatagaaacaaattgactgaacattttattattacacttcctatgttactgtcaaagtattctgcagatgcagagaaggtagcaaacttgctacaaatcccacagtattttgatttagaaatctacagcacaggtagaatggaaaagcatctggatgctttattaaaacagattaagtttgttgtggagaaacacgtagaatcagatgttctagaagcctgcagtaaaacctatagtatcttatgcagtgaagaatataccatccagaacagagttgacatagctcgaagccagctgattgatgagtttgtagatcgattcaatcattctgtggaagacctattgcaagagggagaagaagctgatgatgatgacatttacaatgttctttctacattaaagcggttaacttcttttcacaatgcacatgatctcacaaaatgggatctctttggtaattgctacagattattgaagactggaattgaacatggagccatgccagaacaggtaggagtttattggtattccttctgtatgactctagaaagttgtttttctgaagtcatatgattatcagaagccttttatagaaagtaattgacgattcattagggcagctgcctcttttgagagaattattgctgtagtaattaaatgttattgataggtgtattatactggcttatgtgttaagagtagaaaaaacttttgctataacatatcttaaaaattttactgttaaggtagacttttctctattaggagaaataccattaatatctatggcagcaattttaaaactttggataatgaaaattgatgatgggtatattc

SEQ ID NO: 187076 - DNA, 5206 bp, Homo sapiens
  Payload ID: 16834
  Gene Symbol: STAG1
  Gene Name: stromal antigen 1
  ENST ID: ENST00000483235
  CDS Start-End: 268-573
attggcgtgtggaaaatgccaccagatggcgggttaggattgcagctccgttgaaggcgcggcccccgctcccgaacccccggcgaccaccccgtaacaacccccccacatcgggaataacacaccggagacttttggggggaaactaggtcgatggtcggcggcgcccggatgggcagctgaggattgcctttgaggttattttaaaagttttgagttgtacagcacttgattattttgctgcattgtgaaaggacctctccagcaatgattacttcagaattaccagtgttacaggattcaactaatgaaactactgcccattccgatgctggcagcgagcttgaagaaacagaggtcaaaggaaaaagaaaaaggggtcgtcctggccggcctccatctacaaataagaaacctcgaaaatctccaggtgagaagagcagaattgaagctggaattagaggagcaggccgtggaagagctaatggacaccctcaacagaatggggaaggggagcctgtcacattatttgaggtggtgaaactggggaaaagtgcaatgcagagatgttgacctttcaaataggtcagtgttgtccaggctgacctcgaacttctgggcccaagtgatcctccccggcctgagcctctcgagtagctgggactacagagccttcatgttgtttgcattcacttggttggaaggggagagagaaagagaagcagtgtctacttcttagaagcctttggcccctctatttacattccattgatgggaacttaccacatactcagtccgtggtggatgactggattgaatcatataaacaagacagggacatcgcacttctggatttaatcaacttttttatccagtgttcaggatgtcgaggtactgtgagaatagagatgtttcgaaatatgcagaatgcagaaatcatcagaaaaatgactgaagaatttgatgaggacagtggtgattatcctcttaccatgcctggacctcagtggaaaaaatttcgttcaaacttttgtgaatttattggagtcctgattcgacagtgtcagtatagcataatttatgatgagtatatgatggacacagtaatctcccttttgacgggtttgtcagactcccaggtcagagcttttaggcatacaagtaccctggctggacaagtcttggggactagataaaatgggcaggaacatttaatcctctgcttcaaagactatgtgcatggacagttacaaggcagttatggccagatatgattatcggctttggaataaaatgctccttgacattgcttaaatcttagctgagaagagagacaatcagccatgaagctcatgactgctctggtgaatgttgccttaaacctcagtattcatcaggataatacccagagacaatatgaagccgagagaaataaaatgattgggaagagagccaatgaaaggttggagttactacttcagaaacgcaaagagctgcaagaaaatcaggatgaaatcgaaaatatgatgaactctatttttaagggtatatttgttcatagataccgtgatgctattgctgagattagagccatttgtattgaagaaattggagtatggatgaaaatgtatagtgatgccttcctaaatgacagttacctaaaatatgttggctggactcttcatgacaggcaaggggaagtcaggctgaagtgtttgaaagctctgcagagtctatataccaatagagaattattccccaaattggaactattcactaaccgattcaaggatcgcattgtatcaatgacacttgataaagaatatgatgttgctgtggaagctattcgattggttactctgatacttcatggaagtgaagaagctctttccaatgaagactgtgaaaatgtttaccacttggtgtactcggcacatcgccctgttgctgtggcagctggagagttccttcacaaaaagctatttagcagacatgacccacaagcagaagaagcattagcaaagaggaggggaagaaacagcccgaatggaaacctcattaggatgctggttcttttctttcttgaaagtgagttacatgaacatgcagcctacttggtggacagtttatgggagagctctcaagaactgttgaaagactgggaatgtatgacagagttgctattagaagaacctgttcaaggagaggaagcaatgtctgatcgtcaagagagtgctcttatagagctaatggtttgtacaattcgtcaagctgctgaggcacatcctccagtgggaaggggtaccggcaagagagtgctaactgccaaagaaaggaaaactcaaattgatgatagaaacaaattgactgaacattttattattacacttcctatgttactgtcaaagtattctgcagatgcagagaaggtagcaaacttgctacaaatcccacagtattttgatttagaaatctacagcacaggtagaatggaaaagcatctggatgctttattaaaacagattaagtttgttgtggagaaacacgtagaatcagatgttctagaagcctgcagtaaaacctatagtatcttatgcagtgaagaatataccatccagaacagagttgacatagctcgaagccagctgattgatgagtttgtagatcgattcaatcattctgtggaagacctattgcaagagggagaagaagctgatgatgatgacatttacaatgttctttctacattaaagcggttaacttcttttcacaatgcacatgatctcacaaaatgggatctctttggtaattgctacagattattgaagactggaattgaacatggagccatgccagaacagatagtcgtgcaagcactgcagtgttcccattattcgattctttggcagttggtgaaaattactgatggctctccttccaaagaggatttgttggtattgaggaaaacggtgaaatcctttttggctgtttgccagcagtgcctgtctaatgttaatactccagtgaaagaacaggctttcatgttactctgtgatcttctgatgattttcagccaccaattaatgacaggtggcagagagggccttcagcctttggtgttcaatccagatactggactccaatctgaactcctcagttttgtgatggatcacgtttttattgaccaagacgaggagaaccagagcatggagggtgatgaagaagatgaagctaataaaattgaggccttacataaaagaaggaatctacttgctgctttcagcaaacttatcatttatgacattgttgacatgcatgcagctgcagacatcttcaaacactacatgaagttatttaatgaacttgttcaagagcaaggtcccaacctagataggacatctgcccatgtcagtggcattaaagaactggcacgtcgctttgcccttacatttggattggaccagattaagacacgagaagcagttgccacacttcacaaggatggcatagagtttgcatttaaataccaaaatcagaaaggacaagagtatccacctcctaatctggcttttcttgaagtactaagtgaattttcttctaaacttcttcgacaggacaaaaagacagttcattcatacctagagaaattccttaccgagcagatgatggaaaggagggaggatgtatggcttccactcatctcctatagaaattcattagtcactgggggtgaagatgatagaatgtctgtgaacagtggaagtagcagcagcaaaacctcatcagtaaggaataagaaaggacgacctccacttcataaaaaacgagtagaagatgagagtctggataacacatggctaaacaggactgacaccatgattcagactcctggccccctgccagcaccacaactcacatccactgtactgcgggagaacagtcggcccatgggagaccagattcaagaacctgagtctgaacatggttctgaaccagactttttacacaatcctcagatgcagatctcttggttaggccagccgaagttagaagacttaaatcggaaggacagaacaggaatgaactacatgaaagtgagaactggagtgaggcatgctgttcggggtctaatggaggaagatgctgagcccatctttgaagatgtgatgatgtcatcccgaagccagttagaagatatgaatgaagaatttgaggacaccatggttattgatctgcctccatcaagaaatcggcgagagagagctgagctaaggccagacttctttgactctgcagctatcatagaagatgattcaggatttggaatgcctatgttctgaagtctgaagaaaatttacaaatctggaactctattatttagagctagaggcctatatactgtgatagcttgtatggggaaaaacacttttgatgtgatctgatttgttttttaatcaaatgattaaggtcaatccctttttgcagtgacagaagaggagcatgtaaattacccaagggaatgttggtgaatgtcaactcagaaagactgacctgaaaatcatttgtgtcctactattggacttatcccaatacagatgtgtgtgtttttctggagggaggaagaaattttaaatttttaaaacagctgtcaagataaacactgttatacacctgttttatgaaaactcaacattgagtaaaaaaaaacatatttttaactttattttcctgttgtacaatttaaaaaccgttttaacattttgcctttttatgttttaaaagctaaccatttttattaaacctatgagtaagcagctcatcctaattgcgaagagtgttttggagttcactggatttggttgacctttgtggaacacaaataatgaaggagcagaacattgacaagctaagatgaaattctgacatagtacatctctgccaaaaaccacacaccctctgtggatatggatatgaattcccagattttatatactcttgaataaaaggtttatttttatttataagtgggcataaaataagaaatgtccatgcagccatttttccaacagatgctgtacaccgttcattttatatagactagggagattcaaatacagtgcattttctattggtatttgttctgtgcatttttagcaacttctaccagcaaataaagtattctcagtaaaacgaaaatgattctcaa

SEQ ID NO: 187077 - DNA, 570 bp, Homo sapiens
  Payload ID: 16834
  Gene Symbol: STAG1
  Gene Name: stromal antigen 1
  ENST ID: ENST00000492318
  CDS Start-End: 1-570
tgcagagtctatataccaatagagaattattccccaaattggaactattcactaaccgattcaaggatcgcattgtatcaatgacacttgataaagaatatgatgttgctgtggaagctattcgattggttactctgatacttcagctatttagcagacatgacccacaagcagaagaagcattagcaaagaggaggggaagaaacagcccgaatggaaacctcattaggatgctggttcttttctttcttgaaagtgagttacatgaacatgcagcctacttggtggacagtttatgggagagctctcaagaactgttgaaagactgggaatgtatgacagagttgctattagaagaacctgttcaaggagaggaagcaatgtctgatcgtcaagagagtgctcttatagagctaatggtttgtacaattcgtcaagctgctgaggcacatcctccagtgggaaggggtaccggcaagagagtgctaactgccaaagaaaggaaaactcaaattgatgatagaaacaaattgactgaacattttattattacacttcctatgttactgt

SEQ ID NO: 187078 - DNA, 1304 bp, Homo sapiens
  Payload ID: 16834
  Gene Symbol: STAG1
  Gene Name: stromal antigen 1
  ENST ID: ENST00000480733
  CDS Start-End: 256-954
aaaatgccaccagatggcgggttaggattgcagctccgttgaaggcgcggcccccgctcccgaacccccggcgaccaccccgtaacaacccccccacatcgggaataacacaccggagacttttggggggaaactaggtcgatggtcggcggcgcccggatgggcagctgaggattgcctttgaggttattttaaaagttttgagttgtacagcacttgattattttgctgcattgtgaaaggacctctccagcaatgattacttcagaattaccagtgttacaggattcaactaatgaaactactgcccattccgatgctggcagcgagcttgaagaaacagaggtcaaaggaaaaagaaaaaggggtcgtcctggccggcctccatctacaaataagaaacctcgaaaatctccaggtgagaagagcagaattgaagctggaattagaggagcaggccgtggaagagctaatggacaccctcaacagaatggggaaggggagcctgtcacattatttgaggtggtgaaactggggaaaagtgcaatgcagtccgtggtggatgactggattgaatcatataaacaagacagggacatcgcacttctggatttaatcaacttttttatccagtgttcaggatgtcgaggtactgtgagaatagagatgtttcgaaatatgcagaatgcagaaatcatcagaaaaatgactgaagaatttgatgaggacagtggtgattatcctcttaccatgcctggacctcagtggaaaaaatttcgttcaaacttttgtgaatttattggagtcctgattcgacagtgtcagtatagcataatttatgatgagtatatgatggacacagtaatctcccttttgacgggtttgtcagactcccaggtcagagcttttaggcatacaagtaccctggctggacaagtcttggggactagataaaatgggcaggaacatttaatcctctgcttcaaagactatgtgcatggacagttacaaggcagttatggccagatatgattatcggctttggaataaaatgctccttgacattgcttaaatcttagctgagaagagagacaatcaggttagttattttgtagggtacagatgtgatgagttccagagcttcataagtcatcagagtggtcttatcagtagtatttttaatctgttttccaaatatcccattttcctgttatgaattcaatatgtgtccctgttgtcagtgtttatgcattgcatttaattgtatacttttacatttttattaaaagttttttttatcatta

SEQ ID NO: 187079 - DNA, 4322 bp, Homo sapiens
  Payload ID: 16834
  Gene Symbol: STAG1
  Gene Name: stromal antigen 1
  ENST ID: ENST00000629124
  CDS Start-End: 262-747
gtgtggaaaatgccaccagatggcgggttaggattgcagctccgttgaaggcgcggcccccgctcccgaacccccggcgaccaccccgtaacaacccccccacatcgggaataacacaccggagacttttggggggaaactaggtcgatggtcggcggcgcccggatgggcagctgaggattgcctttgaggttattttaaaagttttgagttgtacagcacttgattattttgctgcattgtgaaaggacctctccagcaatgattacttcagaattaccagtgttacaggattcaactaatgaaactactgcccattccgatgctggcagcgagcttgaagaaacagaggtcaaaggaaaaagaaaaaggggtcgtcctggccggcctccatctacaaataagaaacctcgaaaatctccaggtgagaagagcagaattgaagctggaattagaggagcaggccgtggaagagctaatggacaccctcaacagaatggggaaggggagcctgtcacattatttgaggtggtgaaactggggaaaagtgcaatgcagagccttcatgttgtttgcattcacttggttggaaggggagagagaaagagaagcagtgtctacttcttagaagcctttggcccctctatttacattccattgatgggaacttaccacatactcagtccgtggtggatgactggattgaatcatataaacaagacagggacatcgcacttctggatttaatcaacttttttatccagtgttcaggatgtcgaggtactgtgagaatagagatgtttcgaaatatgcagaatgcagaaatcatcagaaaaatgactgaagaatttgatgaggacagtggtgattatcctcttaccatgcctggacctcagtggaaaaaatttcgttcaaacttttgtgaatttattggagtcctgattcgacagtgtcagtatagcataatttatgatgagtatatgatggacacagtaatctcccttttgacgggtttgtcagactcccaggtcagagcttttaggcatacaagtaccctggctgccatgaagctcatgactgctctggtgaatgttgccttaaacctcagtattcatcaggataatacccagagacaatatgaagccgagagaaataaaatgattgggaagagagccaatgaaaggttggagttactacttcagaaacgcaaagagctgcaagaaaatcaggatgaaatcgaaaatatgatgaactctatttttaagggtatatttgttcatagataccgtgatgctattgctgagattagagccatttgtattgaagaaattggagtatggatgaaaatgtatagtgatgccttcctaaatgacagttacctaaaatatgttggctggactcttcatgacaggcaaggggaagtcaggctgaagtgtttgaaagctctgcagagtctatataccaatagagaattattccccaaattggaactattcactaaccgattcaaggatcgcattgtatcaatgacacttgataaagaatatgatgttgctgtggaagctattcgattggttactctgatacttcatggaagtgaagaagctctttccaatgaagactgtgaaaatgtttaccacttggtgtactcggcacatcgccctgttgctgtggcagctggagagttccttcacaaaaagctatttagcagacatgacccacaagcagaagaagcattagcaaagaggaggggaagaaacagcccgaatggaaacctcattaggatgctggttcttttctttcttgaaagtgagttacatgaacatgcagcctacttggtggacagtttatgggagagctctcaagaactgttgaaagactgggaatgtatgacagagttgctattagaagaacctgttcaaggagaggaagcaatgtctgatcgtcaagagagtgctcttatagagctaatggtttgtacaattcgtcaagctgctgaggcacatcctccagtgggaaggggtaccggcaagagagtgctaactgccaaagaaaggaaaactcaaattgatgatagaaacaaattgactgaacattttattattacacttcctatgttactgtcaaagtattctgcagatgcagagaaggtagcaaacttgctacaaatcccacagtattttgatttagaaatctacagcacaggtagaatggaaaagcatctggatgctttattaaaacagattaagtttgttgtggagaaacacgtagaatcagatgttctagaagcctgcagtaaaacctatagtatcttatgcagtgaagaatataccatccagaacagagttgacatagctcgaagccagctgattgatgagtttgtagatcgattcaatcattctgtggaagacctattgcaagagggagaagaagctgatgatgatgacatttacaatgttctttctacattaaagcggttaacttcttttcacaatgcacatgatctcacaaaatgggatctctttggtaattgctacagattattgaagactggaattgaacatggagccatgccagaacagatagtcgtgcaagcactgcagtgttcccattattcgattctttggcagttggtgaaaattactgatggctctccttccaaagaggatttgttggtattgaggaaaacggtgaaatcctttttggctgtttgccagcagtgcctgtctaatgttaatactccagtgaaagaacaggctttcatgttactctgtgatcttctgatgattttcagccaccaattaatgacaggtggcagagagggccttcagcctttggtgttcaatccagatactggactccaatctgaactcctcagttttgtgatggatcacgtttttattgaccaagacgaggagaaccagagcatggagggtgatgaagaagatgaagctaataaaattgaggccttacataaaagaaggaatctacttgctgctttcagcaaacttatcatttatgacattgttgacatgcatgcagctgcagacatcttcaaacactacatgaagtattacaatgactatggtgatattattaaggaaacactgagtaaaaccaggcagattgataaaattcagtgtgccaagactctcattctcagtttgcaacagttatttaatgaacttgttcaagagcaaggtcccaacctagataggacatctgcccatgtcagtggcattaaagaactggcacgtcgctttgcccttacatttggattggaccagattaagacacgagaagcagttgccacacttcacaaggatggcatagagtttgcatttaaataccaaaatcagaaaggacaagagtatccacctcctaatctggcttttcttgaagtactaagtgaattttcttctaaacttcttcgacaggacaaaaagacagttcattcatacctagagaaattccttaccgagcagatgatggaaaggagggaggatgtatggcttccactcatctcctatagaaattcattagtcactgggggtgaagatgatagaatgtctgtgaacagtggaagtagcagcagcaaaacctcatcagtaaggaataagaaaggacgacctccacttcataaaaaacgagtagaagatgagagtctggataacacatggctaaacaggactgacaccatgattcagactcctggccccctgccagcaccacaactcacatccactgtactgcgggagaacagtcggcccatgggagaccagattcaagaacctgagtctgaacatggttctgaaccagactttttacacaatcctcagatgcagatctcttggttaggccagccgaagttagaagacttaaatcggaaggacagaacaggaatgaactacatgaaagtgagaactggagtgaggcatgctgttcggggtctaatggaggaagatgctgagcccatctttgaagatgtgatgatgtcatcccgaagccagttagaagatatgaatgaagaatttgaggacaccatggttattgatctgcctccatcaagaaatcggcgagagagagctgagctaaggccagacttctttgactctgcagctatcatagaagatgattcaggatttggaatgcctatgttctgaagtctgaagaaaatttacaaatctggaactctattatttagagctagaggcctatatactgtgatagcttgtatggggaaaaacacttttgatgtgatctgatttgttttttaatcaaatgattaaggtcaatccctttttgcagtgacagaagaggag

SEQ ID NO: 187080 - DNA, 5218 bp, Homo sapiens
  Payload ID: 16835
  Gene Symbol: STAG2
  Gene Name: stromal antigen 2
  Uniprot ID: Q8N3U4
  ENST ID: ENST00000218089
  CDS Start-End: 511-4317
gtggccgacagatggcgcctgcgcgttccattcgcctccaagtcgccgaagagcgaacaccccaaacaatcccgaagcgccaccaaaaaaaaaaaaaaaaaaaaaaaaaaaaaaaaaaaaaaaaagaaaaaaaaccccgccggatccgaccgccactttcaaaaccccccaccgctctagaaccgcgggagcttccgtccctgagtagaattcgagggtgtaaagaagaggaaggggaaaaatatcttgtaccagcccaggggtgaagaagcccccggcctgagaaagaaggaggagtgggggaggcgaacagtctcgttgctgcctctgtgtacgctgaggggggaggtggccaccgagtactaaattcacttgggaataaaagaaaaacataagaaaattataagagaaaggaattgtcttagaagaaagaaggcaagccaccattttacccacgtaaatatatgaatatatttctgacattgaggtgttccagaagatgataaagaaatgatagcagctccagaaataccaactgattttaatctactacaggagtcagaaacacatttttcttctgacacagattttgaagatatcgaaggaaaaaaccaaaagcaaggcaaaggcaaaacttgtaaaaaaggcaaaaagggcccagcagaaaagggcaaaggtggaaatggaggaggaaaacctccttctggtccaaaccgaatgaatggtcatcaccaacagaatggagtggaaaacatgatgttgtttgaagttgttaaaatgggcaagagtgctatgcagtcggtggtagatgattggatagaatcatacaagcatgaccgagatatagcacttcttgaccttatcaacttttttattcagtgttcaggctgtaaaggagttgtcacagcagaaatgtttagacatatgcagaactctgagataattcgaaaaatgactgaagaattcgatgaggatagtggagattatccacttaccatggctggtcctcagtggaagaagttcaaatccagtttttgtgaattcattggcgtgttagtacggcaatgtcaatatagtatcatatatgatgagtatatgatggatacagtcatttcacttcttacaggattgtctgactcacaagtcagagcatttcgacatacaagcaccctggcagctatgaagttgatgacagctttggtgaatgtggcactaaatcttagcattaatatggataatacacaaagacaatatgaagcagaacggaataaaatgattggaaaacgagccaatgagaggctagaactcctgctacaaaagcggaaagagcttcaggaaaatcaagatgaaatagaaaatatgatgaatgcaatatttaaaggagtgtttgtacatagataccgtgatgcgatagctgaaattcgagctatttgcattgaagagattggcatttggatgaagatgtatagtgatgcctttcttaatgacagttatttaaaatatgttggttggactatgcatgataagcaaggtgaagtaagactcaaatgtcttactgctctacaagggctttattataacaaagagcttaattccaaactggaactttttaccagtcggttcaaggatagaattgtgtctatgacccttgacaaagaatatgatgttgcagtacaagcaataaaattactcactcttgttttacagagtagtgaagaagttctcactgcagaagattgtgaaaatgtctatcatctggtttattcagctcaccggccagtagcagtagcagctggagaatttctctacaaaaagctcttcagtcgtagagatccagaggaggatggaatgatgaaaagaagaggaagacaaggtccaaatgccaaccttgttaagacattggtttttttctttctagaaagtgagttacatgagcatgcagcataccttgtggatagcatgtgggactgtgctactgagctgctgaaagactgggaatgtatgaatagcttgttactggaagagccacttagtggagaggaagcactaacagataggcaagagagtgctctgattgaaataatgctttgtaccattagacaagcggctgaatgtcatcctcccgtgggaagagggacaggaaaaagggtgcttacagcaaaggagaagaagacacagttggatgataggacaaaaatcactgagctttttgccgtggcccttcctcagttattagcaaaatactctgtagatgcagaaaaggtgactaacttgttgcagttgcctcagtactttgatttggaaatatataccactggacgattagaaaagcatttggatgccttattgcgacagatccggaatattgtagagaagcacacagatacagatgttttggaagcatgttctaaaacttaccatgcactctgtaatgaagagttcacaatcttcaacagagtagatatttcaagaagtcaactgatagatgaattggcagataaatttaaccggcttcttgaagattttctgcaagagggtgaagaacctgatgaagatgatgcatatcaggtattgtcaacattgaagaggatcactgcttttcataatgcccatgacctttcaaagtgggatttatttgcttgtaattacaaactcttgaaaactggaatcgaaaatggagacatgcctgagcagattgttattcacgcactgcagtgtactcactatgtaatcctttggcaacttgctaagataactgaaagcagctctacaaaggaggacttgctgcgtttaaagaaacaaatgagagtattttgtcagatatgtcaacattacctgaccaacgtgaatactactgttaaggaacaggccttcactattctgtgtgatattttgatgatcttcagccatcagattatgtcaggagggcgtgacatgttagagccattagtgtatacccctgattcttcattgcagtctgagttgctcagctttattttggatcatgtcttcattgaacaggatgatgataataatagtgcagatggtcagcaagaggatgaagccagtaaaattgaagctctgcacaagagaagaaatttacttgcagcattttgtaagctaattgtatatactgtggtggagatgaatacagctgcagatatcttcaaacagtatatgaagtattataatgactatggagatatcatcaaagaaacaatgagtaaaacaaggcagatagacaaaattcagtgtgctaagacccttattctcagtctgcaacagctttttaatgaaatgatacaagaaaatggctataattttgatagatcatcctctacatttagtggcataaaagaacttgctcgacgttttgctttaacttttggacttgatcagttgaaaacaagagaagccattgccatgctacacaaagatggcatagaatttgcttttaaagagcctaatccgcaaggggagagccatccacctttaaatttggcatttcttgatattctgagtgaattttcttctaaactacttcgacaagacaaaagaacagtgtatgtttacttggaaaagttcatgacctttcagatgtcactccgaagagaggatgtgtggcttccactgatgtcttaccgaaattctttgctagctggtggtgatgatgacaccatgtcagtcattagtggaatcagcagccgggggtcaacagtacggagtaaaaaatcaaaaccatctacaggaaaacggaaagtggttgagggcatgcagctttcactcactgaagaaagtagtagtagtgacagtatgtggttaagcagagaacaaacactgcacacccctgttatgatgcagacaccacaactcacctccactattatgagagagcccaaaagattacggcctgaggatagcttcatgagtgtttatccaatgcagactgaacatcatcaaacacctcttgattataacacgcaggtaacatggatgttagctcaaagacaacaagaggaagcaaggcaacagcaggagagagcagcaatgagctatgttaaactgcgaactaatcttcagcatgccattcggcgtggcacaagcctaatggaagatgatgaagagccaattgtggaagatgttatgatgtcctcagaagggaggattgaggatcttaatgagggaatggattttgacaccatggatatagatttgccaccatcaaagaacagacgagagagaacagaactgaagcctgatttctttgatccagcttcaattatggatgaatcagttcttggagtgtcaatgttttaataccagtacacaattaaatctgtggtgaagtcattttctaagtggaagaggaaattttaaagtgtggtagatacagtgaaattctgtacagatttttctctaaggagaatatgacatgcttatgcttaccaagatcaagtgcattgaggggcagttttgtttgcctgaataaacgtaaaggacaagtaaacaatttgatgataagctacagtttttcttagaaagtaaatattttatttatgcgctgttagttggcttttgaatcgattatttcatgcttttttttaaaaaaaaaaaaaaacaaaataacaatctgaagaggcatttggtacagatatgaattctcttacatttatttactggttgtactaaataatgatgacctctgctggatttctgtttacatccagaaaacaatgttaaggatgtatttattcccctaccctgaagaaagtgtaggatagaattgtttttagcattctaaatttaaatgcttaaaacgtcaatcaacaaaactttgttttaaatattgtaattgtggagaaaagtaaacttataagcagaacttttacaattttttcatctaaaagtattttaagatatttttaaaatccaagagcttctctatacttttcagaaatatccagatgcagtgaactgccagaaggtaaccagtctcaaacatgcttatcccattatcaaccctgaaagtttgcttgtcctttaagataaaaatgtaatgttgtgatattccttccagtaatgccactgtattttgtctccaaataaaagaagcttattgtagtatgtttgcagaaaaattctaaacaaaaattatacagcttattagagtgtgggaatagggatctaaattttaaataaaattatatatatatataaa

SEQ ID NO: 187081 - DNA, 4281 bp, Homo sapiens
  Payload ID: 16835
  Gene Symbol: STAG2
  Gene Name: stromal antigen 2
  Uniprot ID: Q8N3U4
  ENST ID: ENST00000371144
  CDS Start-End: 281-3976
ttcatgtgacgggcccctctgcttctcccccgccccatcatctccagcgcgtggtgggggaactgctggggaaggcgattggcatcgatctctccatcccttccgaggcccgacttcggtggccaccgagtactaaattcacttgggaataaaagaaaaacataagaaaattataagagaaaggaattgtcttagaagaaagaaggcaagccaccattttacccacgtaaatatatgaatatatttctgacattgaggtgttccagaagatgataaagaaatgatagcagctccagaaataccaactgattttaatctactacaggagtcagaaacacatttttcttctgacacagattttgaagatatcgaaggaaaaaaccaaaagcaaggcaaaggcaaaacttgtaaaaaaggcaaaaagggcccagcagaaaagggcaaaggtggaaatggaggaggaaaacctccttctggtccaaaccgaatgaatggtcatcaccaacagaatggagtggaaaacatgatgttgtttgaagttgttaaaatgggcaagagtgctatgcagtcggtggtagatgattggatagaatcatacaagcatgaccgagatatagcacttcttgaccttatcaacttttttattcagtgttcaggctgtaaaggagttgtcacagcagaaatgtttagacatatgcagaactctgagataattcgaaaaatgactgaagaattcgatgaggatagtggagattatccacttaccatggctggtcctcagtggaagaagttcaaatccagtttttgtgaattcattggcgtgttagtacggcaatgtcaatatagtatcatatatgatgagtatatgatggatacagtcatttcacttcttacaggattgtctgactcacaagtcagagcatttcgacatacaagcaccctggcagctatgaagttgatgacagctttggtgaatgtggcactaaatcttagcattaatatggataatacacaaagacaatatgaagcagaacggaataaaatgattggaaaacgagccaatgagaggctagaactcctgctacaaaagcggaaagagcttcaggaaaatcaagatgaaatagaaaatatgatgaatgcaatatttaaaggagtgtttgtacatagataccgtgatgcgatagctgaaattcgagctatttgcattgaagagattggcatttggatgaagatgtatagtgatgcctttcttaatgacagttatttaaaatatgttggttggactatgcatgataagcaaggtgaagtaagactcaaatgtcttactgctctacaagggctttattataacaaagagcttaattccaaactggaactttttaccagtcggttcaaggatagaattgtgtctatgacccttgacaaagaatatgatgttgcagtacaagcaataaaattactcactcttgttttacagagtagtgaagaagttctcactgcagaagattgtgaaaatgtctatcatctggtttattcagctcaccggccagtagcagtagcagctggagaatttctctacaaaaagctcttcagtcgtagagatccagaggaggatggaatgatgaaaagaagaggaagacaaggtccaaatgccaaccttgttaagacattggtttttttctttctagaaagtgagttacatgagcatgcagcataccttgtggatagcatgtgggactgtgctactgagctgctgaaagactgggaatgtatgaatagcttgttactggaagagccacttagtggagaggaagcactaacagataggcaagagagtgctctgattgaaataatgctttgtaccattagacaagcggctgaatgtcatcctcccgtgggaagagggacaggaaaaagggtgcttacagcaaaggagaagaagacacagttggatgataggacaaaaatcactgagctttttgccgtggcccttcctcagttattagcaaaatactctgtagatgcagaaaaggtgactaacttgttgcagttgcctcagtactttgatttggaaatatataccactggacgattagaaaagcatttggatgccttattgcgacagatccggaatattgtagagaagcacacagatacagatgttttggaagcatgttctaaaacttaccatgcactctgtaatgaagagttcacaatcttcaacagagtagatatttcaagaagtcaactgatagatgaattggcagataaatttaaccggcttcttgaagattttctgcaagagggtgaagaacctgatgaagatgatgcatatcaggtattgtcaacattgaagaggatcactgcttttcataatgcccatgacctttcaaagtgggatttatttgcttgtaattacaaactcttgaaaactggaatcgaaaatggagacatgcctgagcagattgttattcacgcactgcagtgtactcactatgtaatcctttggcaacttgctaagataactgaaagcagctctacaaaggaggacttgctgcgtttaaagaaacaaatgagagtattttgtcagatatgtcaacattacctgaccaacgtgaatactactgttaaggaacaggccttcactattctgtgtgatattttgatgatcttcagccatcagattatgtcaggagggcgtgacatgttagagccattagtgtatacccctgattcttcattgcagtctgagttgctcagctttattttggatcatgtcttcattgaacaggatgatgataataatagtgcagatggtcagcaagaggatgaagccagtaaaattgaagctctgcacaagagaagaaatttacttgcagcattttgtaagctaattgtatatactgtggtggagatgaatacagctgcagatatcttcaaacagtatatgaagtattataatgactatggagatatcatcaaagaaacaatgagtaaaacaaggcagatagacaaaattcagtgtgctaagacccttattctcagtctgcaacagctttttaatgaaatgatacaagaaaatggctataattttgatagatcatcctctacatttagtggcataaaagaacttgctcgacgttttgctttaacttttggacttgatcagttgaaaacaagagaagccattgccatgctacacaaagatggcatagaatttgcttttaaagagcctaatccgcaaggggagagccatccacctttaaatttggcatttcttgatattctgagtgaattttcttctaaactacttcgacaagacaaaagaacagtgtatgtttacttggaaaagttcatgacctttcagatgtcactccgaagagaggatgtgtggcttccactgatgtcttaccgaaattctttgctagctggtggtgatgatgacaccatgtcagtcattagtggaatcagcagccgggggtcaacagtacggagtaaaaaatcaaaaccatctacaggaaaacggaaagtggttgagggcatgcagctttcactcactgaagaaagtagtagtagtgacagtatgtggttaagcagagaacaaacactgcacacccctgttatgatgcagacaccacaactcacctccactattatgagagagcccaaaagattacggcctgaggatagcttcatgagtgtttatccaatgcagactgaacatcatcaaacacctcttgattataatcggcgtggcacaagcctaatggaagatgatgaagagccaattgtggaagatgttatgatgtcctcagaagggaggattgaggatcttaatgagggaatggattttgacaccatggatatagatttgccaccatcaaagaacagacgagagagaacagaactgaagcctgatttctttgatccagcttcaattatggatgaatcagttcttggagtgtcaatgttttaataccagtacacaattaaatctgtggtgaagtcattttctaagtggaagaggaaattttaaagtgtggtagatacagtgaaattctgtacagatttttctctaaggagaatatgacatgcttatgcttaccaagatcaagtgcattgaggggcagttttgtttgcctgaataaacgtaaaggacaagtaaacaatttgatgataagctacagtttttcttagaaagtaaatattttatttatgcgctgttagttggcttttgaatcgattatttcatgcttttttttaaaaaaaaaaaaaaacaaa

SEQ ID NO: 187082 - DNA, 4393 bp, Homo sapiens
  Payload ID: 16835
  Gene Symbol: STAG2
  Gene Name: stromal antigen 2
  Uniprot ID: Q8N3U4
  ENST ID: ENST00000371145
  CDS Start-End: 282-4088
attcatgtgacgggcccctctgcttctcccccgccccatcatctccagcgcgtggtgggggaactgctggggaaggcgattggcatcgatctctccatcccttccgaggcccgacttcggtggccaccgagtactaaattcacttgggaataaaagaaaaacataagaaaattataagagaaaggaattgtcttagaagaaagaaggcaagccaccattttacccacgtaaatatatgaatatatttctgacattgaggtgttccagaagatgataaagaaatgatagcagctccagaaataccaactgattttaatctactacaggagtcagaaacacatttttcttctgacacagattttgaagatatcgaaggaaaaaaccaaaagcaaggcaaaggcaaaacttgtaaaaaaggcaaaaagggcccagcagaaaagggcaaaggtggaaatggaggaggaaaacctccttctggtccaaaccgaatgaatggtcatcaccaacagaatggagtggaaaacatgatgttgtttgaagttgttaaaatgggcaagagtgctatgcagtcggtggtagatgattggatagaatcatacaagcatgaccgagatatagcacttcttgaccttatcaacttttttattcagtgttcaggctgtaaaggagttgtcacagcagaaatgtttagacatatgcagaactctgagataattcgaaaaatgactgaagaattcgatgaggatagtggagattatccacttaccatggctggtcctcagtggaagaagttcaaatccagtttttgtgaattcattggcgtgttagtacggcaatgtcaatatagtatcatatatgatgagtatatgatggatacagtcatttcacttcttacaggattgtctgactcacaagtcagagcatttcgacatacaagcaccctggcagctatgaagttgatgacagctttggtgaatgtggcactaaatcttagcattaatatggataatacacaaagacaatatgaagcagaacggaataaaatgattggaaaacgagccaatgagaggctagaactcctgctacaaaagcggaaagagcttcaggaaaatcaagatgaaatagaaaatatgatgaatgcaatatttaaaggagtgtttgtacatagataccgtgatgcgatagctgaaattcgagctatttgcattgaagagattggcatttggatgaagatgtatagtgatgcctttcttaatgacagttatttaaaatatgttggttggactatgcatgataagcaaggtgaagtaagactcaaatgtcttactgctctacaagggctttattataacaaagagcttaattccaaactggaactttttaccagtcggttcaaggatagaattgtgtctatgacccttgacaaagaatatgatgttgcagtacaagcaataaaattactcactcttgttttacagagtagtgaagaagttctcactgcagaagattgtgaaaatgtctatcatctggtttattcagctcaccggccagtagcagtagcagctggagaatttctctacaaaaagctcttcagtcgtagagatccagaggaggatggaatgatgaaaagaagaggaagacaaggtccaaatgccaaccttgttaagacattggtttttttctttctagaaagtgagttacatgagcatgcagcataccttgtggatagcatgtgggactgtgctactgagctgctgaaagactgggaatgtatgaatagcttgttactggaagagccacttagtggagaggaagcactaacagataggcaagagagtgctctgattgaaataatgctttgtaccattagacaagcggctgaatgtcatcctcccgtgggaagagggacaggaaaaagggtgcttacagcaaaggagaagaagacacagttggatgataggacaaaaatcactgagctttttgccgtggcccttcctcagttattagcaaaatactctgtagatgcagaaaaggtgactaacttgttgcagttgcctcagtactttgatttggaaatatataccactggacgattagaaaagcatttggatgccttattgcgacagatccggaatattgtagagaagcacacagatacagatgttttggaagcatgttctaaaacttaccatgcactctgtaatgaagagttcacaatcttcaacagagtagatatttcaagaagtcaactgatagatgaattggcagataaatttaaccggcttcttgaagattttctgcaagagggtgaagaacctgatgaagatgatgcatatcaggtattgtcaacattgaagaggatcactgcttttcataatgcccatgacctttcaaagtgggatttatttgcttgtaattacaaactcttgaaaactggaatcgaaaatggagacatgcctgagcagattgttattcacgcactgcagtgtactcactatgtaatcctttggcaacttgctaagataactgaaagcagctctacaaaggaggacttgctgcgtttaaagaaacaaatgagagtattttgtcagatatgtcaacattacctgaccaacgtgaatactactgttaaggaacaggccttcactattctgtgtgatattttgatgatcttcagccatcagattatgtcaggagggcgtgacatgttagagccattagtgtatacccctgattcttcattgcagtctgagttgctcagctttattttggatcatgtcttcattgaacaggatgatgataataatagtgcagatggtcagcaagaggatgaagccagtaaaattgaagctctgcacaagagaagaaatttacttgcagcattttgtaagctaattgtatatactgtggtggagatgaatacagctgcagatatcttcaaacagtatatgaagtattataatgactatggagatatcatcaaagaaacaatgagtaaaacaaggcagatagacaaaattcagtgtgctaagacccttattctcagtctgcaacagctttttaatgaaatgatacaagaaaatggctataattttgatagatcatcctctacatttagtggcataaaagaacttgctcgacgttttgctttaacttttggacttgatcagttgaaaacaagagaagccattgccatgctacacaaagatggcatagaatttgcttttaaagagcctaatccgcaaggggagagccatccacctttaaatttggcatttcttgatattctgagtgaattttcttctaaactacttcgacaagacaaaagaacagtgtatgtttacttggaaaagttcatgacctttcagatgtcactccgaagagaggatgtgtggcttccactgatgtcttaccgaaattctttgctagctggtggtgatgatgacaccatgtcagtcattagtggaatcagcagccgggggtcaacagtacggagtaaaaaatcaaaaccatctacaggaaaacggaaagtggttgagggcatgcagctttcactcactgaagaaagtagtagtagtgacagtatgtggttaagcagagaacaaacactgcacacccctgttatgatgcagacaccacaactcacctccactattatgagagagcccaaaagattacggcctgaggatagcttcatgagtgtttatccaatgcagactgaacatcatcaaacacctcttgattataacacgcaggtaacatggatgttagctcaaagacaacaagaggaagcaaggcaacagcaggagagagcagcaatgagctatgttaaactgcgaactaatcttcagcatgccattcggcgtggcacaagcctaatggaagatgatgaagagccaattgtggaagatgttatgatgtcctcagaagggaggattgaggatcttaatgagggaatggattttgacaccatggatatagatttgccaccatcaaagaacagacgagagagaacagaactgaagcctgatttctttgatccagcttcaattatggatgaatcagttcttggagtgtcaatgttttaataccagtacacaattaaatctgtggtgaagtcattttctaagtggaagaggaaattttaaagtgtggtagatacagtgaaattctgtacagatttttctctaaggagaatatgacatgcttatgcttaccaagatcaagtgcattgaggggcagttttgtttgcctgaataaacgtaaaggacaagtaaacaatttgatgataagctacagtttttcttagaaagtaaatattttatttatgcgctgttagttggcttttgaatcgattatttcatgcttttttttaaaaaaaaaaaaaaacaaa

SEQ ID NO: 187083 - DNA, 5991 bp, Homo sapiens
  Payload ID: 16835
  Gene Symbol: STAG2
  Gene Name: stromal antigen 2
  Uniprot ID: Q8N3U4
  ENST ID: ENST00000371157
  CDS Start-End: 237-3932
cttcctagagagggaacaacattcatgtgacgggcccctctgcttctcccccgccccatcatctccagcgcgtggtgggggaactgctggggaaggcgattggcatcgatctctccatcccttccgaggcccgacttcggaattgtcttagaagaaagaaggcaagccaccattttacccacgtaaatatatgaatatatttctgacattgaggtgttccagaagatgataaagaaatgatagcagctccagaaataccaactgattttaatctactacaggagtcagaaacacatttttcttctgacacagattttgaagatatcgaaggaaaaaaccaaaagcaaggcaaaggcaaaacttgtaaaaaaggcaaaaagggcccagcagaaaagggcaaaggtggaaatggaggaggaaaacctccttctggtccaaaccgaatgaatggtcatcaccaacagaatggagtggaaaacatgatgttgtttgaagttgttaaaatgggcaagagtgctatgcagtcggtggtagatgattggatagaatcatacaagcatgaccgagatatagcacttcttgaccttatcaacttttttattcagtgttcaggctgtaaaggagttgtcacagcagaaatgtttagacatatgcagaactctgagataattcgaaaaatgactgaagaattcgatgaggatagtggagattatccacttaccatggctggtcctcagtggaagaagttcaaatccagtttttgtgaattcattggcgtgttagtacggcaatgtcaatatagtatcatatatgatgagtatatgatggatacagtcatttcacttcttacaggattgtctgactcacaagtcagagcatttcgacatacaagcaccctggcagctatgaagttgatgacagctttggtgaatgtggcactaaatcttagcattaatatggataatacacaaagacaatatgaagcagaacggaataaaatgattggaaaacgagccaatgagaggctagaactcctgctacaaaagcggaaagagcttcaggaaaatcaagatgaaatagaaaatatgatgaatgcaatatttaaaggagtgtttgtacatagataccgtgatgcgatagctgaaattcgagctatttgcattgaagagattggcatttggatgaagatgtatagtgatgcctttcttaatgacagttatttaaaatatgttggttggactatgcatgataagcaaggtgaagtaagactcaaatgtcttactgctctacaagggctttattataacaaagagcttaattccaaactggaactttttaccagtcggttcaaggatagaattgtgtctatgacccttgacaaagaatatgatgttgcagtacaagcaataaaattactcactcttgttttacagagtagtgaagaagttctcactgcagaagattgtgaaaatgtctatcatctggtttattcagctcaccggccagtagcagtagcagctggagaatttctctacaaaaagctcttcagtcgtagagatccagaggaggatggaatgatgaaaagaagaggaagacaaggtccaaatgccaaccttgttaagacattggtttttttctttctagaaagtgagttacatgagcatgcagcataccttgtggatagcatgtgggactgtgctactgagctgctgaaagactgggaatgtatgaatagcttgttactggaagagccacttagtggagaggaagcactaacagataggcaagagagtgctctgattgaaataatgctttgtaccattagacaagcggctgaatgtcatcctcccgtgggaagagggacaggaaaaagggtgcttacagcaaaggagaagaagacacagttggatgataggacaaaaatcactgagctttttgccgtggcccttcctcagttattagcaaaatactctgtagatgcagaaaaggtgactaacttgttgcagttgcctcagtactttgatttggaaatatataccactggacgattagaaaagcatttggatgccttattgcgacagatccggaatattgtagagaagcacacagatacagatgttttggaagcatgttctaaaacttaccatgcactctgtaatgaagagttcacaatcttcaacagagtagatatttcaagaagtcaactgatagatgaattggcagataaatttaaccggcttcttgaagattttctgcaagagggtgaagaacctgatgaagatgatgcatatcaggtattgtcaacattgaagaggatcactgcttttcataatgcccatgacctttcaaagtgggatttatttgcttgtaattacaaactcttgaaaactggaatcgaaaatggagacatgcctgagcagattgttattcacgcactgcagtgtactcactatgtaatcctttggcaacttgctaagataactgaaagcagctctacaaaggaggacttgctgcgtttaaagaaacaaatgagagtattttgtcagatatgtcaacattacctgaccaacgtgaatactactgttaaggaacaggccttcactattctgtgtgatattttgatgatcttcagccatcagattatgtcaggagggcgtgacatgttagagccattagtgtatacccctgattcttcattgcagtctgagttgctcagctttattttggatcatgtcttcattgaacaggatgatgataataatagtgcagatggtcagcaagaggatgaagccagtaaaattgaagctctgcacaagagaagaaatttacttgcagcattttgtaagctaattgtatatactgtggtggagatgaatacagctgcagatatcttcaaacagtatatgaagtattataatgactatggagatatcatcaaagaaacaatgagtaaaacaaggcagatagacaaaattcagtgtgctaagacccttattctcagtctgcaacagctttttaatgaaatgatacaagaaaatggctataattttgatagatcatcctctacatttagtggcataaaagaacttgctcgacgttttgctttaacttttggacttgatcagttgaaaacaagagaagccattgccatgctacacaaagatggcatagaatttgcttttaaagagcctaatccgcaaggggagagccatccacctttaaatttggcatttcttgatattctgagtgaattttcttctaaactacttcgacaagacaaaagaacagtgtatgtttacttggaaaagttcatgacctttcagatgtcactccgaagagaggatgtgtggcttccactgatgtcttaccgaaattctttgctagctggtggtgatgatgacaccatgtcagtcattagtggaatcagcagccgggggtcaacagtacggagtaaaaaatcaaaaccatctacaggaaaacggaaagtggttgagggcatgcagctttcactcactgaagaaagtagtagtagtgacagtatgtggttaagcagagaacaaacactgcacacccctgttatgatgcagacaccacaactcacctccactattatgagagagcccaaaagattacggcctgaggatagcttcatgagtgtttatccaatgcagactgaacatcatcaaacacctcttgattataatcggcgtggcacaagcctaatggaagatgatgaagagccaattgtggaagatgttatgatgtcctcagaagggaggattgaggatcttaatgagggaatggattttgacaccatggatatagatttgccaccatcaaagaacagacgagagagaacagaactgaagcctgatttctttgatccagcttcaattatggatgaatcagttcttggagtgtcaatgttttaataccagtacacaattaaatctgtggtgaagtcattttctaagtggaagaggaaattttaaagtgtggtagatacagtgaaattctgtacagatttttctctaaggagaatatgacatgcttatgcttaccaagatcaagtgcattgaggggcagttttgtttgcctgaataaacgtaaaggacaagtaaacaatttgatgataagctacagtttttcttagaaagtaaatattttatttatgcgctgttagttggcttttgaatcgattatttcatgcttttttttaaaaaaaaaaaaaaacaaaataacaatctgaagaggcatttggtacagatatgaattctcttacatttatttactggttgtactaaataatgatgacctctgctggatttctgtttacatccagaaaacaatgttaaggatgtatttattcccctaccctgaagaaagtgtaggatagaattgtttttagcattctaaatttaaatgcttaaaacgtcaatcaacaaaactttgttttaaatattgtaattgtggagaaaagtaaacttataagcagaacttttacaattttttcatctaaaagtattttaagatatttttaaaatccaagagcttctctatacttttcagaaatatccagatgcagtgaactgccagaaggtaaccagtctcaaacatgcttatcccattatcaaccctgaaagtttgcttgtcctttaagataaaaatgtaatgttgtgatattccttccagtaatgccactgtattttgtctccaaataaaagaagcttattgtagtatgtttgcagaaaaattctaaacaaaaattatacagcttattagagtgtgggaatagggatctaaattttaaataaaattatatatatatataaattggtgctgattttataattgcgcagtttgtttagttttttcttacttttaaattccaacttaaaattatgaggtttcagaaatatattgaaagtttaacaatgtttaaaaatagaaaagcatgagtgttcatgctttaaaatgatttttaaatttgtattttatattgttttatctatctgtctttgcaagcagtcttcaggttaaagatacttctaacaggttacagtacatttcctctgtatgtaaattagatgggataatagaattcataacccataatattctttgaaagctaagctttaaacttcattttatgtcctttcacaaataaattagtttaaaacagaaagtggctacttgccattttgacatcaactcattttgcgaggcttaggcagctagacatcgtttaaaacaaaatattaacttatattacatgtgtatctatctattgtcagtcgtctctcagttcttgaggtatattattttaatcattccatgccttaatatgcttgcaatacaagaatatcttcagatgggtgaataccaaaaggctttcagtttttagtcagaaatcaagcattgggctgtggtagccaaaaaccataggttagctaaaaagatcatgatacaattattttattaagtcatggttaataacaaatgaatccagacttgtctaacagattttccatcaacaaatattgttatgtgcaaaagtattgcctatgttgttttacacaccactgcattaactagaactgctgagaggactgtatatatgattttaaacctaagttgattttttttctcactcttgaaaggagtacttctttgtgaaagcagttcttacagctttgttttcaaccagctaaaaatgttttatatattactctaacctgttgtcctccacattctattgtcctaattgtactgttttctgatttgtatttatgtcttgagacagtaactttttgaataaaaataaacctacagtatgttgtatgttttctcttgtactcaaagggggagggtggctataaatggtttgcaaatttatatctattatcacatcttttaatgtgtttggggaataatttatagagaataccatcagtttatatttttaataaatcatatgtatttacaatgaaa

SEQ ID NO: 187084 - DNA, 6045 bp, Homo sapiens
  Payload ID: 16835
  Gene Symbol: STAG2
  Gene Name: stromal antigen 2
  Uniprot ID: Q8N3U4
  ENST ID: ENST00000371160
  CDS Start-End: 291-3986
gggtggcccaaaatggagaacgcggagcagcgcaagatggaggctccgcttctctgtgtagcagtagatttaggttccttttctccggcaggctcctaagcctaggagagcccgaactggagcgcgtggtgggggaactgctggggaaggcgattggcatcgatctctccatcccttccgaggcccgacttcggaattgtcttagaagaaagaaggcaagccaccattttacccacgtaaatatatgaatatatttctgacattgaggtgttccagaagatgataaagaaatgatagcagctccagaaataccaactgattttaatctactacaggagtcagaaacacatttttcttctgacacagattttgaagatatcgaaggaaaaaaccaaaagcaaggcaaaggcaaaacttgtaaaaaaggcaaaaagggcccagcagaaaagggcaaaggtggaaatggaggaggaaaacctccttctggtccaaaccgaatgaatggtcatcaccaacagaatggagtggaaaacatgatgttgtttgaagttgttaaaatgggcaagagtgctatgcagtcggtggtagatgattggatagaatcatacaagcatgaccgagatatagcacttcttgaccttatcaacttttttattcagtgttcaggctgtaaaggagttgtcacagcagaaatgtttagacatatgcagaactctgagataattcgaaaaatgactgaagaattcgatgaggatagtggagattatccacttaccatggctggtcctcagtggaagaagttcaaatccagtttttgtgaattcattggcgtgttagtacggcaatgtcaatatagtatcatatatgatgagtatatgatggatacagtcatttcacttcttacaggattgtctgactcacaagtcagagcatttcgacatacaagcaccctggcagctatgaagttgatgacagctttggtgaatgtggcactaaatcttagcattaatatggataatacacaaagacaatatgaagcagaacggaataaaatgattggaaaacgagccaatgagaggctagaactcctgctacaaaagcggaaagagcttcaggaaaatcaagatgaaatagaaaatatgatgaatgcaatatttaaaggagtgtttgtacatagataccgtgatgcgatagctgaaattcgagctatttgcattgaagagattggcatttggatgaagatgtatagtgatgcctttcttaatgacagttatttaaaatatgttggttggactatgcatgataagcaaggtgaagtaagactcaaatgtcttactgctctacaagggctttattataacaaagagcttaattccaaactggaactttttaccagtcggttcaaggatagaattgtgtctatgacccttgacaaagaatatgatgttgcagtacaagcaataaaattactcactcttgttttacagagtagtgaagaagttctcactgcagaagattgtgaaaatgtctatcatctggtttattcagctcaccggccagtagcagtagcagctggagaatttctctacaaaaagctcttcagtcgtagagatccagaggaggatggaatgatgaaaagaagaggaagacaaggtccaaatgccaaccttgttaagacattggtttttttctttctagaaagtgagttacatgagcatgcagcataccttgtggatagcatgtgggactgtgctactgagctgctgaaagactgggaatgtatgaatagcttgttactggaagagccacttagtggagaggaagcactaacagataggcaagagagtgctctgattgaaataatgctttgtaccattagacaagcggctgaatgtcatcctcccgtgggaagagggacaggaaaaagggtgcttacagcaaaggagaagaagacacagttggatgataggacaaaaatcactgagctttttgccgtggcccttcctcagttattagcaaaatactctgtagatgcagaaaaggtgactaacttgttgcagttgcctcagtactttgatttggaaatatataccactggacgattagaaaagcatttggatgccttattgcgacagatccggaatattgtagagaagcacacagatacagatgttttggaagcatgttctaaaacttaccatgcactctgtaatgaagagttcacaatcttcaacagagtagatatttcaagaagtcaactgatagatgaattggcagataaatttaaccggcttcttgaagattttctgcaagagggtgaagaacctgatgaagatgatgcatatcaggtattgtcaacattgaagaggatcactgcttttcataatgcccatgacctttcaaagtgggatttatttgcttgtaattacaaactcttgaaaactggaatcgaaaatggagacatgcctgagcagattgttattcacgcactgcagtgtactcactatgtaatcctttggcaacttgctaagataactgaaagcagctctacaaaggaggacttgctgcgtttaaagaaacaaatgagagtattttgtcagatatgtcaacattacctgaccaacgtgaatactactgttaaggaacaggccttcactattctgtgtgatattttgatgatcttcagccatcagattatgtcaggagggcgtgacatgttagagccattagtgtatacccctgattcttcattgcagtctgagttgctcagctttattttggatcatgtcttcattgaacaggatgatgataataatagtgcagatggtcagcaagaggatgaagccagtaaaattgaagctctgcacaagagaagaaatttacttgcagcattttgtaagctaattgtatatactgtggtggagatgaatacagctgcagatatcttcaaacagtatatgaagtattataatgactatggagatatcatcaaagaaacaatgagtaaaacaaggcagatagacaaaattcagtgtgctaagacccttattctcagtctgcaacagctttttaatgaaatgatacaagaaaatggctataattttgatagatcatcctctacatttagtggcataaaagaacttgctcgacgttttgctttaacttttggacttgatcagttgaaaacaagagaagccattgccatgctacacaaagatggcatagaatttgcttttaaagagcctaatccgcaaggggagagccatccacctttaaatttggcatttcttgatattctgagtgaattttcttctaaactacttcgacaagacaaaagaacagtgtatgtttacttggaaaagttcatgacctttcagatgtcactccgaagagaggatgtgtggcttccactgatgtcttaccgaaattctttgctagctggtggtgatgatgacaccatgtcagtcattagtggaatcagcagccgggggtcaacagtacggagtaaaaaatcaaaaccatctacaggaaaacggaaagtggttgagggcatgcagctttcactcactgaagaaagtagtagtagtgacagtatgtggttaagcagagaacaaacactgcacacccctgttatgatgcagacaccacaactcacctccactattatgagagagcccaaaagattacggcctgaggatagcttcatgagtgtttatccaatgcagactgaacatcatcaaacacctcttgattataatcggcgtggcacaagcctaatggaagatgatgaagagccaattgtggaagatgttatgatgtcctcagaagggaggattgaggatcttaatgagggaatggattttgacaccatggatatagatttgccaccatcaaagaacagacgagagagaacagaactgaagcctgatttctttgatccagcttcaattatggatgaatcagttcttggagtgtcaatgttttaataccagtacacaattaaatctgtggtgaagtcattttctaagtggaagaggaaattttaaagtgtggtagatacagtgaaattctgtacagatttttctctaaggagaatatgacatgcttatgcttaccaagatcaagtgcattgaggggcagttttgtttgcctgaataaacgtaaaggacaagtaaacaatttgatgataagctacagtttttcttagaaagtaaatattttatttatgcgctgttagttggcttttgaatcgattatttcatgcttttttttaaaaaaaaaaaaaaacaaaataacaatctgaagaggcatttggtacagatatgaattctcttacatttatttactggttgtactaaataatgatgacctctgctggatttctgtttacatccagaaaacaatgttaaggatgtatttattcccctaccctgaagaaagtgtaggatagaattgtttttagcattctaaatttaaatgcttaaaacgtcaatcaacaaaactttgttttaaatattgtaattgtggagaaaagtaaacttataagcagaacttttacaattttttcatctaaaagtattttaagatatttttaaaatccaagagcttctctatacttttcagaaatatccagatgcagtgaactgccagaaggtaaccagtctcaaacatgcttatcccattatcaaccctgaaagtttgcttgtcctttaagataaaaatgtaatgttgtgatattccttccagtaatgccactgtattttgtctccaaataaaagaagcttattgtagtatgtttgcagaaaaattctaaacaaaaattatacagcttattagagtgtgggaatagggatctaaattttaaataaaattatatatatatataaattggtgctgattttataattgcgcagtttgtttagttttttcttacttttaaattccaacttaaaattatgaggtttcagaaatatattgaaagtttaacaatgtttaaaaatagaaaagcatgagtgttcatgctttaaaatgatttttaaatttgtattttatattgttttatctatctgtctttgcaagcagtcttcaggttaaagatacttctaacaggttacagtacatttcctctgtatgtaaattagatgggataatagaattcataacccataatattctttgaaagctaagctttaaacttcattttatgtcctttcacaaataaattagtttaaaacagaaagtggctacttgccattttgacatcaactcattttgcgaggcttaggcagctagacatcgtttaaaacaaaatattaacttatattacatgtgtatctatctattgtcagtcgtctctcagttcttgaggtatattattttaatcattccatgccttaatatgcttgcaatacaagaatatcttcagatgggtgaataccaaaaggctttcagtttttagtcagaaatcaagcattgggctgtggtagccaaaaaccataggttagctaaaaagatcatgatacaattattttattaagtcatggttaataacaaatgaatccagacttgtctaacagattttccatcaacaaatattgttatgtgcaaaagtattgcctatgttgttttacacaccactgcattaactagaactgctgagaggactgtatatatgattttaaacctaagttgattttttttctcactcttgaaaggagtacttctttgtgaaagcagttcttacagctttgttttcaaccagctaaaaatgttttatatattactctaacctgttgtcctccacattctattgtcctaattgtactgttttctgatttgtatttatgtcttgagacagtaactttttgaataaaaataaacctacagtatgttgtatgttttctcttgtactcaaagggggagggtggctataaatggtttgcaaatttatatctattatcacatcttttaatgtgtttggggaataatttatagagaataccatcagtttatatttttaataaatcatatgtatttacaatgaaa

SEQ ID NO: 187085 - DNA, 385 bp, Homo sapiens
  Payload ID: 16835
  Gene Symbol: STAG2
  Gene Name: stromal antigen 2
  ENST ID: ENST00000394477
  CDS Start-End: 175-385
tcccctcgacaccccactaaagacagaagaaccgcggctcgatcgggtccgcggcggaagcgcggccaaacgaatgagaattgtcttagaagaaagaaggcaagccaccattttacccacgtaaatatatgaatatatttctgacattgaggtgttccagaagatgataaagaaatgatagcagctccagaaataccaactgattttaatctactacaggagtcagaaacacatttttcttctgacacagattttgaagatatcgaaggaaaaaaccaaaagcaaggcaaaggcaaaacttgtaaaaaaggcaaaaagggcccagcagaaaagggcaaaggtggaaatggaggaggaaaacctccttctggtccaaaccgaatga

SEQ ID NO: 187086 - DNA, 676 bp, Homo sapiens
  Payload ID: 16835
  Gene Symbol: STAG2
  Gene Name: stromal antigen 2
  ENST ID: ENST00000394478
  CDS Start-End: 330-676
attcctggctctagcagggcctgctcgggagctgctggtgtttgttactgtcctcgcagcacttttctgccaaccttctctctctgcgtattggttaggagcaaaagcaggaggcggtctcctaattctgtctgtagcctagcgcgttgcgtttaagggtatatctgaacttattttgttaaaaaaaaggctctgggaagtggatgcatttgtttaatgacatataattcaggaattgtcttagaagaaagaaggcaagccaccattttacccacgtaaatatatgaatatatttctgacattgaggtgttccagaagatgataaagaaatgatagcagctccagaaataccaactgattttaatctactacaggagtcagaaacacatttttcttctgacacagattttgaagatatcgaaggaaaaaaccaaaagcaaggcaaaggcaaaacttgtaaaaaaggcaaaaagggcccagcagaaaagggcaaaggtggaaatggaggaggaaaacctccttctggtccaaaccgaatgaatggtcatcaccaacagaatggagtggaaaacatgatgttgtttgaagttgttaaaatgggcaagagtgctatgcagtcggtggtagatgattggatagaatcatacaagcatgaccgagatatagcacttcttga

SEQ ID NO: 187087 - DNA, 798 bp, Homo sapiens
  Payload ID: 16835
  Gene Symbol: STAG2
  Gene Name: stromal antigen 2
  ENST ID: ENST00000435215
  CDS Start-End: 176-798
atccttgccccaggtggccaccgagtactaaattcacttgggaataaaagaaaaacataagaaaattataagagaaaggaattgtcttagaagaaagaaggcaagccaccattttacccacgtaaatatatgaatatatttctgacattgaggtgttccagaagatgataaagaaatgatagcagctccagaaataccaactgattttaatctactacaggagtcagaaacacatttttcttctgacacagattttgaagatatcgaaggaaaaaaccaaaagcaaggcaaaggcaaaacttgtaaaaaaggcaaaaagggcccagcagaaaagggcaaaggtggaaatggaggaggaaaacctccttctggtccaaaccgaatgaatggtcatcaccaacagaatggagtggaaaacatgatgttgtttgaagttgttaaaatgggcaagagtgctatgcagtcggtggtagatgattggatagaatcatacaagcatgaccgagatatagcacttcttgaccttatcaacttttttattcagtgttcaggctgtaaaggagttgtcacagcagaaatgtttagacatatgcagaactctgagataattcgaaaaatgactgaagaattcgatgaggatagtggagattatccacttaccatggctggtcctcagtggaagaagttcaaatccagtttttgtgaattcattggcgtgttagtacggcaatgtcaatatagtatcatatatgatgagtatatgatggatacagtcatttcacttcttacaggattgtc

SEQ ID NO: 187088 - DNA, 2089 bp, Homo sapiens
  Payload ID: 16835
  Gene Symbol: STAG2
  Gene Name: stromal antigen 2
  ENST ID: ENST00000455404
  CDS Start-End: 446-2089
gtggccgacagatggcgcctgcgcgttccattcgcctccaagtcgccgaagagcgaacaccccaaacaatcccgaagcgccaccaaaaaaaaaaaaaaaaaaaaaaaaaaaaaaaaaaaaaaaaagaaaaaaaaccccgccggatccgaccgccactttcaaaaccccccaccgctctagaaccgcgggagcttccgtccctgagtagaattcgagggtgtaaagaagaggaaggggaaaaatatcttgtaccagcccaggggtgaagaagcccccggcctgagaaagaaggaggagtgggggaggcgaacagtctcgttgctgcctctgtgtacgctgaggggggaggaattgtcttagaagaaagaaggcaagccaccattttacccacgtaaatatatgaatatatttctgacattgaggtgttccagaagatgataaagaaatgatagcagctccagaaataccaactgattttaatctactacaggagtcagaaacacatttttcttctgacacagattttgaagatatcgaaggaaaaaaccaaaagcaaggcaaaggcaaaacttgtaaaaaaggcaaaaagggcccagcagaaaagggcaaaggtggaaatggaggaggaaaacctccttctggtccaaaccgaatgaatggtcatcaccaacagaatggagtggaaaacatgatgttgtttgaagttgttaaaatgggcaagagtgctatgcagtcggtggtagatgattggatagaatcatacaagcatgaccgagatatagcacttcttgaccttatcaacttttttattcagtgttcaggctgtaaaggagttgtcacagcagaaatgtttagacatatgcagaactctgagataattcgaaaaatgactgaagaattcgatgaggatagtggagattatccacttaccatggctggtcctcagtggaagaagttcaaatccagtttttgtgaattcattggcgtgttagtacggcaatgtcaatatagtatcatatatgatgagtatatgatggatacagtcatttcacttcttacaggattgtctgactcacaagtcagagcatttcgacatacaagcaccctggcagctatgaagttgatgacagctttggtgaatgtggcactaaatcttagcattaatatggataatacacaaagacaatatgaagcagaacggaataaaatgattggaaaacgagccaatgagaggctagaactcctgctacaaaagcggaaagagcttcaggaaaatcaagatgaaatagaaaatatgatgaatgcaatatttaaaggagtgtttgtacatagataccgtgatgcgatagctgaaattcgagctatttgcattgaagagattggcatttggatgaagatgtatagtgatgcctttcttaatgacagttatttaaaatatgttggttggactatgcatgataagcaaggtgaagtaagactcaaatgtcttactgctctacaagggctttattataacaaagagcttaattccaaactggaactttttaccagtcggttcaaggatagaattgtgtctatgacccttgacaaagaatatgatgttgcagtacaagcaataaaattactcactcttgttttacagagtagtgaagaagttctcactgcagaagattgtgaaaatgtctatcatctggtttattcagctcaccggccagtagcagtagcagctggagaatttctctacaaaaagctcttcagtcgtagagatccagaggaggatggaatgatgaaaagaagaggaagacaaggtccaaatgccaaccttgttaagacattggtttttttctttctagaaagtgagttacatgagcatgcagcataccttgtggatagcatgtgggactgtgctactgagctgctgaaagactgggaatgtatgaatagcttgttactggaagagccacttagtggagaggaagcactaacagataggcaagagagtgctctgattgaaataatgctttgtaccattagacaagcggctgaatgtcatcctcccgtgggaagagggacaggaaaaagggtgctt

SEQ ID NO: 187089 - DNA, 845 bp, Homo sapiens
  Payload ID: 16835
  Gene Symbol: STAG2
  Gene Name: stromal antigen 2
  ENST ID: ENST00000458176
  CDS Start-End: 216-392
ttcatgtgacgggcccctctgcttctcccccgccccatcatctccagcgcgtggtgggggaactgctggggaaggcgattggcatcgatctctccatcccttccgaggcccgacttcggaattgtcttagaagaaagaaggcaagccaccattttacccacgtaaatatatgaatatatttctgacattgaggtgttccagaagatgataaagaaatgatagcagctccagaaataccaactgattttaatctactacaggagtcagaaacacatttttcttctgacacagattttgaagatatcgaaggaaaaaaccaaaagcaaggcaaaggcaaacatttgtttttcaaaatgaattttggatttatattgtctcatgacatactttgaaaaagtcttaacaatacagaagtttacgatgaccaaagtgaaatttttccataatcctatcacctggagacttgtaaaaaaggcaaaaagggcccagcagaaaagggcaaaggtggaaatggaggaggaaaacctccttctggtccaaaccgaatgaatggtcatcaccaacagaatggagtggaaaacatgatgttgtttgaagttgttaaaatgggcaagagtgctatgcagtcggtggtagatgattggatagaatcatacaagcatgaccgagatatagcacttcttgaccttatcaacttttttattcagtgttcaggctgtaaaggagttgtcacagcagaaatgtttagacatatgcagaactctgagataattcgaaaaatgactgaagaattcgatgaggatagtggagattatccacttaccatggctggtcctcagtggaag

SEQ ID NO: 187090 - DNA, 296 bp, Homo sapiens
  Payload ID: 16835
  Gene Symbol: STAG2
  Gene Name: stromal antigen 2
  ENST ID: ENST00000458700
  CDS Start-End: 177-296
gaggtaagttataaaatggcggaggcgaagcttctagaagtttggaggggcacccggagggcgcttggcccaccgtgaggaattgtcttagaagaaagaaggcaagccaccattttacccacgtaaatatatgaatatatttctgacattgaggtgttccagaagatgataaagaaatgatagcagctccagaaataccaactgattttaatctactacaggagtcagaaacacatttttcttctgacacagattttgaagatatcgaaggaaaaaaccaaaagcaaggcaaaggc

SEQ ID NO: 187091 - DNA, 742 bp, Homo sapiens
  Payload ID: 16835
  Gene Symbol: STAG2
  Gene Name: stromal antigen 2
  ENST ID: ENST00000435103
  CDS Start-End: 281-742
ggcccaaaatggagaacgcggagcagcgcaagatggaggctccgcttctctgtgtagcagtagatttaggttccttttctccggcaggctcctaagcctaggagagcccgaactggaggtggccaccgagtactaaattcacttgggaataaaagaaaaacataagaaaattataagagaaaggaattgtcttagaagaaagaaggcaagccaccattttacccacgtaaatatatgaatatatttctgacattgaggtgttccagaagatgataaagaaatgatagcagctccagaaataccaactgattttaatctactacaggagtcagaaacacatttttcttctgacacagattttgaagatatcgaaggaaaaaaccaaaagcaaggcaaaggcaaaacttgtaaaaaaggcaaaaagggcccagcagaaaagggcaaaggtggaaatggaggaggaaaacctccttctggtccaaaccgaatgaatggtcatcaccaacagaatggagtggaaaacatgatgttgtttgaagttgttaaaatgggcaagagtgctatgcagtcggtggtagatgattggatagaatcatacaagcatgaccgagatatagcacttcttgaccttatcaacttttttattcagtgttcaggctgtaaaggagttgtcacagcagaaatgtttagacatatgcagaactctgagataattcgaaaaatgactgaagaattcgatgag

SEQ ID NO: 187092 - DNA, 678 bp, Homo sapiens
  Payload ID: 16835
  Gene Symbol: STAG2
  Gene Name: stromal antigen 2
  ENST ID: ENST00000428941
  CDS Start-End: 172-678
agtgctgcttttcattcccacccccacccgcactgtctttctcaaggcacgaactgagctgatccttgccccaggaattgtcttagaagaaagaaggcaagccaccattttacccacgtaaatatatgaatatatttctgacattgaggtgttccagaagatgataaagaaatgatagcagctccagaaataccaactgattttaatctactacaggagtcagaaacacatttttcttctgacacagattttgaagatatcgaaggaaaaaaccaaaagcaaggcaaaggcaaaacttgtaaaaaaggcaaaaagggcccagcagaaaagggcaaaggtggaaatggaggaggaaaacctccttctggtccaaaccgaatgaatggtcatcaccaacagaatggagtggaaaacatgatgttgtttgaagttgttaaaatgggcaagagtgctatgcagtcggtggtagatgattggatagaatcatacaagcatgaccgagatatagcacttcttgaccttatcaacttttttattcagtgttcaggctgtaaaggagttgtcacagcagaaatgtttagacatatgcagaactctgagataattcgaaaaatgactgaagaattcgatgaggatagtggagattatccacttaccatggctggtcctcagtggaag

SEQ ID NO: 187093 - DNA, 4198 bp, Homo sapiens
  Payload ID: 16836
  Gene Symbol: STAG3
  Gene Name: stromal antigen 3
  Uniprot ID: Q9UJ98
  ENST ID: ENST00000317296
  CDS Start-End: 155-3832
gcgcttttctggaatctttcgcccccggaagggcagcggcgggcgcctgtgtggaaggtggggtggccagagacacccgagggacctgagctggatcgccatacctaccctgtggtcctcatcttcctggcctcatagctcctcctctccaagcatgtcttccccgttgcaaagagctgtgggagataccaagagggccttgtctgcatcttctagttcctctgccagtctaccctttgatgacagggactcaaaccatacctcagaggggaatggcgactctttgttagctgatgaagacactgactttgaagacagcttgaatcgcaatgtgaagaagagagcagcaaaacgaccaccgaaaacaacaccggtggcaaaacatccaaagaaagggtcccgagtggtacatcgtcatagccggaaacagtcagagccaccagccaatgatcttttcaatgctgtgaaagccgccaaaagtgacatgcagtctttggtagatgagtggctggatagctacaagcaagaccaggatgcaggatttctggagcttgttaactttttcatccaatcttgcggatgtaaaggcattgtgacccctgagatgttcaagaagatgtccaactcagagatcatccagcacctaacagagcagtttaatgaggactcgggggactaccctctcatagctccaggtccatcctggaagaagttccagggcagcttctgtgaatttgtgaggacattggtctgtcagtgccagtacagcctcctctatgatggcttccctatggacgacctcatctccctgctcactggcctctcagactcacaagtccgcgccttccgtcacactagcaccctggctgctatgaaactgatgacctccctggtaaaagttgccctccaactgagtgtgcaccaagataacaatcagcgtcagtatgaggctgaaagaaacaaggggccagggcagagggcacctgagcggctggagagcctgttggagaaacgcaaagagctccaagagcatcaagaggagattgaggggatgatgaatgccctcttcaggggtgtctttgttcatcggtacagggatgtccttcctgagatccgtgctatctgcattgaggaaattgggtgttggatgcaaagctacagcacgtctttcctcaccgacagctatttaaaatatattggttggactctgcatgataagcaccgagaagtccgcctgaagtgtgtgaaggccctgaaagggctgtacggtaaccgggacctgaccacacgcctggagctcttcaccagccgcttcaaggaccggatggtttccatggtcatggacagagagtatgatgtggcagtggaggctgtcagattactgatacttatccttaagaacatggaaggggtgctgacggacgcggattgtgagagcgtctacccagttgtgtatgcctctcatcgaggcctggcctctgccgcaggcgaatttctgtactggaaactcttctaccctgagtgcgagataagaatgatgggtggaagagagcaacgccagagcccaggcgcccagaggactttcttccagcttctgctgtccttctttgtggagagcgagctccatgaccacgctgcttacttagtagacagtctgtgggactgtgcaggggctcggctgaaggactgggagggtctgacaagcctgctgctggagaaggaccagaacctgggtgatgtgcaggagagcacactgatagaaatccttgtgtccagtgcccggcaagcttcagaggggcacccgcctgtgggccgggtcactgggaggaagggcttaacctctaaggagcgcaagacccaagccgatgacagggtgaagttgactgagcacctcatccccctgctgccccagctcctggccaagttctcagctgatgcagagaaggtcactcccctgctccagcttctcagctgctttgacctccacatctactgcactgggcgcttggagaagcacctggagctgttcctgcagcaactccaggaggtggtggtgaagcatgcagagccagcggtgcttgaggctggggcgcatgccctctacctgctctgtaatcccgaattcactttcttcagccgggcggactttgcccgcagccagctagtagatttgctgactgaccgcttccagcaggagcttgaagagctgttacagtcgtccttcctagatgaggatgaggtatataatctggcagccactctgaaacgcctctctgccttctacaacactcatgacctgactcgctgggagctctatgagccatgttgccaactcctgcagaaggctgtggacacaggagaggttcctcaccaggttatcctgccagccttgactcttgtctatttttccattctctggacactaacccacatttctaaatcagatgcttcccagaagcagctgtcgagtttgagggacagaatggtggccttctgtgaactctgccagagttgcctctcagatgtggatactgagatccaggagcaggcttttgtcttattaagtgatctacttctcatctttagccctcagatgattgttgggggccgtgatttccttaggccacttgtcttttttcctgaagctactctccagtctgagctagccagcttcctcatggaccacgtcttcatccagccgggagacctgggcagtggtgattcccaggaggatcatttacagatagagcggctacaccagcggcgccgcctcctagccgggttctgcaagctgttgctttatggggtgctggagatggatgcagcctcagatgttttcaaacactacaacaagttctacaatgactatggtgacattatcaaggaaacattaactagagcaaggcagattgaccgaagtcattgttcccgaatcctgctgctgagcctcaagcagctgtacacagaactgctgcaggagcatgggccccagggcctgaatgagcttcctgccttcatcgagatgagggacctggcccggaggtttgccttgagttttggaccccagcagctgcagaaccgtgacctcgtggtcatgctacacaaggaaggcatccagttctccttgtctgagcttcctccagctggctcctccaatcagcctccaaatctggcattcctggagctcctttcagagttttccccccgactcttccatcaggacaagcagcttttactgtcctatctagaaaagtgcctgcagcatgtctcccaggcacctggccatccctggggcccagtcaccacctactgccactccctcagccctgtggagaacacagcagagaccagccctcaggtcctccccagctccaagaggaggcgcgttgaagggcctgccaagcctaacagagaggacgtctcctcgtcccaggaagaaagtctgcagctgaacagcatcccgcccacgcccaccctcacctccacagctgtgaagagcaggcagcccctgtgggggttgaaagagatggaggaagaagatggctcagagttggattttgcccagggtcagcccgtcgcaggcaccgagaggtcaaggttcttgggtccacaatatttccagactccacacaacccttcaggtcctggcctgggcaaccagctgatgcgactcagccttatggaagaggacgaggaagaagagttagaaatccaggatgagtcaaatgaagaacggcaggatacagacatgcaagcaagtagctactcttccaccagtgagcgcgggctggacctcttagattctacagagctggatattgaggatttctgacaggactctgggcccctccccagctccactccctacctcaagaatgtgaccatttggaaaaggcaaagagaaaaggagcaaaatgaagcattcccccaggcttcagccctgggctctgaggggaaagagttgggcattgtttttctaacctaacctttccctctggggtagagaagccgagagaccctgtcctccctaatgcactgtggcccagtccccttgcctttttcctgttctgtttggagtggagaagggcagcacctctgtgtttaatggaaatagcccatagtctcctggatttttggaacatctttctcagcctattttgtgtcctaatgattcgctcaataaacatgtttgaatcca

SEQ ID NO: 187094 - DNA, 4163 bp, Homo sapiens
  Payload ID: 16836
  Gene Symbol: STAG3
  Gene Name: stromal antigen 3
  Uniprot ID: Q9UJ98
  ENST ID: ENST00000394018
  CDS Start-End: 295-3798
agcccacgtgagagggcaggacgcctgagagcttgaggccacacgaggctgtggagcggcgtgactcaaacgtggcgcgcatcagctcgcacacttccaaacctcgcgatagctactggccctgggcgagccgttgggattgcgcttgcgcacagcgtgtcttgtacgttcccgcgcttttctggaatctttcgcccccggaagggcagcggcgggcgcctgtgtggaagctggatcgccatacctaccctgtggtcctcatcttcctggcctcatagctcctcctctccaagcatgtcttccccgttgcaaagagctgtgggagataccaagagggccttgtctgcatcttctagttcctctgccagtctaccctttgatgacagggactcaaaccatacctcagaggggaatggcgactctttgttagctgatgaagacactgactttgaagacagcttgaatcgcaatgtgaagaagagagcagcaaaacgaccaccgaaaacaacaccggtggcaaaacatccaaagaaagggtcccgagtggtacatcgtcatagccggaaacagtcagagccaccagccaatgatcttttcaatgctgtgaaagccgccaaaagtgacatgcaggactcgggggactaccctctcatagctccaggtccatcctggaagaagttccagggcagcttctgtgaatttgtgaggacattggtctgtcagtgccagtacagcctcctctatgatggcttccctatggacgacctcatctccctgctcactggcctctcagactcacaagtccgcgccttccgtcacactagcaccctggctgctatgaaactgatgacctccctggtaaaagttgccctccaactgagtgtgcaccaagataacaatcagcgtcagtatgaggctgaaagaaacaaggggccagggcagagggcacctgagcggctggagagcctgttggagaaacgcaaagagctccaagagcatcaagaggagattgaggggatgatgaatgccctcttcaggggtgtctttgttcatcggtacagggatgtccttcctgagatccgtgctatctgcattgaggaaattgggtgttggatgcaaagctacagcacgtctttcctcaccgacagctatttaaaatatattggttggactctgcatgataagcaccgagaagtccgcctgaagtgtgtgaaggccctgaaagggctgtacggtaaccgggacctgaccacacgcctggagctcttcaccagccgcttcaaggaccggatggtttccatggtcatggacagagagtatgatgtggcagtggaggctgtcagattactgatacttatccttaagaacatggaaggggtgctgacggacgcggattgtgagagcgtctacccagttgtgtatgcctctcatcgaggcctggcctctgccgcaggcgaatttctgtactggaaactcttctaccctgagtgcgagataagaatgatgggtggaagagagcaacgccagagcccaggcgcccagaggactttcttccagcttctgctgtccttctttgtggagagcgagctccatgaccacgctgcttacttagtagacagtctgtgggactgtgcaggggctcggctgaaggactgggagggtctgacaagcctgctgctggagaaggaccagaacctgggtgatgtgcaggagagcacactgatagaaatccttgtgtccagtgcccggcaagcttcagaggggcacccgcctgtgggccgggtcactgggaggaagggcttaacctctaaggagcgcaagacccaagccgatgacagggtgaagttgactgagcacctcatccccctgctgccccagctcctggccaagttctcagctgatgcagagaaggtcactcccctgctccagcttctcagctgctttgacctccacatctactgcactgggcgcttggagaagcacctggagctgttcctgcagcaactccaggaggtggtggtgaagcatgcagagccagcggtgcttgaggctggggcgcatgccctctacctgctctgtaatcccgaattcactttcttcagccgggcggactttgcccgcagccagctagtagatttgctgactgaccgcttccagcaggagcttgaagagctgttacagtcgtccttcctagatgaggatgaggtatataatctggcagccactctgaaacgcctctctgccttctacaacactcatgacctgactcgctgggagctctatgagccatgttgccaactcctgcagaaggctgtggacacaggagaggttcctcaccaggttatcctgccagccttgactcttgtctatttttccattctctggacactaacccacatttctaaatcagatgcttcccagaagcagctgtcgagtttgagggacagaatggtggccttctgtgaactctgccagagttgcctctcagatgtggatactgagatccaggagcaggcttttgtcttattaagtgatctacttctcatctttagccctcagatgattgttgggggccgtgatttccttaggccacttgtcttttttcctgaagctactctccagtctgagctagccagcttcctcatggaccacgtcttcatccagccgggagacctgggcagtggtgattcccaggaggatcatttacagatagagcggctacaccagcggcgccgcctcctagccgggttctgcaagctgttgctttatggggtgctggagatggatgcagcctcagatgttttcaaacactacaacaagttctacaatgactatggtgacattatcaaggaaacattaactagagcaaggcagattgaccgaagtcattgttcccgaatcctgctgctgagcctcaagcagctgtacacagaactgctgcaggagcatgggccccagggcctgaatgagcttcctgccttcatcgagatgagggacctggcccggaggtttgccttgagttttggaccccagcagctgcagaaccgtgacctcgtggtcatgctacacaaggaaggcatccagttctccttgtctgagcttcctccagctggctcctccaatcagcctccaaatctggcattcctggagctcctttcagagttttccccccgactcttccatcaggacaagcagcttttactgtcctatctagaaaagtgcctgcagcatgtctcccaggcacctggccatccctggggcccagtcaccacctactgccactccctcagccctgtggagaacacagcagagaccagccctcaggtcctccccagctccaagaggaggcgcgttgaagggcctgccaagcctaacagagaggacgtctcctcgtcccaggaagaaagtctgcagctgaacagcatcccgcccacgcccaccctcacctccacagctgtgaagagcaggcagcccctgtgggggttgaaagagatggaggaagaagatggctcagagttggattttgcccagggtcagcccgtcgcaggcaccgagaggtcaaggttcttgggtccacaatatttccagactccacacaacccttcaggtcctggcctgggcaaccagctgatgcgactcagccttatggaagaggacgaggaagaagagttagaaatccaggatgagtcaaatgaagaacggcaggatacagacatgcaagcaagtagctactcttccaccagtgagcgcgggctggacctcttagattctacagagctggatattgaggatttctgacaggactctgggcccctccccagctccactccctacctcaagaatgtgaccatttggaaaaggcaaagagaaaaggagcaaaatgaagcattcccccaggcttcagccctgggctctgaggggaaagagttgggcattgtttttctaacctaacctttccctctggggtagagaagccgagagaccctgtcctccctaatgcactgtggcccagtccccttgcctttttcctgttctgtttggagtggagaagggcagcacctctgtgtttaatggaaatagcccatagtctcctggatttttggaacatctttctcagcctattttgtgtcctaatgattcgctcaataaacatgtttgaatcc

SEQ ID NO: 187095 - DNA, 3056 bp, Homo sapiens
  Payload ID: 16836
  Gene Symbol: STAG3
  Gene Name: stromal antigen 3
  ENST ID: ENST00000451963
  CDS Start-End: 1-519
cccagctccaagaggaggcgcgttgaagggcctgccaagcctaacagagaggacgtctcctcgtcccaggaagaaagtctgcagctgaacagcatcccgcccacgcccaccctcacctccacagctgtgaagagcaggcagcccctgtgggggttgaaagagatggaggaagaagatggctcagagttggattttgcccagggcagtcagcccgtcgcaggcaccgagaggtcaaggttcttgggtccacaatatttccagactccacacaacccttcaggtcctggcctgggcaaccagctgatgcgactcagccttatggaagaggacgaggaagaagagttagaaatccaggatgagtcaaatgaagaacggcaggatacagacatgcaagcaagtagctactcttccaccagtgagcgcgggctggacctcttagattctacagagctggatattgagattactgagagtcttccgttactaggtaagtcaccgcatccttataactccaggtgacactgactggggtttatgggatgaaagaggagtgtgtgcttggatgatggggtgtgatagtgaaggggtgaaaggtttcttctcacacatagacatcgtgaggtcttccttgagctctttagagccttccctcgggataggatgaaatactgagatcctagaaaggattcacaaaacgtgtcactcatcagcgcagattcaccgattcacccctagatgtgtgtgggatttggatggcagagagaaacaggcactgaagatttttggtcaggacagggcagagaaataagaagagttgaaaattcaccaaaggatagataaacccagggcgtttagagaaaacctgtagtgtgcaaaggagcccagaatcctggggcaacttggagggaaatatacttaatttgattcactaagttaggcccagtgaagggattgggtggcataggtagaagccgaaaaataaagtatcttgtattgctggagtagcctctgtttctgaggtcacatccaaacttagcgaggcagcttaacctggtgagagacatgggttcaactcctggcttctgcactgctagggcagaggactgctgtttgctgacacaatcttggtgcgttggaagtgaaagggaagaggcactggtggctgtgctttgggcccgagcagccagaagccagttgccatcacctatgacgaggagacagcgcctggggcagagcccagtatggggtgcgttcagggtagatcaggaggtatgagtgggtagtgggcgagccaggctgggggttgtgggggaggcctgcattgcaggtgtaagcgtgggacccacatcagattggtagtgggtcatgcatgctgggctggctctcaggtcctccctgctggcttcccactcccaggggctttctcctccgattccttagctgggtgaggggcgggacagagccctttcttagggaagcccggcaccccttgctgtccagggaaggggagtccttctagcccctgacagcttctctgcccctcccctggcctccccaggcctagccagggctgggttctcacccacctgtgccgccctgccttgttacctggaagcacagccttggggactgagcaggccctcactgtcactttaagaagggaatcagccactttgtgctcaccacctctggggaaggtgtgagaggagagaaggaagtggctgtttggctgctgacaacatgaagacttcctgcgatgagaacagaggcacaggtgccggccctgcagcccccagaacctggactggagggggccatggggcaccggaccctggtcctgccctgggtgctgctgaccttgtgtgtcactgcggggaccccggaggtgtgggttcaagttcggatggaggccaccgagctctcgtccttcaccatccgttgtgggttcctggggtctggctccatctccctggtgactgtgagctgggggggccccaacggtgctggggggaccacgctggctgtgttgcacccagaacgtggcatccggcaatgggcccctgctcgccaggcccgctgggaaacccagagcagcatctctctcatcctggaaggctctggggccagcagcccctgcgccaacaccaccttctgctgcaagtttgcgtccttccctgagggctcctgggaggcctgtgggagcctcccgcccagctcagacccaggtggggccggggcgaggggtccaggagggcagggaggggctcgggaactggccacccatctgattcttgtctccgtgcccagggctctctgccccgccgactcctgcccccattctgcgggcagacctggccgggatcttgggggtctcaggagtcctcctctttggctgtgtctacctccttcatctgctgcgccgacataagcaccgccctgcccctaggctccagccgtcccgcaccagcccccaggcaccgagagcacgagcatgggcaccaagccaggcctcccaggctgctcttcacgtcccttatgccactatcaacaccagctgccgcccagctactttggacacagctcacccccatggggggccgtcctggtgggcgtcactccccacccacgctgcacaccggccccagggccctgccgcctgggcctccacacccatccctgcacgtggcagctttgtctctgttgagaatggactctacgctcaggcaggggagaggcctcctcacactggtcccggcctcactcttttccctgaccctcgggggcccagggccatggaaggacccttaggagttcgatgagagagaccatgaggccactgggctttccccctcccaggcctcctgggtgtcacccccttactttaattcttgggcctccaataagtgtcccataggtgtctggccaggcccacctgctgcggatgtggtctctgtgtgtgcgtgtgtgggcacaggtgtgagtgtgtgagtgacagttaccccatttcagtcatttcctgctgcaactaagtcagcaacacagtttctctgatgtcg

SEQ ID NO: 187096 - DNA, 920 bp, Homo sapiens
  Payload ID: 16836
  Gene Symbol: STAG3
  Gene Name: stromal antigen 3
  ENST ID: ENST00000412190
  CDS Start-End: 1-555
ggccatccctggggcccagtcaccacctactgccactccctcagccctgtggagaacacagcagagaccagccctcaggtcctccccagctccaagaggaggcgcgttgaagggcctgccaagcctaacagagaggacgtctcctcgtcccaggaagaaagtctgcagctgaacagcatcccgcccacgcccaccctcacctccacagctgtgaagagcaggcagcccctgtgggggttgaaagagatggaggaagaagatggctcagagttggattttgcccagggcagtcagcccgtcgcaggcaccgagaggtcaaggttcttgggtccacaatatttccagactccacacaacccttcaggtcctggcctgggcaaccagctgatgcgactcagccttatggaagaggacgaggaagaagagttagaaatccaggatgagtcaaatgaagaacggcaggatacagacatgcaagcaagtagctactcttccaccagtgagcgcgggctggacctcttagattctacagagctggatattgaggatttctgacaggactctgggcccctccccagctccactccctacctcaagaatgtgaccatttggaaaaggcaaagagaaaaggagcaaaatgaagcattcccccaggcttcagccctgggctctgaggggaaagagttgggcattgtttttctaacctaacctttccctctggggtagagaagccgagagaccctgtcctccctaatgcactgtggcccagtccccttgcctttttcctgttctgtttggagtggagaagggcagcacctctgtgtttaatggaaatagcccatagtctcctggatttttggaacatctttctcagcctattttgtgtcctaatgattcgctcaataaacatgtttgaatcc

SEQ ID NO: 187097 - DNA, 699 bp, Homo sapiens
  Payload ID: 16836
  Gene Symbol: STAG3
  Gene Name: stromal antigen 3
  ENST ID: ENST00000439782
  CDS Start-End: 135-699
gcccccggaagggcagcggcgggcgcctgtgtggaaggtggggtggccagagacacccgagggacctgagctggatcgccatacctaccctgtggtcctcatcttcctggcctcatagctcctcctctccaagcatgtcttccccgttgcaaagagctgtgggagataccaagagggccttgtctgcatcttctagttcctctgccagtctaccctttgatgacagggactcaaaccatacctcagaggggaatggcgactctttgttagctgatgaagacactgactttgaagacagcttgaatcgcaatgtgaagaagagagcagcaaaacgaccaccgaaaacaacaccggtggcaaaacatccaaagaaagggtcccgagtggtacatcgtcatagccggaaacagtcagagccaccagccaatgatcttttcaatgctgtgaaagccgccaaaagtgacatgcaggactcgggggactaccctctcatagctccaggtccatcctggaagaagttccagggcagcttctgtgaatttgtgaggacattggtctgtcagtgccagtacagcctcctctatgatggcttccctatggacgacctcatctccctgctcactggcctctcagactcacaagtccgcgccttccgtcacactagcaccctggctgctatgaaactgatgacctccctgg

SEQ ID NO: 187098 - DNA, 4450 bp, Homo sapiens
  Payload ID: 16836
  Gene Symbol: STAG3
  Gene Name: stromal antigen 3
  Uniprot ID: Q9UJ98
  ENST ID: ENST00000426455
  CDS Start-End: 408-4085
gtggcgatccggctcaaaaggcggggcctgggtggaacctagcctatggcaattgagaagccagattaaaggggttactagcagtctggtccaaaacccgcccaatggagtaggagattgagggtagcgggggtgggacctgggtgggggcggggctaaagcgggccgcccgcgtgcccaagcccacgtgagagggcaggacgcctgagagcttgaggccacacgaggctgtggagcggcgtgactcaaacgtggcgcgcatcagctcgcacacttccaaacctcgcgatagctactggccctgggcgagccgttgggattgcgcttgcgcacagcgtgtcttctggatcgccatacctaccctgtggtcctcatcttcctggcctcatagctcctcctctccaagcatgtcttccccgttgcaaagagctgtgggagataccaagagggccttgtctgcatcttctagttcctctgccagtctaccctttgatgacagggactcaaaccatacctcagaggggaatggcgactctttgttagctgatgaagacactgactttgaagacagcttgaatcgcaatgtgaagaagagagcagcaaaacgaccaccgaaaacaacaccggtggcaaaacatccaaagaaagggtcccgagtggtacatcgtcatagccggaaacagtcagagccaccagccaatgatcttttcaatgctgtgaaagccgccaaaagtgacatgcagtctttggtagatgagtggctggatagctacaagcaagaccaggatgcaggatttctggagcttgttaactttttcatccaatcttgcggatgtaaaggcattgtgacccctgagatgttcaagaagatgtccaactcagagatcatccagcacctaacagagcagtttaatgaggactcgggggactaccctctcatagctccaggtccatcctggaagaagttccagggcagcttctgtgaatttgtgaggacattggtctgtcagtgccagtacagcctcctctatgatggcttccctatggacgacctcatctccctgctcactggcctctcagactcacaagtccgcgccttccgtcacactagcaccctggctgctatgaaactgatgacctccctggtaaaagttgccctccaactgagtgtgcaccaagataacaatcagcgtcagtatgaggctgaaagaaacaaggggccagggcagagggcacctgagcggctggagagcctgttggagaaacgcaaagagctccaagagcatcaagaggagattgaggggatgatgaatgccctcttcaggggtgtctttgttcatcggtacagggatgtccttcctgagatccgtgctatctgcattgaggaaattgggtgttggatgcaaagctacagcacgtctttcctcaccgacagctatttaaaatatattggttggactctgcatgataagcaccgagaagtccgcctgaagtgtgtgaaggccctgaaagggctgtacggtaaccgggacctgaccacacgcctggagctcttcaccagccgcttcaaggaccggatggtttccatggtcatggacagagagtatgatgtggcagtggaggctgtcagattactgatacttatccttaagaacatggaaggggtgctgacggacgcggattgtgagagcgtctacccagttgtgtatgcctctcatcgaggcctggcctctgccgcaggcgaatttctgtactggaaactcttctaccctgagtgcgagataagaatgatgggtggaagagagcaacgccagagcccaggcgcccagaggactttcttccagcttctgctgtccttctttgtggagagcgagctccatgaccacgctgcttacttagtagacagtctgtgggactgtgcaggggctcggctgaaggactgggagggtctgacaagcctgctgctggagaaggaccagaacctgggtgatgtgcaggagagcacactgatagaaatccttgtgtccagtgcccggcaagcttcagaggggcacccgcctgtgggccgggtcactgggaggaagggcttaacctctaaggagcgcaagacccaagccgatgacagggtgaagttgactgagcacctcatccccctgctgccccagctcctggccaagttctcagctgatgcagagaaggtcactcccctgctccagcttctcagctgctttgacctccacatctactgcactgggcgcttggagaagcacctggagctgttcctgcagcaactccaggaggtggtggtgaagcatgcagagccagcggtgcttgaggctggggcgcatgccctctacctgctctgtaatcccgaattcactttcttcagccgggcggactttgcccgcagccagctagtagatttgctgactgaccgcttccagcaggagcttgaagagctgttacagtcgtccttcctagatgaggatgaggtatataatctggcagccactctgaaacgcctctctgccttctacaacactcatgacctgactcgctgggagctctatgagccatgttgccaactcctgcagaaggctgtggacacaggagaggttcctcaccaggttatcctgccagccttgactcttgtctatttttccattctctggacactaacccacatttctaaatcagatgcttcccagaagcagctgtcgagtttgagggacagaatggtggccttctgtgaactctgccagagttgcctctcagatgtggatactgagatccaggagcaggcttttgtcttattaagtgatctacttctcatctttagccctcagatgattgttgggggccgtgatttccttaggccacttgtcttttttcctgaagctactctccagtctgagctagccagcttcctcatggaccacgtcttcatccagccgggagacctgggcagtggtgattcccaggaggatcatttacagatagagcggctacaccagcggcgccgcctcctagccgggttctgcaagctgttgctttatggggtgctggagatggatgcagcctcagatgttttcaaacactacaacaagttctacaatgactatggtgacattatcaaggaaacattaactagagcaaggcagattgaccgaagtcattgttcccgaatcctgctgctgagcctcaagcagctgtacacagaactgctgcaggagcatgggccccagggcctgaatgagcttcctgccttcatcgagatgagggacctggcccggaggtttgccttgagttttggaccccagcagctgcagaaccgtgacctcgtggtcatgctacacaaggaaggcatccagttctccttgtctgagcttcctccagctggctcctccaatcagcctccaaatctggcattcctggagctcctttcagagttttccccccgactcttccatcaggacaagcagcttttactgtcctatctagaaaagtgcctgcagcatgtctcccaggcacctggccatccctggggcccagtcaccacctactgccactccctcagccctgtggagaacacagcagagaccagccctcaggtcctccccagctccaagaggaggcgcgttgaagggcctgccaagcctaacagagaggacgtctcctcgtcccaggaagaaagtctgcagctgaacagcatcccgcccacgcccaccctcacctccacagctgtgaagagcaggcagcccctgtgggggttgaaagagatggaggaagaagatggctcagagttggattttgcccagggtcagcccgtcgcaggcaccgagaggtcaaggttcttgggtccacaatatttccagactccacacaacccttcaggtcctggcctgggcaaccagctgatgcgactcagccttatggaagaggacgaggaagaagagttagaaatccaggatgagtcaaatgaagaacggcaggatacagacatgcaagcaagtagctactcttccaccagtgagcgcgggctggacctcttagattctacagagctggatattgaggatttctgacaggactctgggcccctccccagctccactccctacctcaagaatgtgaccatttggaaaaggcaaagagaaaaggagcaaaatgaagcattcccccaggcttcagccctgggctctgaggggaaagagttgggcattgtttttctaacctaacctttccctctggggtagagaagccgagagaccctgtcctccctaatgcactgtggcccagtccccttgcctttttcctgttctgtttggagtggagaagggcagcacctctgtgtttaatggaaatagcccatagtctcctggatttttggaacatctttctcagcctattttgtgtcctaatgattcgctcaataaacatgtttgaatcc

SEQ ID NO: 187099 - DNA, 534 bp, Homo sapiens
  Payload ID: 16836
  Gene Symbol: STAG3
  Gene Name: stromal antigen 3
  ENST ID: ENST00000422690
  CDS Start-End: 199-534
atctttcgcccccggaagggcagcggcgggcgcctgtgtggaaggtggggtggccagagacacccgagggacctgaggtggggaccttccctgaaccctgctcggccagaagtcactcttccaggctctgacagctggatcgccatacctaccctgtggtcctcatcttcctggcctcatagctcctcctctccaagcatgtcttccccgttgcaaagagctgtgggagataccaagagggccttgtctgcatcttctagttcctctgccagtctaccctttgatgacagggactcaaaccatacctcagaggggaatggcgactctttgttagctgatgaagacactgactttgaagacagcttgaatcgcaatgtgaagaagagagcagcaaaacgaccaccgaaaacaacaccggtggcaaaacatccaaagaaagggtcccgagtggtacatcgtcatagccggaaacagtcagagccaccagccaatgatcttttcaatgctgtgaaagccgccaaaagtgacatgcag

SEQ ID NO: 187100 - DNA, 605 bp, Homo sapiens
  Payload ID: 16836
  Gene Symbol: STAG3
  Gene Name: stromal antigen 3
  ENST ID: ENST00000416412
  CDS Start-End: 172-605
gggcgagccgttgggattgcgcttgcgcacagcgtgtcttgtacgttcccgcgcttttctggaatctttcgcccccggaagggcagcggcgggcgcctgtgtggaagctggatcgccatacctaccctgtggtcctcatcttcctggcctcatagctcctcctctccaagcatgtcttccccgttgcaaagagctgtgggagataccaagagggccttgtctgcatcttctagttcctctgccagtctaccctttgatgacagggactcaaaccatacctcagaggggaatggcgactctttgttagctgatgaagacactgactttgaagacagcttgaatcgcaatgtgaagaagagagcagcaaaacgaccaccgaaaacaacaccggtggcaaaacatccaaagaaagggtcccgagtggtacatcgtcatagccggaaacagtcagagccaccagccaatgatcttttcaatgctgtgaaagccgccaaaagtgacatgcagtctttggtagatgagtggctggatagctacaagcaagaccaggatgcaggatttctggagcttgttaactttttcatccaatcttgcggatgtaaagg

SEQ ID NO: 187101 - DNA, 4380 bp, Homo sapiens
  Payload ID: 16836
  Gene Symbol: STAG3
  Gene Name: stromal antigen 3
  ENST ID: ENST00000615138
  CDS Start-End: 328-4008
agcccacgtgagagggcaggacgcctgagagcttgaggccacacgaggctgtggagcggcgtgactcaaacgtggcgcgcatcagctcgcacacttccaaacctcgcgatagctactggccctgggcgagccgttgggattgcgcttgcgcacagcgtgtcttgtacgttcccgcgcttttctggaatctttcgcccccggaagggcagcggcgggcgcctgtgtggaaggtggggtggccagagacacccgagggacctgagctggatcgccatacctaccctgtggtcctcatcttcctggcctcatagctcctcctctccaagcatgtcttccccgttgcaaagagctgtgggagataccaagagggccttgtctgcatcttctagttcctctgccagtctaccctttgatgacagggactcaaaccatacctcagaggggaatggcgactctttgttagctgatgaagacactgactttgaagacagcttgaatcgcaatgtgaagaagagagcagcaaaacgaccaccgaaaacaacaccggtggcaaaacatccaaagaaagggtcccgagtggtacatcgtcatagccggaaacagtcagagccaccagccaatgatcttttcaatgctgtgaaagccgccaaaagtgacatgcagtctttggtagatgagtggctggatagctacaagcaagaccaggatgcaggatttctggagcttgttaactttttcatccaatcttgcggatgtaaaggcattgtgacccctgagatgttcaagaagatgtccaactcagagatcatccagcacctaacagagcagtttaatgaggactcgggggactaccctctcatagctccaggtccatcctggaagaagttccagggcagcttctgtgaatttgtgaggacattggtctgtcagtgccagtacagcctcctctatgatggcttccctatggacgacctcatctccctgctcactggcctctcagactcacaagtccgcgccttccgtcacactagcaccctggctgctatgaaactgatgacctccctggtaaaagttgccctccaactgagtgtgcaccaagataacaatcagcgtcagtatgaggctgaaagaaacaaggggccagggcagagggcacctgagcggctggagagcctgttggagaaacgcaaagagctccaagagcatcaagaggagattgaggggatgatgaatgccctcttcaggggtgtctttgttcatcggtacagggatgtccttcctgagatccgtgctatctgcattgaggaaattgggtgttggatgcaaagctacagcacgtctttcctcaccgacagctatttaaaatatattggttggactctgcatgataagcaccgagaagtccgcctgaagtgtgtgaaggccctgaaagggctgtacggtaaccgggacctgaccacacgcctggagctcttcaccagccgcttcaaggaccggatggtttccatggtcatggacagagagtatgatgtggcagtggaggctgtcagattactgatacttatccttaagaacatggaaggggtgctgacggacgcggattgtgagagcgtctacccagttgtgtatgcctctcatcgaggcctggcctctgccgcaggcgaatttctgtactggaaactcttctaccctgagtgcgagataagaatgatgggtggaagagagcaacgccagagcccaggcgcccagaggactttcttccagcttctgctgtccttctttgtggagagcgagctccatgaccacgctgcttacttagtagacagtctgtgggactgtgcaggggctcggctgaaggactgggagggtctgacaagcctgctgctggagaaggaccagaacctgggtgatgtgcaggagagcacactgatagaaatccttgtgtccagtgcccggcaagcttcagaggggcacccgcctgtgggccgggtcactgggaggaagggcttaacctctaaggagcgcaagacccaagccgatgacagggtgaagttgactgagcacctcatccccctgctgccccagctcctggccaagttctcagctgatgcagagaaggtcactcccctgctccagcttctcagctgctttgacctccacatctactgcactgggcgcttggagaagcacctggagctgttcctgcagcaactccaggaggtggtggtgaagcatgcagagccagcggtgcttgaggctggggcgcatgccctctacctgctctgtaatcccgaattcactttcttcagccgggcggactttgcccgcagccagctagtagatttgctgactgaccgcttccagcaggagcttgaagagctgttacagtcgtccttcctagatgaggatgaggtatataatctggcagccactctgaaacgcctctctgccttctacaacactcatgacctgactcgctgggagctctatgagccatgttgccaactcctgcagaaggctgtggacacaggagaggttcctcaccaggttatcctgccagccttgactcttgtctatttttccattctctggacactaacccacatttctaaatcagatgcttcccagaagcagctgtcgagtttgagggacagaatggtggccttctgtgaactctgccagagttgcctctcagatgtggatactgagatccaggagcaggcttttgtcttattaagtgatctacttctcatctttagccctcagatgattgttgggggccgtgatttccttaggccacttgtcttttttcctgaagctactctccagtctgagctagccagcttcctcatggaccacgtcttcatccagccgggagacctgggcagtggtgattcccaggaggatcatttacagatagagcggctacaccagcggcgccgcctcctagccgggttctgcaagctgttgctttatggggtgctggagatggatgcagcctcagatgttttcaaacactacaacaagttctacaatgactatggtgacattatcaaggaaacattaactagagcaaggcagattgaccgaagtcattgttcccgaatcctgctgctgagcctcaagcagctgtacacagaactgctgcaggagcatgggccccagggcctgaatgagcttcctgccttcatcgagatgagggacctggcccggaggtttgccttgagttttggaccccagcagctgcagaaccgtgacctcgtggtcatgctacacaaggaaggcatccagttctccttgtctgagcttcctccagctggctcctccaatcagcctccaaatctggcattcctggagctcctttcagagttttccccccgactcttccatcaggacaagcagcttttactgtcctatctagaaaagtgcctgcagcatgtctcccaggcacctggccatccctggggcccagtcaccacctactgccactccctcagccctgtggagaacacagcagagaccagccctcaggtcctccccagctccaagaggaggcgcgttgaagggcctgccaagcctaacagagaggacgtctcctcgtcccaggaagaaagtctgcagctgaacagcatcccgcccacgcccaccctcacctccacagctgtgaagagcaggcagcccctgtgggggttgaaagagatggaggaagaagatggctcagagttggattttgcccagggcagtcagcccgtcgcaggcaccgagaggtcaaggttcttgggtccacaatatttccagactccacacaacccttcaggtcctggcctgggcaaccagctgatgcgactcagccttatggaagaggacgaggaagaagagttagaaatccaggatgagtcaaatgaagaacggcaggatacagacatgcaagcaagtagctactcttccaccagtgagcgcgggctggacctcttagattctacagagctggatattgaggatttctgacaggactctgggcccctccccagctccactccctacctcaagaatgtgaccatttggaaaaggcaaagagaaaaggagcaaaatgaagcattcccccaggcttcagccctgggctctgaggggaaagagttgggcattgtttttctaacctaacctttccctctggggtagagaagccgagagaccctgtcctccctaatgcactgtggcccagtccccttgcctttttcctgttctgtttggagtggagaagggcagcacctctgtgtttaatggaaatagcccatagtctcctggatttttggaacatctttctcagcctattttgtgtcctaatgattcgctcaataaacatgtttgaatccacacgtt

SEQ ID NO: 187102 - DNA, 4203 bp, Homo sapiens
  Payload ID: 16836
  Gene Symbol: STAG3
  Gene Name: stromal antigen 3
  Uniprot ID: Q9UJ98
  ENST ID: ENST00000620100
  CDS Start-End: 328-3831
agcccacgtgagagggcaggacgcctgagagcttgaggccacacgaggctgtggagcggcgtgactcaaacgtggcgcgcatcagctcgcacacttccaaacctcgcgatagctactggccctgggcgagccgttgggattgcgcttgcgcacagcgtgtcttgtacgttcccgcgcttttctggaatctttcgcccccggaagggcagcggcgggcgcctgtgtggaaggtggggtggccagagacacccgagggacctgagctggatcgccatacctaccctgtggtcctcatcttcctggcctcatagctcctcctctccaagcatgtcttccccgttgcaaagagctgtgggagataccaagagggccttgtctgcatcttctagttcctctgccagtctaccctttgatgacagggactcaaaccatacctcagaggggaatggcgactctttgttagctgatgaagacactgactttgaagacagcttgaatcgcaatgtgaagaagagagcagcaaaacgaccaccgaaaacaacaccggtggcaaaacatccaaagaaagggtcccgagtggtacatcgtcatagccggaaacagtcagagccaccagccaatgatcttttcaatgctgtgaaagccgccaaaagtgacatgcaggactcgggggactaccctctcatagctccaggtccatcctggaagaagttccagggcagcttctgtgaatttgtgaggacattggtctgtcagtgccagtacagcctcctctatgatggcttccctatggacgacctcatctccctgctcactggcctctcagactcacaagtccgcgccttccgtcacactagcaccctggctgctatgaaactgatgacctccctggtaaaagttgccctccaactgagtgtgcaccaagataacaatcagcgtcagtatgaggctgaaagaaacaaggggccagggcagagggcacctgagcggctggagagcctgttggagaaacgcaaagagctccaagagcatcaagaggagattgaggggatgatgaatgccctcttcaggggtgtctttgttcatcggtacagggatgtccttcctgagatccgtgctatctgcattgaggaaattgggtgttggatgcaaagctacagcacgtctttcctcaccgacagctatttaaaatatattggttggactctgcatgataagcaccgagaagtccgcctgaagtgtgtgaaggccctgaaagggctgtacggtaaccgggacctgaccacacgcctggagctcttcaccagccgcttcaaggaccggatggtttccatggtcatggacagagagtatgatgtggcagtggaggctgtcagattactgatacttatccttaagaacatggaaggggtgctgacggacgcggattgtgagagcgtctacccagttgtgtatgcctctcatcgaggcctggcctctgccgcaggcgaatttctgtactggaaactcttctaccctgagtgcgagataagaatgatgggtggaagagagcaacgccagagcccaggcgcccagaggactttcttccagcttctgctgtccttctttgtggagagcgagctccatgaccacgctgcttacttagtagacagtctgtgggactgtgcaggggctcggctgaaggactgggagggtctgacaagcctgctgctggagaaggaccagaacctgggtgatgtgcaggagagcacactgatagaaatccttgtgtccagtgcccggcaagcttcagaggggcacccgcctgtgggccgggtcactgggaggaagggcttaacctctaaggagcgcaagacccaagccgatgacagggtgaagttgactgagcacctcatccccctgctgccccagctcctggccaagttctcagctgatgcagagaaggtcactcccctgctccagcttctcagctgctttgacctccacatctactgcactgggcgcttggagaagcacctggagctgttcctgcagcaactccaggaggtggtggtgaagcatgcagagccagcggtgcttgaggctggggcgcatgccctctacctgctctgtaatcccgaattcactttcttcagccgggcggactttgcccgcagccagctagtagatttgctgactgaccgcttccagcaggagcttgaagagctgttacagtcgtccttcctagatgaggatgaggtatataatctggcagccactctgaaacgcctctctgccttctacaacactcatgacctgactcgctgggagctctatgagccatgttgccaactcctgcagaaggctgtggacacaggagaggttcctcaccaggttatcctgccagccttgactcttgtctatttttccattctctggacactaacccacatttctaaatcagatgcttcccagaagcagctgtcgagtttgagggacagaatggtggccttctgtgaactctgccagagttgcctctcagatgtggatactgagatccaggagcaggcttttgtcttattaagtgatctacttctcatctttagccctcagatgattgttgggggccgtgatttccttaggccacttgtcttttttcctgaagctactctccagtctgagctagccagcttcctcatggaccacgtcttcatccagccgggagacctgggcagtggtgattcccaggaggatcatttacagatagagcggctacaccagcggcgccgcctcctagccgggttctgcaagctgttgctttatggggtgctggagatggatgcagcctcagatgttttcaaacactacaacaagttctacaatgactatggtgacattatcaaggaaacattaactagagcaaggcagattgaccgaagtcattgttcccgaatcctgctgctgagcctcaagcagctgtacacagaactgctgcaggagcatgggccccagggcctgaatgagcttcctgccttcatcgagatgagggacctggcccggaggtttgccttgagttttggaccccagcagctgcagaaccgtgacctcgtggtcatgctacacaaggaaggcatccagttctccttgtctgagcttcctccagctggctcctccaatcagcctccaaatctggcattcctggagctcctttcagagttttccccccgactcttccatcaggacaagcagcttttactgtcctatctagaaaagtgcctgcagcatgtctcccaggcacctggccatccctggggcccagtcaccacctactgccactccctcagccctgtggagaacacagcagagaccagccctcaggtcctccccagctccaagaggaggcgcgttgaagggcctgccaagcctaacagagaggacgtctcctcgtcccaggaagaaagtctgcagctgaacagcatcccgcccacgcccaccctcacctccacagctgtgaagagcaggcagcccctgtgggggttgaaagagatggaggaagaagatggctcagagttggattttgcccagggtcagcccgtcgcaggcaccgagaggtcaaggttcttgggtccacaatatttccagactccacacaacccttcaggtcctggcctgggcaaccagctgatgcgactcagccttatggaagaggacgaggaagaagagttagaaatccaggatgagtcaaatgaagaacggcaggatacagacatgcaagcaagtagctactcttccaccagtgagcgcgggctggacctcttagattctacagagctggatattgaggatttctgacaggactctgggcccctccccagctccactccctacctcaagaatgtgaccatttggaaaaggcaaagagaaaaggagcaaaatgaagcattcccccaggcttcagccctgggctctgaggggaaagagttgggcattgtttttctaacctaacctttccctctggggtagagaagccgagagaccctgtcctccctaatgcactgtggcccagtccccttgcctttttcctgttctgtttggagtggagaagggcagcacctctgtgtttaatggaaatagcccatagtctcctggatttttggaacatctttctcagcctattttgtgtcctaatgattcgctcaataaacatgtttgaatccacacgtt

SEQ ID NO: 187103 - DNA, 2079 bp, Homo sapiens
  Payload ID: 16837
  Gene Symbol: SDF4
  Gene Name: stromal cell derived factor 4
  Uniprot ID: Q9BRK5
  ENST ID: ENST00000263741
  CDS Start-End: 294-1340
ggcgtcccctccgtgaggtcgcgcccgttcgcaccgcccccgcccgcaagaaagatggcagtggcctgatccgggcccgttggcggcgtcactgacgcttcgctccggtcctcggatcccgagcgcggggaggcagaccgactgtgagctgcttgtccccatcctgcggccgtcctggggacacagagccctccgtggtgcccggggattggattggagccaggacctcacttcctcctctgcccctgcccctgcccctcccagcacctggcccacaccctgcagcccgccccatggtctggccctgggtggcgatggcgtccaggtggggtcccctcattggcctggctccgtgctgcctctggctcctgggggcagtccttctgatggacgcgtctgcacggcctgccaaccactcgtccactcgagagagagtagccaacagggaggagaatgagatcctgcccccagaccacctgaacggggtgaagctggagatggacgggcacctcaatcgcggcttccaccaggaggtcttcctaggcaaggacctgggtggctttgatgaggacgcggagccgcggcggagccggaggaagctgatggtcatcttttccaaggtggatgtgaacactgaccggaagatcagtgccaaggagatgcagcgctggatcatggagaagacggccgagcacttccaggaggccatggaggagagcaagacacacttccgcgccgtggaccctgacggggacggtcacgtgtcttgggacgagtataaggtgaagtttttggcgagtaaaggccatagcgagaaggaggttgccgacgccatcaggctcaacgaggaactcaaagtggatgaggaaacacaggaagtcctggagaacctgaaggaccgctggtaccaggcggacagcccccctgcagacctgctgctgacggaggaggagttcctgtcgttcctccaccccgagcacagccggggaatgctcaggttcatggtgaaggagatcgtccgggacctggaccaggacggtgacaagcagctctctgtgcccgagttcatctccctgcccgtgggcaccgtggagaaccagcagggccaggacattgacgacaactgggtgaaagacagaaaaaaggagtttgaggagctcattgactccaaccacgacggcatcgtgaccgccgaggagctggagaacgtgcccacactcccgctgcagccaataggcaccttaaatagccacttcgtgcggctggccgcggagctcggagggggaaaggcgacgctgacctgtgccccgctcgcccgcagagctacatggaccccatgaacgagtacaacgcgctgaacgaggccaagcagatgatcgccgtcgccgacgagaaccagaaccaccacctggagcccgaggaggtgctcaagtacagcgagttcttcacgggcagcaagctggtggactacgcgcgcagcgtgcacgaggagttttgagcgcccggccgcgccccgcgccgccccccacgcaccaccggggcggcctcgcgggtgactccgggctccgtggctgtcccggaccccacctcttccctgccgcccgccaccggccgaccgaccgcggctgccccagttgatgagcggcgtgtcccctctgcagcgcgcaccccggcggggctttggctgtgacgcggtcggggcgcggggctgggctgtggccccgcggcgccgcctcctccctggtccctcgaaatcgtggcatctcacttctgagaacgaaatctcgcttcagtcactctgccgaaggcgctgacggcatcgcggccggaacctctgggcccggcccctcccagggccgccgctccgtgggaaaaaacagctcctccatttccttgaaaactgaacgattattaaaaatagattaaacttcgctggaaatgagtagccaggaagttcaggggagggtgccgggtccttcccgggcctggcgtgtcggagccacccaggtcccgcagctgccgctgagaaaatgcaaatatttgttgtgacaagaatcacatacatttactttaaatata

SEQ ID NO: 187104 - DNA, 1956 bp, Homo sapiens
  Payload ID: 16837
  Gene Symbol: SDF4
  Gene Name: stromal cell derived factor 4
  Uniprot ID: Q9BRK5
  ENST ID: ENST00000360001
  CDS Start-End: 264-1352
gcaccgcccccgcccgcaagaaagatggcagtggcctgatccgggcccgttggcggcgtcactgacgcttcgctccggtcctcggatcccgagcgcggggaggcagaccgactgtgagctgcttgtccccatcctgcggccgtcctggggacacagagccctccgtggtgcccggggattggattggagccaggacctcacttcctcctctgcccctgcccctgcccctcccagcacctggcccacaccctgcagcccgccccatggtctggccctgggtggcgatggcgtccaggtggggtcccctcattggcctggctccgtgctgcctctggctcctgggggcagtccttctgatggacgcgtctgcacggcctgccaaccactcgtccactcgagagagagtagccaacagggaggagaatgagatcctgcccccagaccacctgaacggggtgaagctggagatggacgggcacctcaatcgcggcttccaccaggaggtcttcctaggcaaggacctgggtggctttgatgaggacgcggagccgcggcggagccggaggaagctgatggtcatcttttccaaggtggatgtgaacactgaccggaagatcagtgccaaggagatgcagcgctggatcatggagaagacggccgagcacttccaggaggccatggaggagagcaagacacacttccgcgccgtggaccctgacggggacggtcacgtgtcttgggacgagtataaggtgaagtttttggcgagtaaaggccatagcgagaaggaggttgccgacgccatcaggctcaacgaggaactcaaagtggatgaggaaacacaggaagtcctggagaacctgaaggaccgctggtaccaggcggacagcccccctgcagacctgctgctgacggaggaggagttcctgtcgttcctccaccccgagcacagccggggaatgctcaggttcatggtgaaggagatcgtccgggacctggaccaggacggtgacaagcagctctctgtgcccgagttcatctccctgcccgtgggcaccgtggagaaccagcagggccaggacattgacgacaactgggtgaaagacagaaaaaaggagtttgaggagctcattgactccaaccacgacggcatcgtgaccgccgaggagctggagagctacatggaccccatgaacgagtacaacgcgctgaacgaggccaagcagatgatcgccgtcgccgacgagaaccagaaccaccacctggagcccgaggaggtgctcaagtacagcgagttcttcacgggcagcaagctggtggactacgcgcgcagcgtgcacgaggagttttgagcgcccggccgcgccccgcgccgccccccacgcaccaccggggcggcctcgcgggtgactccgggctccgtggctgtcccggaccccacctcttccctgccgcccgccaccggccgaccgaccgcggctgccccagttgatgagcggcgtgtcccctctgcagcgcgcaccccggcggggctttggctgtgacgcggtcggggcgcggggctgggctgtggccccgcggcgccgcctcctccctggtccctcgaaatcgtggcatctcacttctgagaacgaaatctcgcttcagtcactctgccgaaggcgctgacggcatcgcggccggaacctctgggcccggcccctcccagggccgccgctccgtgggaaaaaacagctcctccatttccttgaaaactgaacgattattaaaaatagattaaacttcgctggaaatgagtagccaggaagttcaggggagggtgccgggtccttcccgggcctggcgtgtcggagccacccaggtcccgcagctgccgctgagaaaatgcaaatatttgttgtgacaagaatcacatacatttactttaaatatagttgccttttttggtcagcttca

SEQ ID NO: 187105 - DNA, 728 bp, Homo sapiens
  Payload ID: 16837
  Gene Symbol: SDF4
  Gene Name: stromal cell derived factor 4
  ENST ID: ENST00000403997
  CDS Start-End: 1-728
gctggagatggacgggcacctcaatcgcggcttccaccaggaggtcttcctaggcaaggacctgggtggctttgatgaggacgcggagccgcggcggagccggaggaagctgatggtcatcttttccaaggtggatgtgaacactgaccggaagatcagtgccaaggagatgcagcgctggatcatggagaagacggccgagcacttccaggaggccatggaggagagcaagacacacttccgcgccgtggaccctgacggggacggtcacgtgtcttgggacgagtataaggtgaagtttttggcgagtaaaggccatagcgagaaggaggttgccgacgccatcaggctcaacgaggaactcaaagtggatgaggaaagcagcacctctcggaactttctggatttgcgtgctggcgtctgtcggcctcgatacccacaggctgcgcccctctcagcacaggaagtcctggagaacctgaaggaccgctggtaccaggcggacagcccccctgcagacctgctgctgacggaggaggagttcctgtcgttcctccaccccgagcacagccggggaatgctcaggttcatggtgaaggagatcgtccgggacctggaccaggacggtgacaagcagctctctgtgcccgagttcatctccctgcccgtgggcaccgtggagaaccagcagggccaggacattgacgacaactgggtgaaagacagaa

SEQ ID NO: 187106 - DNA, 2095 bp, Homo sapiens
  Payload ID: 16837
  Gene Symbol: SDF4
  Gene Name: stromal cell derived factor 4
  ENST ID: ENST00000465727
  CDS Start-End: 294-1058
ggcgtcccctccgtgaggtcgcgcccgttcgcaccgcccccgcccgcaagaaagatggcagtggcctgatccgggcccgttggcggcgtcactgacgcttcgctccggtcctcggatcccgagcgcggggaggcagaccgactgtgagctgcttgtccccatcctgcggccgtcctggggacacagagccctccgtggtgcccggggattggattggagccaggacctcacttcctcctctgcccctgcccctgcccctcccagcacctggcccacaccctgcagcccgccccatggtctggccctgggtggcgatggcgtccaggtggggtcccctcattggcctggctccgtgctgcctctggctcctgggggcagtccttctgatggacgcgtctgcacggcctgccaaccactcgtccactcgagagagagtagccaacagggaggagaatgagatcctgcccccagaccacctgaacggggtgaagctggagatggacgggcacctcaatcgcggcttccaccaggaggtcttcctaggcaaggacctgggtggctttgatgaggacgcggagccgcggcggagccggaggaagctgatggtcatcttttccaaggtggatgtgaacactgaccggaagatcagtgccaaggagatgcagcgctggatcatggagaagacggccgagcacttccaggaggccatggaggagagcaagacacacttccgcgccgtggaccctgacggggacggtcacgtgtcttgggacgagtataaggtgaagtttttggcgagtaaaggccatagcgagaaggaggttgccgacgccatcaggctcaacgaggaactcaaagtggatgaggaaagctgcgcccctctcagcacaggaagtcctggagaacctgaaggaccgctggtaccaggcggacagcccccctgcagacctgctgctgacggaggaggagttcctgtcgttcctccaccccgagcacagccggggaatgctcaggttcatggtgaaggagatcgtccgggacctggaccaggacggtgacaagcagctctctgtgcccgagttcatctccctgcccgtgggcaccgtggagaaccagcagggccaggacattgacgacaactgggtgaaagacagaaaaaaggagtttgaggagctcattgactccaaccacgacggcatcgtgaccgccgaggagctggagaacgtgcccacactcccgctgcagccaataggcaccttaaatagccacttcgtgcggctggccgcggagctcggagggggaaaggcgacgctgacctgtgccccgctcgcccgcagagctacatggaccccatgaacgagtacaacgcgctgaacgaggccaagcagatgatcgccgtcgccgacgagaaccagaaccaccacctggagcccgaggaggtgctcaagtacagcgagttcttcacgggcagcaagctggtggactacgcgcgcagcgtgcacgaggagttttgagcgcccggccgcgccccgcgccgccccccacgcaccaccggggcggcctcgcgggtgactccgggctccgtggctgtcccggaccccacctcttccctgccgcccgccaccggccgaccgaccgcggctgccccagttgatgagcggcgtgtcccctctgcagcgcgcaccccggcggggctttggctgtgacgcggtcggggcgcggggctgggctgtggccccgcggcgccgcctcctccctggtccctcgaaatcgtggcatctcacttctgagaacgaaatctcgcttcagtcactctgccgaaggcgctgacggcatcgcggccggaacctctgggcccggcccctcccagggccgccgctccgtgggaaaaaacagctcctccatttccttgaaaactgaacgattattaaaaatagattaaacttcgctggaaatgagtagccaggaagttcaggggagggtgccgggtccttcccgggcctggcgtgtcggagccacccaggtcccgcagctgccgctgagaaaatgcaaatatttgttgtgacaagaatcacatacatttactttaaatata

SEQ ID NO: 187107 - DNA, 1568 bp, Homo sapiens
  Payload ID: 16838
  Gene Symbol: SDF2
  Gene Name: stromal cell-derived factor 2
  Uniprot ID: Q99470
  ENST ID: ENST00000247020
  CDS Start-End: 300-935
cgggagtgggcgggccatttcttgttctctctcccgctctcggaagctttcgtctcgtgggtgcgaaaggtaaccgaagcggctcaggaaggcagctgtcactgagcccctggaacagagcgagagtatcgtaagtaaccaggctcagccggtttctcaggccgctctagtcaaataaaccataaagatcagactcgggcttcttcacttccttctctccgtggtttcgccattagcttccggttccggggaggggccgagttttcttcgaagatttggggctccgcgatacagttaggatggctgtagtacctctgctgttgttggggggtttgtggagcgctgtgggagcgtccagcctgggtgtcgttacttgcggctccgtggtgaagctactcaatacgcgccacaacgtccgactgcactcacacgacgtgcgctatgggtcaggtagtgggcagcagtcagtgacaggtgtaacctctgtggatgacagcaacagttactggaggatacgggggaagagtgccacagtgtgtgagaggggaacccccatcaagtgtggccagcccatccggctgacacatgtcaacactggccgaaacctccatagtcaccacttcacttcacctctttctggaaaccaggaagtgagtgcttttggtgaggaaggtgaaggtgattatctggatgactggacagtgctctgtaatggaccctactgggtgagagatggtgaggtgcggttcaaacactcttccactgaggtactgctgtctgtcacaggagaacaatatggtcgacctatcagtgggcaaaaagaggtgcatggcatggcccagccaagtcagaacaactactggaaagccatggaaggcatcttcatgaagcccagtgagttgttgaaggcagaagcccaccatgcagagctgtgaatctagaggctctgagccactgttaacgcacaatgttcacagacatctgttgctgcctcaccttgggatccctgccacaagttccttgggcagtggccatgtcaccattgagatgaagatatacaacagaaaatagtggctgtgtttggaagcttcagccctgcacatttgaactagtcactctcccagacttgcgtgggtcagttctttctgagtagaggacttgctggtaaaggggcagatgctttttattagtactgataaaacaaactgagggaaacatccctcttagctgggaaacttttactcttcaggagcttggcatcatggactgttaatgtatgtgattttccccctattttctctctccaaaatgataaaaacaataattttattatgagtcactgtgttgttatttattaggtgtgctatttcattagctgcttaatcctttgagtcctaagactctttggagacgctatgaagctccaatgtgggcccttttaagagcttttcttgcatacaaaccttttctccctctactttgacttctctccaggcatctcatctttaatagatctttgactaattatagctaaaaactctcagagaatacagcataataaatagcca

SEQ ID NO: 187108 - DNA, 444 bp, Homo sapiens
  Payload ID: 16838
  Gene Symbol: SDF2
  Gene Name: stromal cell-derived factor 2
  ENST ID: ENST00000587788
  CDS Start-End: 1-151
ccgaaacctccatagtcaccacttcacttcacctctttctggaaaccaggagaacaatatggtcgacctatcagtgggcaaaaagaggtgcatggcatggcccagccaagtcagaacaactactggaaagccatggaaggcatcttcatgaagcccagtgagttgttgaaggcagaagcccaccatgcagagctgtgaatctagaggctctgagccactgttaacgcacaatgttcacagacatctgttgctgcctcaccttgggatccctgccacaagttccttgggcagtggccatgtcaccattgagatgaagatatacaacagaaaatagtggctgtgtttggaagcttcagccctgcacatttgaactagtcactctcccagacttgcgtgggtcagttctttctgagtagaggacttgctggtaaaggggcagatgct

SEQ ID NO: 187109 - DNA, 735 bp, Homo sapiens
  Payload ID: 16838
  Gene Symbol: SDF2
  Gene Name: stromal cell-derived factor 2
  ENST ID: ENST00000591903
  CDS Start-End: 1-315
agcctgggtgtcgttacttgcggctccgtggtgaagctactcaatacgcgccacaacgtccgactgcactcacacgacgtgcgctatgggtcaggtagtgggcagcagtcagtgacaggtgtaacctctgtggatgacagcaacagttactggaggatacgggggaagagtgccacagtgtgtgagaggggaacccccatcaagtgtggccagcccatccggctgacacatgtcaacactggccgaaacctccatagtcaccacttcacttcacctctttctggaaaccagttgctctgtaaggtgatattgtgatcattttatagaggagaaaacaaaggctcaaaggatttacagaagaagggatcaagttgagattcaaggaagtgagtgcttttggtgaggaaggtgaaggtgattatctggatgactggacagtgctctgtaatggaccctactgggtgagagatggtgaggtgcggttcaaacactcttccactgaggtactgctgtctgtcacaggagaacaatatggtcgacctatcagtgggcaaaaagaggtgcatggcatggcccagccaagtcagaacaactactggaaagccatggaaggcatcttcatgaagcccagtgagttgttgaaggcagaagcccaccatgcagagctgtgaatctagaggctctgagccactgttaacgcacaatgttcacagacatctgttgctgcctcacctt

SEQ ID NO: 187110 - DNA, 865 bp, Homo sapiens
  Payload ID: 16839
  Gene Symbol: SDF2L1
  Gene Name: stromal cell-derived factor 2-like 1
  Uniprot ID: Q9HCN8
  ENST ID: ENST00000248958
  CDS Start-End: 77-742
ctgtcagaaccggattgggccgcggcggggacggaagcggcccctgggcccgaggggctggagccgggccggggcgatgtggagcgcgggccgcggcggggctgcctggccggtgctgttggggctgctgctggcgctgttagtgccgggcggtggtgccgccaagaccggtgcggagctcgtgacctgcgggtcggtgctgaagctgctcaatacgcaccaccgcgtgcggctgcactcgcacgacatcaaatacggatccggcagcggccagcaatcggtgaccggcgtagaggcgtcggacgacgccaatagctactggcggatccgcggcggctcggagggcgggtgcccgcgcgggtccccggtgcgctgcgggcaggcggtgaggctcacgcatgtgcttacgggcaagaacctgcacacgcaccacttcccgtcgccgctgtccaacaaccaggaggtgagtgcctttggggaagacggcgagggcgacgacctggacctatggacagtgcgctgctctggacagcactgggagcgtgaggctgctgtgcgcttccagcatgtgggcacctctgtgttcctgtcagtcacgggtgagcagtatggaagccccatccgtgggcagcatgaggtccacggcatgcccagtgccaacacgcacaatacgtggaaggccatggaaggcatcttcatcaagcctagtgtggagccctctgcaggtcacgatgaactctgagtgtgtggatggatgggtggatggagggtggcaggtggggcgtctgcagggccactcttggcagagactttgggtttgtaggggtcctcaagtgcctttgtgattaaagaatgttggtctatg

SEQ ID NO: 187111 - DNA, 4038 bp, Homo sapiens
  Payload ID: 16840
  Gene Symbol: STIM1
  Gene Name: stromal interaction molecule 1
  Uniprot ID: Q13586
  ENST ID: ENST00000300737
  CDS Start-End: 570-2627
gctggacctgggcaccgccagccgcctgggcacgggactgggcgggggcgctgacctcggcctaggaggcccaggatcccggagacgcccgcgccctcaggaccctgcgggtcgcacgccctccccagcttctgctgctcgccgctcttcggcagggcgaggtcaggtgcccccttctcgcctctcttctcttctcttctcttcctcctccacttctgtgcccgcggagactccggccgcccccttccgcaggggtgtagtaatctgcggagctgacagcagccccgcagccaccctgcccgaagtctccggaagcggcacgagctcaggccgccgcagccccggcggacccactgttggacctgaggagccagccctcctcccgcacccaaacttggagcacttgacctttggctgttggagggggcaggctcgcgggtggctggacagctgcggagccgcgagggcatcttgcctggagaccgtcggctgcactcccgggctcctggctttgcctctgggatcccgaggtgtccacatcagacgcatgttgactgagacctagagtcatggatgtatgcgtccgtcttgccctgtggctcctctggggactcctcctgcaccagggccagagcctcagccatagtcacagtgagaaggcgacaggaaccagctcgggggccaactctgaggagtccactgcagcagagttttgccgaattgacaagcccctgtgtcacagtgaggatgagaaactcagcttcgaggcagtccgtaacatccacaaactgatggacgatgatgccaatggtgatgtggatgtggaagaaagtgatgagttcctgagggaagacctcaattaccatgacccaacagtgaaacacagcaccttccatggtgaggataagctcatcagcgtggaggacctgtggaaggcatggaagtcatcagaagtatacaattggaccgtggatgaggtggtacagtggctgatcacatatgtggagctgcctcagtatgaggagaccttccggaagctgcagctcagtggccatgccatgccaaggctggctgtcaccaacaccaccatgacagggactgtgctgaagatgacagaccggagtcatcggcagaagctgcagctgaaggctctggatacagtgctctttgggcctcctctcttgactcgccataatcacctcaaggacttcatgctggtggtgtctatcgttattggtgtgggcggctgctggtttgcctatatccagaaccgttactccaaggagcacatgaagaagatgatgaaggacttggaggggttacaccgagctgagcagagtctgcatgaccttcaggaaaggctgcacaaggcccaggaggagcaccgcacagtggaggtggagaaggtccatctggaaaagaagctgcgcgatgagatcaaccttgctaagcaggaagcccagcggctgaaggagctgcgggagggtactgagaatgagcggagccgccaaaaatatgctgaggaggagttggagcaggttcgggaggccttgaggaaagcagagaaggagctagaatctcacagctcatggtatgctccagaggcccttcagaagtggctgcagctgacacatgaggtggaggtgcaatattacaacatcaagaagcaaaatgctgagaagcagctgctggtggccaaggagggggctgagaagataaaaaagaagagaaacacactctttggcaccttccacgtggcccacagctcttccctggatgatgtagatcataaaattctaacagctaagcaagcactgagcgaggtgacagcagcattgcgggagcgcctgcaccgctggcaacagatcgagatcctctgtggcttccagattgtcaacaaccctggcatccactcactggtggctgccctcaacatagaccccagctggatgggcagtacacgccccaaccctgctcacttcatcatgactgacgacgtggatgacatggatgaggagattgtgtctcccttgtccatgcagtcccctagcctgcagagcagtgttcggcagcgcctgacggagccacagcatggcctgggatctcagagggatttgacccattccgattcggagtcctccctccacatgagtgaccgccagcgtgtggcccccaaacctcctcagatgagccgtgctgcagacgaggctctcaatgccatgacttccaatggcagccaccggctgatcgagggggtccacccagggtctctggtggagaaactgcctgacagccctgccctggccaagaaggcattactggcgctgaaccatgggctggacaaggcccacagcctgatggagctgagcccctcagccccacctggtggctctccacatttggattcttcccgttctcacagccccagctccccagacccagacacaccatctccagttggggacagccgagccctgcaagccagccgaaacacacgcattccccacctggctggcaagaaggctgtggctgaggaggataatggctctattggcgaggaaacagactccagcccaggccggaagaagtttcccctcaaaatctttaagaagcctcttaagaagtaggcaggatggggtggcagtaaagggacagcttgtccttccctgggtgttctgtctctccttccctcccttccttcaagataactggccccaagagtggggcatgggaagggctggtccaggggtctgggcactgtacatacctgccccctcatccttgggtccttcattattatttattaactgaccaccatggcctgcctgccctgcctccgtcccaaccatgggctgctgctgtcactccctctccacttcagtgcatgtcttagttgctgttccctcagctcccagctccacctctggggttcagcttctgtctctgctgtcccagttttgaggtttggtttcttgtttctgtctcttgctttcgggctcctccctcccaccactccccaacttcccctagcagttgcagggaagataggacgagtagcttctgacatgtgtgcctcagatctgttccaccccactcacagtggttctgtttgctccagactggggctagggcctaatctttgaagtttgttctttggtattgatgtgggtcagaaggagcctcatcctaatctcactcaggcctccagggatccatgggggagtgaaaccaattctcagagaacaacccaccagagacttttaaagagaggccaggcttgggaatgggttgggagaggcatctgttcattggagcatgagtggatgccagaactgtaggttataaggcagtcactttttctctctactcccacccacacctgcctccctcttacccctgctcccccacactgcaggaggatttgtctctaagaggtgctgccccaaagctccccaagcatcaatactcctagggctcaggacaagtggctcccctggccaggagagccacagccatgatacagggctcttatggagccctggagttgttgggcaaggatgctgtcattttttgaaccaaaagacaaacaggttaaaaggaaaaaaagtaatctgaatttcccaagtgcctacgctgcatattccccttgttagatcccattttcatgttactttgtagccttggccagaggctcaaaaaggacacaaccagtttggggaaggggtggctaaggaagatggtataggtgaaggcggctgtgtgaccactttcccccacccttcccaccctctagacaactctctcccttacctgtttttgctatggctgtaaaggtatttttcctctgccccactccctgccatacctttatcctgggatcctattttgggcctggggtgggtatacctggggctggtcttaggagggtgctaggctgcagactgccttgtactccctggacaccctcaaatggggttttctgtgttatttcataaaattctttgaagtccaataaagcatgtaggagattttaaccac

SEQ ID NO: 187112 - DNA, 583 bp, Homo sapiens
  Payload ID: 16840
  Gene Symbol: STIM1
  Gene Name: stromal interaction molecule 1
  ENST ID: ENST00000525055
  CDS Start-End: 336-583
acttcctgagatggctctgtcagttggcagtcctacctgtcagctcagcccattttagaaatcattttccaaagaattttaaccttaaggaagctctcctctttctattgaacaggctgtaccaggcataggggccccaggaaccagagacacagcaggctacctttgcatttcctatattggacaaaataagaggaagaaaggaagccaaacagctctcccaggctcagttggcagcagagaggagttgagagttttgccgaattgacaagcccctgtgtcacagtgaggatgagaaactcagcttcgaggcagtccgtaacatccacaaactgatggacgatgatgccaatggtgatgtggatgtggaagaaagtgatgagttcctgagggaagacctcaattaccatgacccaacagtgaaacacagcaccttccatggtgaggataagctcatcagcgtggaggacctgtggaaggcatggaagtcatcagaagtatacaattggaccgtggatgaggtggtacagtggctgatcacatatgtggagctgcctcagtatgaggagaccttccggaagct

SEQ ID NO: 187113 - DNA, 552 bp, Homo sapiens
  Payload ID: 16840
  Gene Symbol: STIM1
  Gene Name: stromal interaction molecule 1
  ENST ID: ENST00000530554
  CDS Start-End: 311-552
ttctgaaatacagcagccaggggagatgggtggccttcaggtgtaacacacacacacaggttagaaagcagtgtgtgtctgtgtgtgtatttgttgctgggtggtcgaatttgtggaggtcttgtttcaagaaacttttgctgacaagagcaaaggtcactggaactcacacttcatatctctgaagagataaatatgtaattaagacaactgaaataacttcgatgagttttgccgaattgacaagcccctgtgtcacagtgaggatgagaaactcagcttcgaggcagtccgtaacatccacaaactgatggacgatgatgccaatggtgatgtggatgtggaagaaagtgatgagttcctgagggaagacctcaattaccatgacccaacagtgaaacacagcaccttccatggtgaggataagctcatcagcgtggaggacctgtggaaggcatggaagtcatcagaagtatacaattggaccgtggatgaggtggtacagtggctgatcacatatgtggagctgcctcagtatgaggagaccttccg

SEQ ID NO: 187114 - DNA, 625 bp, Homo sapiens
  Payload ID: 16840
  Gene Symbol: STIM1
  Gene Name: stromal interaction molecule 1
  ENST ID: ENST00000525403
  CDS Start-End: 294-625
aagatctgctgacagcacgcttgagaagagaacaggaagtgcaggctttgttgaaggaggctcaggcgtggctctgtcttctttggcgcactcattctcaagtcgctgacacctcctccaccagagaggtagctgggagaatgagatgcagggaggaagcatttacaggccccaccgaaaaaccttaaagggctgagagcttgagggcagagttttgccgaattgacaagcccctgtgtcacagtgaggatgagaaactcagcttcgaggcagtccgtaacatccacaaactgatggacgatgatgccaatggtgatgtggatgtggaagaaagtgatgagttcctgagggaagacctcaattaccatgacccaacagtgaaacacagcaccttccatggtgaggataagctcatcagcgtggaggacctgtggaaggcatggaagtcatcagaagtatacaattggaccgtggatgaggtggtacagtggctgatcacatatgtggagctgcctcagtatgaggagaccttccggaagctgcagctcagtggccatgccatgccaaggctggctgtcaccaacaccaccatgacagggactgtgctgaagatgacagaccggag

SEQ ID NO: 187115 - DNA, 581 bp, Homo sapiens
  Payload ID: 16840
  Gene Symbol: STIM1
  Gene Name: stromal interaction molecule 1
  ENST ID: ENST00000528656
  CDS Start-End: 231-581
acttcctgagatggctctgtcagttggcagtcctacctgtcagctcagcccattttagaaatcattttccaaagaattttaaccttaaggaagctctcctctttctattgaacaggctgtaccaggcataggggccccaggaaccagagttttgccgaattgacaagcccctgtgtcacagtgaggatgagaaactcagcttcgaggcagtccgtaacatccacaaactgatggacgatgatgccaatggtgatgtggatgtggaagaaagtgatgagttcctgagggaagacctcaattaccatgacccaacagtgaaacacagcaccttccatggtgaggataagctcatcagcgtggaggacctgtggaaggcatggaagtcatcagaagtatacaattggaccgtggatgaggtggtacagtggctgatcacatatgtggagctgcctcagtatgaggagaccttccggaagctgcagctcagtggccatgccatgccaaggctggctgtcaccaacaccaccatgacagggactgtgctgaagatgacagaccggagtcatcggcagaagctgcag

SEQ ID NO: 187116 - DNA, 668 bp, Homo sapiens
  Payload ID: 16840
  Gene Symbol: STIM1
  Gene Name: stromal interaction molecule 1
  ENST ID: ENST00000532990
  CDS Start-End: 466-668
caatttgagtgtcagaagacagagtttcagtctctgctcagctgtatgaccttatggaagtgacctcccttctcagggttcaatttcctcctctctggagccagaaagttttaacgagggaggctttctggctctgatgttgaatatatgtctcttgtttattactgctgacgggggccctctgtttcacctgttttttccacatactccatcctacaagagacacagcaggctacctttgcatttcctatattggacaaaataagaggaagaaaggaagccaaacagctctcccaggctcagttggcagcagagaggagttgaggtgagaagctggtgtcaccgaattgcccagtaaatcagctgtgtggttggtaaccagagttttgccgaattgacaagcccctgtgtcacagtgaggatgagaaactcagcttcgaggcagtccgtaacatccacaaactgatggacgatgatgccaatggtgatgtggatgtggaagaaagtgatgagttcctgagggaagacctcaattaccatgacccaacagtgaaacacagcaccttccatggtgaggataagctcatcagcgtggaggacctgtggaaggcatggaagtcatcagaagtatacaattggaccgtggatgaggtggtacagtggctgat

SEQ ID NO: 187117 - DNA, 1214 bp, Homo sapiens
  Payload ID: 16840
  Gene Symbol: STIM1
  Gene Name: stromal interaction molecule 1
  ENST ID: ENST00000526596
  CDS Start-End: 1-1214
aggagcaccgcacagtggaggtggagaaggtccatctggaaaagaagctgcgcgatgagatcaaccttgctaagcaggaagcccagcggctgaaggagctgcgggagggtactgagaatgagcggagccgccaaaaatatgctgaggaggagttggagcaggttcgggaggccttgaggaaagcagagaaggagctagaatctcacagctcatggtatgctccagaggcccttcagaagtggctgcagctgacacatgaggtggaggtgcaatattacaacatcaagaagcaaaatgctgagaagcagctgctggtggccaaggagggggctgagaagataaaaaagaagagaaacacactctttggcaccttccacgtggcccacagctcttccctggatgatgtagatcataaaattctaacagctaagcaagcactgagcgaggtgacagcagcattgcgggagcgcctgcaccgctggcaacagatcgagatcctctgtggcttccagattgtcaacaaccctggcatccactcactggtggctgccctcaacatagaccccagctggatgggcagtacacgccccaaccctgctcacttcatcatgactgacgacgtggatgacatggatgaggagattgtgtctcccttgtccatgcagtatgctgcctggctgatggggcgtaggttcagtgaccgctctctctgctctacatccgccggctcggatgatcagtccctctggaaataccccgcccctagcctgcagagcagtgttcggcagcgcctgacggagccacagcatggcctgggatctcagagggatttgacccattccgattcggagtcctccctccacatgagtgaccgccagcgtgtggcccccaaacctcctcagatgagccgtgctgcagacgaggctctcaatgccatgacttccaatggcagccaccggctgatcgagggggtccacccagggtctctggtggagaaactgcctgacagccctgccctggccaagaaggcattactggcgctgaaccatgggctggacaaggcccacagcctgatggagctgagcccctcagccccacctggtggctctccacatttggattcttcccgttctcacagccccagctccccagacccagacacaccatctccagttggggacagccgagccctgcaagccagccgaaacacacgc

SEQ ID NO: 187118 - DNA, 580 bp, Homo sapiens
  Payload ID: 16840
  Gene Symbol: STIM1
  Gene Name: stromal interaction molecule 1
  ENST ID: ENST00000532919
  CDS Start-End: 163-580
agcaatgactaccctgagcaggtggctgcagtaggagtggagaactgtgcttgaagaggacatgaaacctgtaggcaagagttttgccgaattgacaagcccctgtgtcacagtgaggatgagaaactcagcttcgaggcagtccgtaacatccacaaactgatggacgatgatgccaatggtgatgtggatgtggaagaaagtgatgagttcctgagggaagacctcaattaccatgacccaacagtgaaacacagcaccttccatggtgaggataagctcatcagcgtggaggacctgtggaaggcatggaagtcatcagaagtatacaattggaccgtggatgaggtggtacagtggctgatcacatatgtggagctgcctcagtatgaggagaccttccggaagctgcagctcagtggccatgccatgccaaggctggctgtcaccaacaccaccatgacagggactgtgctgaagatgacagaccggagtcatcggcagaagctgcagctgaaggctctggatacagtgctctttgggcctcctctcttgactcgccataatcacctcaaggact

SEQ ID NO: 187119 - DNA, 415 bp, Homo sapiens
  Payload ID: 16840
  Gene Symbol: STIM1
  Gene Name: stromal interaction molecule 1
  ENST ID: ENST00000524822
  CDS Start-End: 253-415
tttctgtttttgaaagatgaagcctgggaggtgccagagctatgccagctgctatggggccagaaacagtcccatcaatatattgtgaggacactcaagaagcatatggaaaaggccatgtggagaactagtgtttcctgacaacaatcagcatggacttgctgggaatagttttgccgaattgacaagcccctgtgtcacagtgaggatgagaaactcagcttcgaggcagtccgtaacatccacaaactgatggacgatgatgccaatggtgatgtggatgtggaagaaagtgatgagttcctgagggaagacctcaattaccatgacccaacagtgaaacacagcaccttccatggtgaggataagctcatcagcgtggaggacctgtggaaggcatggaagtcatcagaag

SEQ ID NO: 187120 - DNA, 2080 bp, Homo sapiens
  Payload ID: 16840
  Gene Symbol: STIM1
  Gene Name: stromal interaction molecule 1
  ENST ID: ENST00000533977
  CDS Start-End: 214-1752
aattccatttttgtcatcagtggttaattaaaattttttttccttttctatatttcatttcaatagcacattagcaggtttatatataatgacagtgagtttagattaggataattcataaatcccagaatcactgggtcatatgacatgacagtttgacctgggctgcacaggaaatgcatttataaatggctggctgtcaccaacaccaccatgacagggactgtgctgaagatgacagaccggagtcatcggcagaagctgcagctgaaggctctggatacagtgctctttgggcctcctctcttgactcgccataatcacctcaaggacttcatgctggtggtgtctatcgttattggtgtgggcggctgctggtttgcctatatccagaaccgttactccaaggagcacatgaagaagatgatgaaggacttggaggggttacaccgagctgagcagagtctgcatgaccttcaggaaaggctgcacaaggcccaggaggagcaccgcacagtggaggtggagaaggtccatctggaaaagaagctgcgcgatgagatcaaccttgctaagcaggaagcccagcggctgaaggagctgcgggagggtactgagaatgagcggagccgccaaaaatatgctgaggaggagttggagcaggttcgggaggccttgaggaaagcagagaaggagctagaatctcacagctcatggtatgctccagaggcccttcagaagtggctgcagctgacacatgaggtggaggtgcaatattacaacatcaagaagcaaaatgctgagaagcagctgctggtggccaaggagggggctgagaagataaaaaagaagagaaacacactctttggcaccttccacgtggcccacagctcttccctggatgatgtagatcataaaattctaacagctaagcaagcactgagcgaggtgacagcagcattgcgggagcgcctgcaccgctggcaacagatcgagatcctctgtggcttccagattgtcaacaaccctggcatccactcactggtggctgccctcaacatagaccccagctggatgggcagtacacgccccaaccctgctcacttcatcatgactgacgacgtggatgacatggatgaggagattgtgtctcccttgtccatgcagtcccctagcctgcagagcagtgttcggcagcgcctgacggagccacagcatggcctgggatctcagagggatttgacccattccgattcggagtcctccctccacatgagtgaccgccagcgtgtggcccccaaacctcctcagatgagccgtgctgcagacgaggctctcaatgccatgacttccaatggcagccaccggctgatcgagggggtccacccagggtctctggtggagaaactgcctgacagccctgccctggccaagaaggcattactggcgctgaaccatgggctggacaaggcccacagcctgatggagctgagcccctcagccccacctggtggctctccacatttggattcttcccgttctcacagccccagctccccagacccagacacaccatctccagttggggacagccgagccctgcaagccagccgaaacacacgcattccccacctggctggcaagaaggctgtggctgaggaggataatggctctattggcgaggaaacagactccagcccaggccggaagaagtttcccctcaaaatctttaagaagcctcttaagaagtaggcaggatggggtggcagtaaagggacagcttgtccttccctgggtgttctgtctctccttccctcccttccttcaagataactggccccaagagtggggcatgggaagggctggtccaggggtctgggcactgtacatacctgccccctcatccttgggtccttcattattatttattaactgaccaccatggcctgcctgccctgcctccgtcccaaccatgggctgctgctgtcactccctctccacttcagtgcatgtcttagttgctgttccctcagctcccagctccacctctggggttcagcttctgtctctgctgtcccag

SEQ ID NO: 187121 - DNA, 524 bp, Homo sapiens
  Payload ID: 16840
  Gene Symbol: STIM1
  Gene Name: stromal interaction molecule 1
  ENST ID: ENST00000532610
  CDS Start-End: 127-524
ctgttagatgagcatgccctgggattgggatagaattcacatgagttttgccgaattgacaagcccctgtgtcacagtgaggatgagaaactcagcttcgaggcagtccgtaacatccacaaactgatggacgatgatgccaatggtgatgtggatgtggaagaaagtgatgagttcctgagggaagacctcaattaccatgacccaacagtgaaacacagcaccttccatggtgaggataagctcatcagcgtggaggacctgtggaaggcatggaagtcatcagaagtatacaattggaccgtggatgaggtggtacagtggctgatcacatatgtggagctgcctcagtatgaggagaccttccggaagctgcagctcagtggccatgccatgccaaggctggctgtcaccaacaccaccatgacagggactgtgctgaagatgacagaccggagtcatcggcagaagctgcagctgaaggctctggatacagtgctctttgggcctcctctctgtgagtc

SEQ ID NO: 187122 - DNA, 2184 bp, Homo sapiens
  Payload ID: 16840
  Gene Symbol: STIM1
  Gene Name: stromal interaction molecule 1
  Uniprot ID: Q13586
  ENST ID: ENST00000527651
  CDS Start-End: 90-1712
gaccgtcggctgcactcccgggctcctggctttgcctctgggatcccgaggtgtccacatcagacgcatgttgactgagacctagagtcatggatgtatgcgtccgtcttgccctgtggctcctctggggactcctcctgcaccagggccagagcctcagccatagtcacagtgagaaggcgacaggaaccagctcgggggccaactctgaggagtccactgcagcagagttttgccgaattgacaagcccctgtgtcacagtgaggatgagaaactcagcttcgaggcagtccgtaacatccacaaactgatggacgatgatgccaatggtgatgtggatgtggaagaaagtgatgagttcctgagggaagacctcaattaccatgacccaacagtgaaacacagcaccttccatggtgaggataagctcatcagcgtggaggacctgtggaaggcatggaagtcatcagaagtatacaattggaccgtggatgaggtggtacagtggctgatcacatatgtggagctgcctcagtatgaggagaccttccggaagctgcagctcagtggccatgccatgccaaggctggctgtcaccaacaccaccatgacagggactgtgctgaagatgacagaccggagtcatcggcagaagctgcagctgaaggctctggatacagtgctctttgggcctcctctcttgactcgccataatcacctcaaggacttcatgctggtggtgtctatcgttattggtgtgggcggctgctggtttgcctatatccagaaccgttactccaaggagcacatgaagaagatgatgaaggacttggaggggttacaccgagctgagcagagtctgcatgaccttcaggaaaggctgcacaaggcccaggaggagcaccgcacagtggaggtggagaaggtccatctggaaaagaagctgcgcgatgagatcaaccttgctaagcaggaagcccagcggctgaaggagctgcgggagggtactgagaatgagcggagccgccaaaaatatgctgaggaggagttggagcaggttcgggaggccttgaggaaagcagagaaggagctagaatctcacagctcatggtatgctccagaggcccttcagaagtggctgcagctgacacatgaggtggaggtgcaatattacaacatcaagaagcaaaatgctgagaagcagctgctggtggccaaggagggggctgagaagataaaaaagaagagaaacacactctttggcaccttccacgtggcccacagctcttccctggatgatgtagatcataaaattctaacagctaagcaagcactgagcgaggtgacagcagcattgcgggagcgcctgcaccgctggcaacagatcgagatcctctgtggcttccagattgtcaacaaccctggcatccactcactggtggctgccctcaacatagaccccagctggatgggcagtacacgccccaaccctgctcacttcatcatgactgacgacgtggatgacatggatgaggagattgtgtctcccttgtccatgcagtcccctagcctgcagagcagtgttcggcagcgcctgacggagccacagcatggcctgggatctcagagaggatcatctctaaaggcaaacaggctctctagtaagggatttgacccattccgattcggagtcctccctccacatgagtgaccgccagcgtgtggcccccaaacctcctcagatgagccgtgctgcagacgaggctctcaatgccatgacttccaatggcagccaccggctgatcgagggggtccacccagggtctctggtggagaaactgcctgacagccctgccctggccaagaaggcattactggcgctgaaccatgggctggacaaggcccacagcctgatggagctgagcccctcagccccacctggtggctctccacatttggattcttcccgttctcacagccccagctccccagacccagacacaccatctccagttggggacagccgagccctgcaagccagccgaaacacacgcattccccacctggctggcaagaaggctgtggctgaggaggataatggctctattggcgaggaaacagactccagcccaggccggaagaagtttcccctcaaaatctttaagaagcctcttaagaagtag

SEQ ID NO: 187123 - DNA, 4356 bp, Homo sapiens
  Payload ID: 16840
  Gene Symbol: STIM1
  Gene Name: stromal interaction molecule 1
  ENST ID: ENST00000616714
  CDS Start-End: 569-2944
ctggacctgggcaccgccagccgcctgggcacgggactgggcgggggcgctgacctcggcctaggaggcccaggatcccggagacgcccgcgccctcaggaccctgcgggtcgcacgccctccccagcttctgctgctcgccgctcttcggcagggcgaggtcaggtgcccccttctcgcctctcttctcttctcttctcttcctcctccacttctgtgcccgcggagactccggccgcccccttccgcaggggtgtagtaatctgcggagctgacagcagccccgcagccaccctgcccgaagtctccggaagcggcacgagctcaggccgccgcagccccggcggacccactgttggacctgaggagccagccctcctcccgcacccaaacttggagcacttgacctttggctgttggagggggcaggctcgcgggtggctggacagctgcggagccgcgagggcatcttgcctggagaccgtcggctgcactcccgggctcctggctttgcctctgggatcccgaggtgtccacatcagacgcatgttgactgagacctagagtcatggatgtatgcgtccgtcttgccctgtggctcctctggggactcctcctgcaccagggccagagcctcagccatagtcacagtgagaaggcgacaggaaccagctcgggggccaactctgaggagtccactgcagcagagttttgccgaattgacaagcccctgtgtcacagtgaggatgagaaactcagcttcgaggcagtccgtaacatccacaaactgatggacgatgatgccaatggtgatgtggatgtggaagaaagtgatgagttcctgagggaagacctcaattaccatgacccaacagtgaaacacagcaccttccatggtgaggataagctcatcagcgtggaggacctgtggaaggcatggaagtcatcagaagtatacaattggaccgtggatgaggtggtacagtggctgatcacatatgtggagctgcctcagtatgaggagaccttccggaagctgcagctcagtggccatgccatgccaaggctggctgtcaccaacaccaccatgacagggactgtgctgaagatgacagaccggagtcatcggcagaagctgcagctgaaggctctggatacagtgctctttgggcctcctctcttgactcgccataatcacctcaaggacttcatgctggtggtgtctatcgttattggtgtgggcggctgctggtttgcctatatccagaaccgttactccaaggagcacatgaagaagatgatgaaggacttggaggggttacaccgagctgagcagagtctgcatgaccttcaggaaaggctgcacaaggcccaggaggagcaccgcacagtggaggtggagaaggtccatctggaaaagaagctgcgcgatgagatcaaccttgctaagcaggaagcccagcggctgaaggagctgcgggagggtactgagaatgagcggagccgccaaaaatatgctgaggaggagttggagcaggttcgggaggccttgaggaaagcagagaaggagctagaatctcacagctcatggtatgctccagaggcccttcagaagtggctgcagctgacacatgaggtggaggtgcaatattacaacatcaagaagcaaaatgctgagaagcagctgctggtggccaaggagggggctgagaagataaaaaagaagagaaacacactctttggcaccttccacgtggcccacagctcttccctggatgatgtagatcataaaattctaacagctaagcaagcactgagcgaggtgacagcagcattgcgggagcgcctgcaccgctggcaacagatcgagatcctctgtggcttccagattgtcaacaaccctggcatccactcactggtggctgccctcaacatagaccccagctggatgggcagtacacgccccaaccctgctcacttcatcatgactgacgacgtggatgacatggatgaggagattgtgtctcccttgtccatgcagtcccctagcctgcagagcagtgttcggcagcgcctgacggagccacagcatggcctgggatctcagaggttggtagagggcgaggctggccacttcttgacaagccgggtatctctgcggcgaatgcgcagcctttcatctggacagtctttcagttctgaaggctacgggaccagctctccatctgcctctgctgctgcttcttgctcctcttccatcaccaccatcaccactaccaccaccaccaccaccaccttcaccaccgtccatgtccaccctgtttattaccaccacagcacttcctatttcctccagatggagccctaccctgacacacccccttctgacagcaccgctgtgatgcctgggcattcagagagcttgggggatttgacccattccgattcggagtcctccctccacatgagtgaccgccagcgtgtggcccccaaacctcctcagatgagccgtgctgcagacgaggctctcaatgccatgacttccaatggcagccaccggctgatcgagggggtccacccagggtctctggtggagaaactgcctgacagccctgccctggccaagaaggcattactggcgctgaaccatgggctggacaaggcccacagcctgatggagctgagcccctcagccccacctggtggctctccacatttggattcttcccgttctcacagccccagctccccagacccagacacaccatctccagttggggacagccgagccctgcaagccagccgaaacacacgcattccccacctggctggcaagaaggctgtggctgaggaggataatggctctattggcgaggaaacagactccagcccaggccggaagaagtttcccctcaaaatctttaagaagcctcttaagaagtaggcaggatggggtggcagtaaagggacagcttgtccttccctgggtgttctgtctctccttccctcccttccttcaagataactggccccaagagtggggcatgggaagggctggtccaggggtctgggcactgtacatacctgccccctcatccttgggtccttcattattatttattaactgaccaccatggcctgcctgccctgcctccgtcccaaccatgggctgctgctgtcactccctctccacttcagtgcatgtcttagttgctgttccctcagctcccagctccacctctggggttcagcttctgtctctgctgtcccagttttgaggtttggtttcttgtttctgtctcttgctttcgggctcctccctcccaccactccccaacttcccctagcagttgcagggaagataggacgagtagcttctgacatgtgtgcctcagatctgttccaccccactcacagtggttctgtttgctccagactggggctagggcctaatctttgaagtttgttctttggtattgatgtgggtcagaaggagcctcatcctaatctcactcaggcctccagggatccatgggggagtgaaaccaattctcagagaacaacccaccagagacttttaaagagaggccaggcttgggaatgggttgggagaggcatctgttcattggagcatgagtggatgccagaactgtaggttataaggcagtcactttttctctctactcccacccacacctgcctccctcttacccctgctcccccacactgcaggaggatttgtctctaagaggtgctgccccaaagctccccaagcatcaatactcctagggctcaggacaagtggctcccctggccaggagagccacagccatgatacagggctcttatggagccctggagttgttgggcaaggatgctgtcattttttgaaccaaaagacaaacaggttaaaaggaaaaaaagtaatctgaatttcccaagtgcctacgctgcatattccccttgttagatcccattttcatgttactttgtagccttggccagaggctcaaaaaggacacaaccagtttggggaaggggtggctaaggaagatggtataggtgaaggcggctgtgtgaccactttcccccacccttcccaccctctagacaactctctcccttacctgtttttgctatggctgtaaaggtatttttcctctgccccactccctgccatacctttatcctgggatcctattttgggcctggggtgggtatacctggggctggtcttaggagggtgctaggctgcagactgccttgtactccctggacaccctcaaatggggttttctgtgttatttcataaaattctttgaagtccaataaagcatgtaggagattttaaccact

SEQ ID NO: 187124 - DNA, 3613 bp, Homo sapiens
  Payload ID: 16841
  Gene Symbol: STIM2
  Gene Name: stromal interaction molecule 2
  ENST ID: ENST00000465503
  CDS Start-End: 379-2643
agagcagcggatcccggtctcgccgcagcagcagcgcgggtgtcgtgcaccgcctgaagacgccgtacctttctaccccccaccttttttttttttttttttaaataaccggaaccaatgaacgcagccgggatcagagctccggaggccgccggtgccgatgggaccaggctggcgcccggcgggagcccgtgtctgaggcggcgggggcggccggaggagtcgccggcggcggtggtggcgcctcgcggagccggcgagctgcaggcggccggggcgccgctgcgctttcacccggcttctcctcggcgccttcatcccgcctcgactcctggcccagcgtggggctggctgctgcggcggcggcgctgggctgcgttgctggtgctcgggctgctggtagccggagcggcggacggatgcgagcttgtgccccggcacctccgcgggcggcgggcgactggctctgccgcaactgccgcctcctctcccgccgcggcggccggcgatagcccggcgctcatgacagatccctgcatgtcactgagtccaccatgctttacagaagaagacagatttagtctggaagctcttcaaacaatacataaacaaatggatgatgacaaagatggtggaattgaagtagaggaaagtgatgaattcatcagagaagatatgaaatataaagatgctactaataaacacagccatctgcacagagaagataaacatataacgattgaggatttatggaaacgatggaaaacatcagaagttcataattggacccttgaagacactcttcagtggttgatagagtttgttgaactaccccaatatgagaagaattttagagacaacaatgtcaaaggaacgacacttcccaggatagcagtgcacgaaccttcatttatgatctcccagttgaaaatcagtgaccggagtcacagacaaaaacttcagctcaaggcattggatgtggttttgtttggacctctaacacgcccacctcataactggatgaaagattttatcctcacagtttctatagtaattggtgttggaggctgctggtttgcttatacgcagaataagacatcaaaagaacatgttgcaaaaatgatgaaagatttagagagcttacaaactgcagagcaaagtctaatggacttacaggagaggcttgaaaaggcacaggaagaaaacagaaatgttgctgtagaaaagcaaaatttagagcgcaaaatgatggatgaaatcaattatgcaaaggaggaggcttgtcggctgagagagctaagggagggagctgaatgtgaattgagtagacgtcagtatgcagaacaggaattggaacaggttcgcatggctctgaaaaaggccgaaaaagaatttgaactgagaagcagttggtctgttccagatgcacttcagaaatggcttcagttaacacatgaagtagaagtgcaatactacaatattaaaagacaaaacgctgaaatgcagctagctattgctaaagatgaggttgctgcttcatatctgattcaggcagaaaaaattaaaaagaagagaagcacagtctttgggactctgcacgttgcacacagctcctccctagatgaggtagaccacaaaattctggaagcaaagaaagctctctctgagttgacaacttgtttacgagaacgactttttcgctggcaacaaattgagaagatctgtggctttcagatagcccataactcaggactccccagcctgacctcttccctttattctgatcacagctgggtggtgatgcccagagtctccattccaccctatccaattgctggaggagttgatgacttagatgaagacacacccccaatagtgtcacaatttcccgggaccatggctaaacctcctggatcattagccagaagcagcagcctgtgccgttcacgccgcagcattgtgccgtcctcgcctcagcctcagcgagctcagcttgctccacacgccccccacccgtcacaccctcggcaccctcaccacccgcaacacacaccacactccttgccttcccctgatccagatatcctctcagtgtcaagttgccctgcgctttatcgaaatgaagaggaggaagaggccatttacttctctgctgaaaagcaatgggaagtgccagacacagcttcagaatgtgactccttaaattcttccattggaaggaaacagtctcctcctttaagcctcgagatataccaaacattatctccgcgaaagatatcaagagatgaggtgtccctagaggattcctcccgaggggattcgcctgtaactgtggatgtgtcttggggttctcccgactgtgtaggtctgacagaaactaagagtatgatcttcagtcctgcaagcaaagtgtacaatggcattttggagaaatcctgtagcatgaaccagctttccagtggcatcccggtgcctaaacctcgccacacatcatgttcctcagctggcaacgacagtaaaccagttcaggaagccccaagtgttgccagaataagcagcatcccacatgacctttgtcataatggagagaaaagcaaaaagccatcaaaaatcaaaagcctttttaagaagaaatctaagtgaactggctgacttgatggaatcatgttcaagtggcatctgtaaactattatcccccaccctccactccccaccttttttttggtttaattttaggaatgtaactccattggggctttccaggccggatgccatagtggaacatccagaagggcaactgtctactgtctgcttatttaagtgactatatataatcaattcatcaagccagttattactgaaaaatcattgaaatgagacagtttacagtcatttctgcctatttatttctgctttgttctcagtgatgtatatgcaacattttgttgaaagccacgatggacttacaagctttaatggactcgtaagccagcatgggcttgcaaaaatttcttgtttaccagagcatcttcttatctttccacagagctatttacatcctggactatataacttaaaagaagtaaaacgtaattgcactactgttttccagactggaaaaaaaaaaaatctctgcaagtgaaactgtatagagtttataaaatgactatggataggggactgttttcacttttagatcaaaatgggtttttaagtagaacctagggtttctaattgacttgatttctggaaatgaaaacccgcgcttttattatgggaagcttcttgaactgcatttactattgtgaagtttcaagtcccgctgtaaagatcatgttgttttgttttccccagggctttcactgtgatttactgcattgcaggctgtatgataaaacacacataatttaaagagagaaggctcttgattccttatgcaagtggaagagttgaaacttgattgaaggacttaaaacattcacaaccttaagccgaggtggggggatatggggattcaggcaattgtttacacactttgaataactgcaaaggatttacggtttgtgaaaaatgtgtactgtggaaaagataataaattgaagacattattgtg

SEQ ID NO: 187125 - DNA, 5154 bp, Homo sapiens
  Payload ID: 16841
  Gene Symbol: STIM2
  Gene Name: stromal interaction molecule 2
  Uniprot ID: Q9P246
  ENST ID: ENST00000467087
  CDS Start-End: 529-2769
gaggcgggggattggtatgcgagcgaatgtgcgaggggagggaggcgtcccggcggagcgtggtactacgaccagcgcgggccggagggggcggggggatgcgccgcggcggcggcggcgcgggagctggggttggtgtttggcggcgccagagcagcggatcccggtctcgccgcagcagcagcgcgggtgtcgtgcaccgcctgaagacgccgtacctttctaccccccaccttttttttttttttttttaaataaccggaaccaatgaacgcagccgggatcagagctccggaggccgccggtgccgatgggaccaggctggcgcccggcgggagcccgtgtctgaggcggcgggggcggccggaggagtcgccggcggcggtggtggcgcctcgcggagccggcgagctgcaggcggccggggcgccgctgcgctttcacccggcttctcctcggcgccttcatcccgcctcgactcctggcccagcgtggggctggctgctgcggcggcggcgctgggctgcgttgctggtgctcgggctgctggtagccggagcggcggacggatgcgagcttgtgccccggcacctccgcgggcggcgggcgactggctctgccgcaactgccgcctcctctcccgccgcggcggccggcgatagcccggcgctcatgacagatccctgcatgtcactgagtccaccatgctttacagaagaagacagatttagtctggaagctcttcaaacaatacataaacaaatggatgatgacaaagatggtggaattgaagtagaggaaagtgatgaattcatcagagaagatatgaaatataaagatgctactaataaacacagccatctgcacagagaagataaacatataacgattgaggatttatggaaacgatggaaaacatcagaagttcataattggacccttgaagacactcttcagtggttgatagagtttgttgaactaccccaatatgagaagaattttagagacaacaatgtcaaaggaacgacacttcccaggatagcagtgcacgaaccttcatttatgatctcccagttgaaaatcagtgaccggagtcacagacaaaaacttcagctcaaggcattggatgtggttttgtttggacctctaacacgcccacctcataactggatgaaagattttatcctcacagtttctatagtaattggtgttggaggctgctggtttgcttatacgcagaataagacatcaaaagaacatgttgcaaaaatgatgaaagatttagagagcttacaaactgcagagcaaagtctaatggacttacaggagaggcttgaaaaggcacaggaagaaaacagaaatgttgctgtagaaaagcaaaatttagagcgcaaaatgatggatgaaatcaattatgcaaaggaggaggcttgtcggctgagagagctaagggagggagctgaatgtgaattgagtagacgtcagtatgcagaacaggaattggaacaggttcgcatggctctgaaaaaggccgaaaaagaatttgaactgagaagcagttggtctgttccagatgcacttcagaaatggcttcagttaacacatgaagtagaagtgcaatactacaatattaaaagacaaaacgctgaaatgcagctagctattgctaaagatgaggcagaaaaaattaaaaagaagagaagcacagtctttgggactctgcacgttgcacacagctcctccctagatgaggtagaccacaaaattctggaagcaaagaaagctctctctgagttgacaacttgtttacgagaacgactttttcgctggcaacaaattgagaagatctgtggctttcagatagcccataactcaggactccccagcctgacctcttccctttattctgatcacagctgggtggtgatgcccagagtctccattccaccctatccaattgctggaggagttgatgacttagatgaagacacacccccaatagtgtcacaatttcccgggaccatggctaaacctcctggatcattagccagaagcagcagcctgtgccgttcacgccgcagcattgtgccgtcctcgcctcagcctcagcgagctcagcttgctccacacgccccccacccgtcacaccctcggcaccctcaccacccgcaacacacaccacactccttgccttcccctgatccagatatcctctcagtgtcaagttgccctgcgctttatcgaaatgaagaggaggaagaggccatttacttctctgctgaaaagcaatgggaagtgccagacacagcttcagaatgtgactccttaaattcttccattggaaggaaacagtctcctcctttaagcctcgagatataccaaacattatctccgcgaaagatatcaagagatgaggtgtccctagaggattcctcccgaggggattcgcctgtaactgtggatgtgtcttggggttctcccgactgtgtaggtctgacagaaactaagagtatgatcttcagtcctgcaagcaaagtgtacaatggcattttggagaaatcctgtagcatgaaccagctttccagtggcatcccggtgcctaaacctcgccacacatcatgttcctcagctggcaacgacagtaaaccagttcaggaagccccaagtgttgccagaataagcagcatcccacatgacctttgtcataatggagagaaaagcaaaaagccatcaaaaatcaaaagcctttttaagaagaaatctaagtgaactggctgacttgatggaatcatgttcaagtggcatctgtaaactattatcccccaccctccactccccaccttttttttggtttaattttaggaatgtaactccattggggctttccaggccggatgccatagtggaacatccagaagggcaactgtctactgtctgcttatttaagtgactatatataatcaattcatcaagccagttattactgaaaaatcattgaaatgagacagtttacagtcatttctgcctatttatttctgctttgttctcagtgatgtatatgcaacattttgttgaaagccacgatggacttacaagctttaatggactcgtaagccagcatgggcttgcaaaaatttcttgtttaccagagcatcttcttatctttccacagagctatttacatcctggactatataacttaaaagaagtaaaacgtaattgcactactgttttccagactggaaaaaaaaaaaatctctgcaagtgaaactgtatagagtttataaaatgactatggataggggactgttttcacttttagatcaaaatgggtttttaagtagaacctagggtttctaattgacttgatttctggaaatgaaaacccgcgcttttattatgggaagcttcttgaactgcatttactattgtgaagtttcaagtcccgctgtaaagatcatgttgttttgttttccccagggctttcactgtgatttactgcattgcaggctgtatgataaaacacacataatttaaagagagaaggctcttgattccttatgcaagtggaagagttgaaacttgattgaaggacttaaaacattcacaaccttaagccgaggtggggggatatggggattcaggcaattgtttacacactttgaataactgcaaaggatttacggtttgtgaaaaatgtgtactgtggaaaagataataaattgaagacattattgtgtgggattgtgctgatttttgttgataacacaaaaaacactatgttttctggagagctgtgtaagctgtcttgttgcttagttgcaatataagaaatagtgatgttttggacgtaagttgtcaacaaatttctattttatattgttatatttttatgtagtttgaaatgtaaaaatgttctaatatcaagattaacaaatataaatttatggtgcatttagattgcgttgtattaatttataaagtatggtgttcattaaattggtgggttgtataagggtagcttttgttgttaaaaaaacagtagagagttaagttccatatagcaacaaagtatgttaacatctagggagtttctgcttataccactttaaaaatatgcaatcataagtgatttggttactgcaatgcagatggatgtttggatgaacaactgatacattttagttagaatgctttttcagcattatggctaaaatatatgtctaacccagtgctatttaggtgaaaatgctaattgataaaccagaagtttcttttgagatttgctttaaagaaatgctttagtaagaatatgaacaatttcctgatgtctcctataaattgtgattgtttattctattactattgttaaaaacttgaatggtatttatattggctgatatttatatacttaatagattgagttctgtaagggcaaaaacggattgaaatgaacatagcgttttgcactaatgataagataacctgagaggtagggttgaggaacacagggttgaaagctgttggagaggggaaaagttgtgcataaagaactgaaaagggttctggagtgttcattcagagtgaagggaaaactttatccttctatttcttataaccagacaggaggagttcttccctttgaaaattgcaaaaggaatgagaactttgcagttggatgaatagagaagggaaaagttgctggagcacggagtgaagatgggaggagctgttagcaaggcccactgctgctcctgggtgagaagggagctctggagcaggaccagctgggggccggcactgctgcttagagtggaggaggctggccaaagagactgtgggctgttttcagtcagggagcatgtgcattgtttgtgctcaatttcagacactcatttataaacaaattcaaccaagggatatttactgctttatgttgcttatgataattattttgcattaatacagtatacacatttgtaaattcaacaggaaattattgagttttggaaagctacagtaatttctgtattacatcatttatatgtgaaaagttggacatttctgtaagtttttaaaattatccatttgttactttaacattttaaaattatggtgttttcctgattttaaaagcaatattttccttactgt

SEQ ID NO: 187126 - DNA, 3925 bp, Homo sapiens
  Payload ID: 16841
  Gene Symbol: STIM2
  Gene Name: stromal interaction molecule 2
  ENST ID: ENST00000467011
  CDS Start-End: 426-2225
ccgcggcggcggcggcgcgggagctggggttggtgtttggcggcgccagagcagcggatcccggtctcgccgcagcagcagcgcgggtgtcgtgcaccgcctgaagacgccgtacctttctaccccccaccttttttttttttttttttaaataaccggaaccaatgaacgcagccgggatcagagctccggaggccgccggtgccgatgggaccaggctggcgcccggcgggagcccgtgtctgaggcggcgggggcggccggaggagtcgccggcggcggtggtggcgcctcgcggagccggcgagctgcaggcggccggggcgccgctgcgctttcacccggcttctcctcggcgccttcatcccgcctcgactcctggcccagcgtggggctggctgctgcggcggcggcgctgggctgcgttgctggtgctcgggctgctggtagccggagcggcggacggatgcgagcttgtgccccggcacctccgcgggcggcgggcgactggctctgccgcaactgccgcctcctctcccgccgcggcggccggcgatagcccggcgctcatgacagatccctgcatgtcactgagtccaccatgctttacagaagaagacagatttagtctggaagctcttcaaacaatacataaacaaatggatgatgacaaagatggtggaattgaagtagaggaaagtgatgaattcatcagagaagatatgaaatataaagatgctactaataaacacagccatctgcacagagaagataaacatataacgattgaggatttatggaaacgatggaaaacatcagaagttcataattggacccttgaagacactcttcagtggttgatagagtttgttgaactaccccaatatgagaagaattttagagacaacaatgtcaaaggaacgacacttcccaggatagcagtgcacgaaccttcatttatgatctcccagttgaaaatcagtgaccggagtcacagacaaaaacttcagctcaaggcattggatgtggttttgtttggacctctaacacgcccacctcataactggatgaaagattttatcctcacagtttctatagtaattggtgttggaggctgctggtttgcttatacgcagaataagacatcaaaagaacatgttgcaaaaatgatgaaagatttagagagcttacaaactgcagagcaaagtctaatggacttacaggagaggcttgaaaaggcacaggaagaaaacagaaatgttgctgtagaaaagcaaaatttagagcgcaaaatgatggatgaaatcaattatgcaaaggaggaggcttgtcggctgagagagctaagggagggagctgaatgtgaattgagtagacgtcagtatgcagaacaggaattggaacaggttcgcatggctctgaaaaaggccgaaaaagaatttgaactgagaagcagttggtctgttccagatgcacttcagaaatggcttcagttaacacatgaagtagaagtgcaatactacaatattaaaagacaaaacgctgaaatgcagctagctattgctaaagatgaggcagaaaaaattaaaaagaagagaagcacagtctttgggactctgcacgttgcacacagctcctccctagatgaggtagaccacaaaattctggaagcaaagaaagctctctctgagttgacaacttgtttacgagaacgactttttcgctggcaacaaattgagaagatctgtggctttcagatagcccataactcaggactccccagcctgacctcttccctttattctgatcacagctgggtggtgatgcccagagtctccattccaccctatccaattgctggaggagttgatgacttagatgaagacacacccccaatagtgtcacaatttcccgggaccatggctaaacctcctggatcattagccagaagcagcagcctgtgccgttcacgccgcagcattgtgccgtcctcgcctcagcctcagcgagctcagcttgctccacacgccccccacccgtcacaccctcggcaccctcaccacccgcaacacacaccacactccttgccttcccctgatccagatatcctctcagtgtcaagttgccctgcgctttatcgaaatgaagaggaggaagaggccatttacttctctgctgaaaagcaatgtattcaccttgggctcggtgcgtgcaaaagtgaatgagactaagtagtaaagctctcaaaaaaaaaaaggaagtgccagacacagcttcagaatgtgactccttaaattcttccattggaaggaaacagtctcctcctttaagcctcgagatataccaaacattatctccgcgaaagatatcaagagatgaggtgtccctagaggattcctcccgaggggattcgcctgtaactgtggatgtgtcttggggttctcccgactgtgtaggtctgacagaaactaagagtatgatcttcagtcctgcaagcaaagtgtacaatggcattttggagaaatcctgtagcatgaaccagctttccagtggcatcccggtgcctaaacctcgccacacatcatgttcctcagctggcaacgacagtaaaccagttcaggaagccccaagtgttgccagaataagcagcatcccacatgacctttgtcataatggagagaaaagcaaaaagccatcaaaaatcaaaagcctttttaagaagaaatctaagtgaactggctgacttgatggaatcatgttcaagtggcatctgtaaactattatcccccaccctccactccccaccttttttttggtttaattttaggaatgtaactccattggggctttccaggccggatgccatagtggaacatccagaagggcaactgtctactgtctgcttatttaagtgactatatataatcaattcatcaagccagttattactgaaaaatcattgaaatgagacagtttacagtcatttctgcctatttatttctgctttgttctcagtgatgtatatgcaacattttgttgaaagccacgatggacttacaagctttaatggactcgtaagccagcatgggcttgcaaaaatttcttgtttaccagagcatcttcttatctttccacagagctatttacatcctggactatataacttaaaagaagtaaaacgtaattgcactactgttttccagactggaaaaaaaaaaaatctctgcaagtgaaactgtatagagtttataaaatgactatggataggggactgttttcacttttagatcaaaatgggtttttaagtagaacctagggtttctaattgacttgatttctggaaatgaaaacccgcgcttttattatgggaagcttcttgaactgcatttactattgtgaagtttcaagtcccgctgtaaagatcatgttgttttgttttccccagggctttcactgtgatttactgcattgcaggctgtatgataaaacacacataatttaaagagagaaggctcttgattccttatgcaagtggaagagttgaaacttgattgaaggacttaaaacattcacaaccttaagccgaggtggggggatatggggattcaggcaattgtttacacactttgaataactgcaaaggatttacggtttgtgaaaaatgtgtactgtggaaaagataataaattgaagacattattgtgtgggattgtgctgatttttgttgataacacaaaaaacactatgttttctggagagctgtgtaagctgtcttgttgcttagttgcaatataagaaatagtgatgttttggacgtaagttgtcaacaaatttctattttatattgttatatttttatgtagtttgaaatgtaaaaatgttctaatatcaagattaacaaatataaatttatggtgcatttaga

SEQ ID NO: 187127 - DNA, 770 bp, Homo sapiens
  Payload ID: 16841
  Gene Symbol: STIM2
  Gene Name: stromal interaction molecule 2
  ENST ID: ENST00000477474
  CDS Start-End: 1-666
cacgttgcacacagctcctccctagatgaggtagaccacaaaattctggaagcaaagaaagctctctctgagttgacaacttgtttacgagaacgactttttcgctggcaacaaattgagaagatctgtggctttcagatagcccataactcaggactccccagcctgacctcttccctttattctgatcacagctgggtggtgatgcccagagtctccattccaccctatccaattgctggaggagttgatgacttagatgaagacacacccccaatagtgtcacaatttcccgggaccatggctaaacctcctggatcattagccagaagcagcagcctgtgccgttcacgccgcagcattgtgccgtcctcgcctcagcctcagcgagctcagcttgctccacacgccccccacccgtcacaccctcggcaccctcaccacccgcaacacacaccacactccttgccttcccctgatccagatatcctctcagtgtcaagttgccctgcgctttatcgaaatgaagaggaggaagaggccatttacttctctgctgaaaagcaatgtatgatcatagtcaccagcaagatgcctttactgacagaactggtcttgtgtggtttctggaaatcagaaggaaaactcgagagctgcactgtctaataaaacttcctgcattgatggaacgttcagttctcatttcaatagcaatgtcaaagtttcatagctagctctcataaataagagaatgatttgaatttggaaaa

SEQ ID NO: 187128 - DNA, 1328 bp, Homo sapiens
  Payload ID: 16841
  Gene Symbol: STIM2
  Gene Name: stromal interaction molecule 2
  ENST ID: ENST00000473519
  CDS Start-End: 1-1044
gaaatcaattatgcaaaggaggaggcttgtcggctgagagagctaagggagggagctgaatgtgaattgagtagacgtcagtatgcagaacaggaattggaacaggttcgcatggctctgaaaaaggccgaaaaagaatttgaactgagaagcagttggtctgttccagatgcacttcagaaatggcttcagttaacacatgaagtagaagtgcaatactacaatattaaaagacaaaacgctgaaatgcagctagctattgctaaagatgaggcagaaaaaattaaaaagaagagaagcacagtctttgggactctgcacgttgcacacagctcctccctagatgaggtagaccacaaaattctggaagcaaagaaagctctctctgagttgacaacttgtttacgagaacgactttttcgctggcaacaaattgagaagatctgtggctttcagatagcccataactcaggactccccagcctgacctcttccctttattctgatcacagctgggtggtgatgcccagagtctccattccaccctatccaattgctggaggagttgatgacttagatgaagacacacccccaatagtgtcacaatttcccgggaccatggctaaacctcctggatcattagccagaagcagcagcctgtgccgttcacgccgcagcattgtgccgtcctcgcctcagcctcagcgagctcagcttgctccacacgccccccacccgtcacaccctcggcaccctcaccacccgcaacacacaccacactccttgccttcccctgatccagatatcctctcagtgtcaagttgccctgcgctttatcgaaatgaagaggaggaagaggccatttacttctctgctgaaaagcaatggaacacaagggagtgtgcagttggagacagccagggaccacatgtacacggcctggtacgctttgacaaggactttggatcttactctgagtatgagagaaagcactgggaagtttcaaggaagtgccagacacagcttcagaatgtgactccttaaattcttccattggaaggaaacagtctcctcctttaagcctcgagatataccaaacattatctccgcgaaagatatcaagagatgaggtgtccctagaggattcctcccgaggggattcgcctgtaactgtggatgtgtcttggggttctcccgactgtgtaggtctgacagaaactaagagtatgatcttcagtcctgcaagcaaagtgtacaatggcattttggagaaatcctgtagcatgaaccagctttccagtggcatcccggtgcctaaacctcgccac

SEQ ID NO: 187129 - DNA, 1072 bp, Homo sapiens
  Payload ID: 16841
  Gene Symbol: STIM2
  Gene Name: stromal interaction molecule 2
  ENST ID: ENST00000463501
  CDS Start-End: 429-1072
caaacaacatgggcaaagtgcgatgcgtttatcctaagccaagaacacgcttagaatgcacgcccagagccagttctccccaagggatggcaacgcacctgtgtgccgggctccgcgcaagggctttccctgtttattctcccgccgccgctaacaaccttgtggggcgggcatggttggatccccaatttaaaagtggggaaactgaggacagattaacctgtctgcacgtaacacagctgaaaagtggtggaattgctatttctttcaggtttgcctgattctagagctcaatgctgcccatcaggtgtttgaagtcatgatttggtgaaaatgggacagtgaagacgttctgaaaaaaaaaaaaggcatatgatgaggtttggacattgagaggtataggctggctgtaggagtcggatccctgcatgtcactgagtccaccatgctttacagaagaagacagatttagtctggaagctcttcaaacaatacataaacaaatggatgatgacaaagatggtggaattgaagtagaggaaagtgatgaattcatcagagaagatatgaaatataaagatgctactaataaacacagccatctgcacagagaagataaacatataacgattgaggatttatggaaacgatggaaaacatcagaagttcataattggacccttgaagacactcttcagtggttgatagagtttgttgaactaccccaatatgagaagaattttagagacaacaatgtcaaaggaacgacacttcccaggatagcagtgcacgaaccttcatttatgatctcccagttgaaaatcagtgaccggagtcacagacaaaaacttcagctcaaggcattggatgtggttttgtttggacctctaacacgcccacctcataactggatgaaagattttatcctcacagtttctatagtaattggtgttggaggctgctggtttgcttatacgcagaataagacatcaaaagaacatgttgcaaaaatgatgaaagatttagagagcttacaaactgcagagcaaagtctaatggacttacaggagag

SEQ ID NO: 187130 - DNA, 726 bp, Homo sapiens
  Payload ID: 16841
  Gene Symbol: STIM2
  Gene Name: stromal interaction molecule 2
  ENST ID: ENST00000494628
  CDS Start-End: 249-726
agcgggcatgcgcggggctgcggtggcgcaggcgccctgccgcgcccgccagtcgggaaccggttctccgagtccgagctggcggcgcgctgtttgcctgattctagagctcaatgctgcccatcaggtgtttgaagtcatgatttggtgaaaatgggacagtgaagacgttctgaaaaaaaaaaaaggcatatgatgaggtttggacattgagaggtataggctggctgtaggagtcggatccctgcatgtcactgagtccaccatgctttacagaagaagacagatttagtctggaagctcttcaaacaatacataaacaaatggatgatgacaaagatggtggaattgaagtagaggaaagtgatgaattcatcagagaagatatgaaatataaagatgctactaataaacacagccatctgcacagagaagataaacatataacgattgaggatttatggaaacgatggaaaacatcagaagttcataattggacccttgaagacactcttcagtggttgatagagtttgttgaactaccccaatatgagaagaattttagagacaacaatgtcaaaggaacgacacttcccaggatagcagtgcacgaaccttcatttatgatctcccagttgaaaatcagtgaccggagtcacagacaaaaacttcagctcaaggcattggatgtggttttgtttggacctctaacacgcccacctcata

SEQ ID NO: 187131 - DNA, 583 bp, Homo sapiens
  Payload ID: 16841
  Gene Symbol: STIM2
  Gene Name: stromal interaction molecule 2
  ENST ID: ENST00000478049
  CDS Start-End: 322-583
gctattccgcggctccggccagggcgcgatgcggagccctgcctgctgcttcgtcgcggtcccctgcactccggacgtctttccttttcaccccgacaccccgccctcgccgagcctctcgacggcactgattcccctcccttcagtcgggctctccgatcttccaagctgagcaatgcggtggtttctctttcgtgctgcagaagtgccagcagggatatagcaacaaggtgccacctgtaaagcaagagagccctcaccagacactgaatctgctggtgcctttatcttggacttcccagcctttagacctatccctgcatgtcactgagtccaccatgctttacagaagaagacagatttagtctggaagctcttcaaacaatacataaacaaatggatgatgacaaagatggtggaattgaagtagaggaaagtgatgaattcatcagagaagatatgaaatataaagatgctactaataaacacagccatctgcacagagaagataaacatataacgattgaggatttatggaaacgatggaaaacatcagaagttcataattggacccttgaagaca

SEQ ID NO: 187132 - DNA, 9784 bp, Homo sapiens
  Payload ID: 16842
  Gene Symbol: SMC1A
  Gene Name: structural maintenance of chromosomes 1A
  Uniprot ID: Q14683
  ENST ID: ENST00000322213
  CDS Start-End: 129-3830
aggcctggacgtattctcgcgacatttgccggtcgcccggcttgcactgcggcgtttcccgcgcgggctacctcagttctcgggcgtacggcgcggcctgtcctactgccgccggcgccgcggccgtcatggggttcctgaaactgattgagattgagaactttaagtcgtacaagggtcgacagattatcggaccatttcagaggttcaccgccatcattggacccaatggctctggtaagtcaaatctcatggatgccatcagctttgtgctaggtgaaaaaaccagcaacctgcgggtaaagaccctgcgggacctgatccatggagctcctgtgggcaagccagctgccaaccgggcctttgtcagcatggtctactctgaggagggtgctgaggaccgtacctttgcccgtgtcattgtaggaggttcttctgagtacaagatcaacaacaaagtggtccaactacatgagtacagtgaggaattagagaagttgggcattctcatcaaagctcgtaacttcctcgttttccagggtgctgtggaatctattgccatgaagaaccccaaagagaggacagctctatttgaagagattagtcgttctggggagctggcgcaggagtatgacaagcgaaagaaggaaatggtgaaggctgaagaggacacacagtttaattaccatcgcaagaaaaatattgcggctgaacgcaaggaagcaaagcaggagaaagaagaggctgaccggtaccagcgcctgaaggatgaggtagtacgggctcaggtacagctgcagctctttaagctttaccataatgaagtggaaattgagaagctcaacaaggaactggcctcaaagaacaaggagatcgagaaggacaagaagcgtatggacaaggtggaggatgaactgaaggagaagaagaaggagctgggcaaaatgatgcgggagcagcagcagattgagaaggagatcaaggagaaggactcagaattgaaccagaagcggcctcagtacatcaaagccaaggagaacacctcccacaaaatcaagaagctggaagcagccaagaagtctctgcagaatgctcagaagcactacaagaagcgtaaaggtgacatggatgagctggagaaggagatgctgtcagtggagaaggctcggcaggagtttgaagaacggatggaagaagagagtcagagtcagggcagagatttgacgttggaggagaatcaggtgaagaaataccaccggttgaaagaagaagccagcaagagagcagctaccctggcccaggagctggagaaattcaatcgagaccagaaagctgaccaggaccgtctggatctggaagaacggaagaaagtagagacagaggccaagatcaagcaaaagctgcgggaaattgaagagaatcagaagcggattgagaaactggaggaatacatcaccactagcaagcagtccctagaagagcagaagaagctagagggggagctgacagaggaggtggagatggccaagcggcgtattgatgaaatcaataaggagctgaaccaggtgatggagcagctaggggatgcccgcatcgaccgccaggagagcagccgccagcagcgaaaggcagagataatggaaagcatcaagcgcctttaccctggctctgtgtacggccgcctcattgacctatgccagcccacacaaaagaagtatcagattgctgtaaccaaggttttgggcaagaacatggatgccattattgtggactcggagaagacaggccgggactgtattcagtatatcaaggagcagcgtggggagcctgagaccttcttgcctcttgactacctggaggtgaagcctacagatgagaaactccgggagctgaagggggccaagctagtgattgatgtgattcgctatgagccacctcatatcaaaaaggccctgcagtatgcttgtggcaatgcccttgtctgtgacaacgtggaagatgcccgccgcattgcctttggaggccaccagcgccacaagacagtggcactggatggaaccctattccagaagtcaggagtgatctctggtggggccagtgacctgaaggccaaggcacggcgctgggatgagaaagcagtagacaagttgaaagagaagaaggagcgcttgacagaggagctgaaagagcagatgaaggcaaaacggaaagaggcagagctgcgtcaggtgcagtctcaggcccatggactgcagatgcggctcaagtactcccagagtgacctagaacagaccaagacacgacatctagccctgaatctgcaggaaaaatccaagctggagagtgagctagccaactttgggcctcgcattaatgatatcaagaggatcattcagagccgagagagggaaatgaaagacttgaaggagaagatgaaccaggtagaggatgaggtgtttgaagagttttgtcgggagattggtgtgcgcaacatccgggagtttgaggaagaaaaggtgaaacggcagaatgaaatcgccaagaagcgtttggagtttgagaatcagaagactcgcttgggcattcagttggattttgaaaagaaccaactgaaggaggaccaagataaagtacacatgtgggagcagacagtgaaaaaagatgaaaatgagatagaaaagctcaaaaaggaggaacaaagacacatgaagatcatagatgagaccatggctcagctacaagacctgaagaatcagcatctggccaagaagtcggaagtgaatgacaagaatcatgagatggaggagattcgtaagaaactcgggggcgccaacaaggaaatgacccatttacagaaggaggtgacagccattgagaccaagcttgaacagaagcgcagtgaccgtcacaacttgctacaggcctgtaagatgcaggacattaagttgccactgtcaaaaggcaccatggatgatattagtcaggaagagggtagctcccagggggaggactcagtgagtggttcacagagaatttccagtatctatgcacgagaggccctcattgagattgactacggtgatctgtgtgaggatctgaaggatgcccaggctgaggaagagatcaagcaagagatgaacacactgcagcagaagctgaatgagcagcagagtgtgcttcagcgtattgccgcccccaacatgaaggccatggaaaagctggaaagtgtccgagacaagttccaggagacctcagatgagtttgaagcagcccgaaagcgagcaaagaaggccaagcaggcattcgaacagatcaagaaggagcgctttgaccgcttcaatgcttgttttgaatctgtggctaccaacattgatgagatctataaggccctgtcccgcaatagcagtgcccaggcattcctgggccctgagaaccctgaagagccctacttggatggcatcaactacaactgtgtggctcctgggaaacgcttccggcctatggacaacttgtcaggcggggagaagacagtggcagctctggccctgctctttgccatccacagctacaagccagcccccttcttcgtcctggatgagattgatgctgccttggataacaccaacattggcaaggtggcaaattacatcaaggagcagtcgacttgcaacttccaggccatcgtcatctctctcaaggaggagttctacaccaaggccgagagcctcattggagtctatcctgagcaaggggactgtgtgatcagcaaagtcctgaccttcgacctcaccaagtacccagatgccaaccccaaccccaatgagcagtagcagtatttttgccctcccgccctgtctggatccctaagctgtccctctcccaatctctggatatttgactcccaaccttccccctacctcctggccctttttggtgtagtcatgggatttaggcactgctaatcaagcatgaagaggaacagaggtgatgttaggtctggagcaaaaattcctgaacgacagggagtattctggcctctgaaaggaggtgctgagctgaacagggccatctgttcatcacacacacccccttcctccccctcatcacccataatcgtgggccccttgggcctcttgcccactgtgtgtgtgggtatgtatgtgtgtatgtatgtatccgcatgtgtgcatgtgagtatgtttgcaaaataataaaggatattggagacctgttttagaaggagcctaggctgaatttgattccaagagagcttaggatgacagcacccctgagctgggcaaaggtactcaggacctcataggagtcttaggcagttacctgaaactgccttcattcactcatttgtgtattcattcatttatgtattcatcagacacataccgaacaccctctatttgtcaggctctgtgcttggaatacagagttgaatcagacatgatctctaccctcctagtaaggagatacagtgggttcatgaatgactatagttagctgaatgtcatatgtactttgaatttgagaagtgggtgatcccctctaggcttcctggaggtcacatttaagctagaccttgacaaattggtaggatttggtcaggcactaggagtggagcatgagctctggggacagacagttatgggttctggtcccactttttatcacttactagttgtttgaccttgggcaagtcatttgaccttctgtgcctcagtttcctcatctgtaaaatggggctaacaatattacctacctcataggatttaatgatgtcaagctcctcactggaggccttatcccttcgtggagcccactaggtgccgacccctcagaatataaccctcatgcctggacccctgagagcttctgatcccagctattagggacagaagaagcctccaaatctggaaggtgctgaatgccctgctgactgggaaagtttcagggcactgatggggtctacctggtaagcggagggcctgaggaaacctgtagcttcaatcatgtctggtaaccgggtgcctgagccccaatctgggttgtgaggaaataggggagaggtatcctgggccacatcccagcctaacacctgtgaggttcattttaggaactaacctcattagctataaggatcatgcagaggcagcaaagccgggtgcgatgagctcagcctttactcattcacatacaccatcacactttaattccaatctgtatattgctttttaaaagttaagtccattctaattacccaaatatgcatgaattcattctccttttgagaagttagattgttaaagatagtctcattcagctaccaaccactccttgatccttcccttcttagtggctgttgtttgttgtacttccgtttagactttgttttaatgcttgtacgtacatatgtgaactcattggaaatattgtgtgtttaatgcaaatgatatattgaattgtttagcaatttgttttctttgcttaacgatgtttttgagatctgtgcatgttacttaatgtagctcaatccatcttctgtaattgctgtatagattgtcatcatatgattaccacattttacttacgcatttcttttgtgatggacattaagactgtttttaggttttgctattacaaaatactacacaggagcatcactatgcctgtgtgaaagtatatgtatgaaagtttacctagggttgattcctagaagtggaattgcaaagtcataggatatttatatattggtttttaataatacttccaaattgccctcctgtactatttactcagtatttttcttgaggttgatctgaggtctaacattgttatcctatatcattttcatcccaagtagtgatatctgtgaaatcacaggtttgatgtgtgctaattatgtattcttctaatacatattaaaagacataactatcaaaacaaaataaatttgtctgttttcaaccaaagaagtcacgtaccactggtggtactgtgtgccataatttggcaaatgctggcctttatggacgagcacaattcgggggtcagacctggttcaaattctagctgtagaaacttgtgcaagttacttcacctctgagcctaagtttccacatctgtaaaaggagataataaacacctaccttgcagtagtgaagcaaagagaaaattaaatatatatgaagcaatttggctggcatctagatcattcacagccctttaaaggtcacctttgctgttctccccactttacagataaggaaactgaggcccaaaaaggtttgaacccaggtcttccaagtcattcaagtgctttctccactgtacaggtggttatcaaccttggctgcgcatcagaatcgtttgtaaagctttttctttttcctttttaaaaagtaaagcaatatatacacaggtaaaaaaataaaatagtacagaagggcttataatgagaagcagcagttccctgcttgcacccccacatccaaaggatgtggagctctttaaaaataaattgctctggtcccacctctggaaatctgattcagccagcatggataataacccagataactaacccctacctcacaggataaaaaggattacatgagatgccttaggctaaggccctggcacacaggaacacatgtgctacaaaggagctttggggacttaagtcctgaggatccaggaggtgaggtgacttgtccaagattccactggtttagtggcagagcctagacttccactcggatctatttagtgcttgccccctgctctctcctgtcgtgccccaccacctcctggcatcacagggcaaccgttgtcaaggctatgctcacgggaggctgggcaccacagtgtttccaagagcaagctggatccgagtagattccctagggcttgttggaggaactagtttgactcccttatactgtggacgcagtagccttgctgtagggagttgaagagtactccacaacagtatcttaagtttaactgggcacttccctctggaaatcacagtgttgtgcaccaggaacacaaagatgagtcaaatctttatcctgcctttgaggagctcactgtttagttggggaaaccatttgtaaaacagccattaaccatacagtgtgatcaacactgacaggagcacaggaaaaacatctagcttatgtgaagattcagagaaggcatcctgtagtctaggtggtgatacctgaactgagtcttgagggacgggtaggaattagccagttgaggaagtagaaggaatttccagatattggaaacagtatgcatgaagacatgaaggcaagaaacagcaaaacaaatactgaagcatgaagattcctggggtggggggaaagcagcaagaaaaggtagagaggaaccagattggaagagggtcgtaaatgcatggctacagaattcagatttgttttgtaggacagtgtggttcccaaactggctgtataccacaaacaggtacggcattctgggccccggcccctaaaacattcattaagtctggggtgaagatttggaatcttgaatgcttataaaggttaccacatgactagggtacagccagatttggaaaccatagcttgaaggcagtgagggagccatgaaatggtttttaatagggggactccagatcagatgtgaacttaacctgtttctggctggctagccaaccagcatggaaaacagattaggttagatgttcatgctgtatgtgcccgtgcctgtagcttccctgttaatcagcttcttacactactatatttgcttattttgtctctgaataagctttaggcaccacaagggtgggcctggggatattttgcttaccagtatagcccctgcaaaaaagcacagtgcctgacacaaaacaggcacccagtaaagtttttgaatgaatgaatgcatgagtgaatccatttgtgagagagcgaatggagatgacaagattagctaggagactggaaaaagaccaggaggcctgcactagggcaaaggccagtaggaatagattggaggtgttaaggtgtgaactgttaaggtaagatgataacttaatgactgattattggatgtggagggtgactgagaggatagaatgagtacccatgaatagccatgattcctaccctgtcccagtcatctctttccttatccatctctgaaacaatctgcttacatcctcctcagcaactggaattcctcaagttagttagacattctgtgtgctgtgtggtctctcactgcccccccactccccacccctccacaagccattgattcattcatccagttcaataaatcttggctaagcacctccagtgtgcagtaaggctcttccaagccaggactctgactccctctttcctacctcaagagatgtttttgagggctttcccaggtaagagtcacatctcttatacaataacttatagtgagatacccagaatgtcagacttgtaagggaagactgcccaaaccccttctgaggtcctcagaggggaattaacttcctaaggtccgactgctaggaagtgttggagccagaaatggaagctaggtttcctttctatgtcatctctggagtcttgatcttgatctatcccattgtagatcaggacaggcagaggtggtcagggagaaggtgggacttaggttgaaccttgaaggtcaatgtattggacaggtcaaacaagatggttgccaattacactgcccccttctggaaacccttagcaaacctgccatgcttgcagtcccttctaaggggtttccttagcataagttgccatgctctgtaccatgtgacctcacaatcctggccacagatagctagatgtggatagtgtctggttcaagggcaaccaatctctaggctggccagtggcctgttagctggactggcataaggacttcaccttacaggggtggcatgtatcaaatggcaaatgtatgaaacaaccagatctttcagggaggcagaatgtgagctattcagaagaagtgaacgttaattagaatttaatgaggcattagtggtggtggatgaggggtggccagaaactaaacagcaaaagcaaagagaaagctgcagaaaccataagtaagcagaggtcatgagacatttgtataatgagatcacggagccacagggtggcagaagccatgaagcagcaaggcaacaatgggctagaagccatgaagcaataggagccacgaggaacagaaaccgtgagacaaaactgactatgagatccacaaagcagcagaaggcttgaatagataagatcatgagacagtagaagcgatgagactgcaagaaccacaaggtagccagaaccatgtggcaacatggcaacaggaatggaagaggcagcaggagctacaatgcagaaaagccatggattaataggaactgaagcgccgggagccatgaagctgcaggacccatgaggcagaaaaagccatgggctagcatcgaggggggcagaaagaagttagtcagtagcagtaggaggagtataaatacagccagaaaggagttgagtcaccaatttgggaagcactagagaagggagcaacagatgcctgcagctgagggggtgacaagataagccaggctctagagctgctttggatcatgaaccattttcaagtttctgttcttccatgaggctgcctgtgtagctgttcttgtcttccttatttccctgtgaatgctttaataaatccccatcactaa
